United States Patent Application Publication US 2024/0309320 A1 - sequence listing, part 4

SEQ ID NO: 3903 - DNA, 1623 bp, Homo sapiens
  source 1..1623: mol_type = genomic DNA
atggatatgggcaacccaggaaccctttcgcccaccaaacctggttcccagtactatcagtattctagcaataatccccgaaggaggcctcttcacagtagtgccatggaggtacagacaaagaaagttcgaaaagttcctccaggtttgccatcttcagtctatgctccatcagcaagcactgccgactacaatagggactcgccaggctatccttcctccaaaccagcaaccagcactttccctagctccttcttcatgcaagatggccatcacagcagtgacccttggagctcctccagtgggatgaatcagcctggctatgcaggaatgttgggcaactcttctcatattccacagtccagcagctactgtagcctgcatccacatgaacgtttgagctatccatcacactcctcagcagacatcaattccagtcttcctccgatgtccactttccatcgtagtggtacaaaccattacagcacctcttcctgtacgcctcctgccaacgggacagacagtataatggcaaatagaggaagcggggcagccggcagctcccagactggagatgctctggggaaagcacttgcttcgatctattctccagatcacactaacaacagcttttcatcaaacccttcaactcctgttggctctcctccatctctctcagcaggcacagctgtttggtctagaaatggaggacaggcctcatcgtctcctaattatgaaggacccttacactctttgcaaagccgaattgaagatcgtttagaaagactggatgatgctattcatgttctccggaaccatgcagtgggcccatccacagctatgcctggtggtcatggggacatgcatggaatcattggaccttctcataatggagccatgggtggtctgggctcagggtatggaaccggccttctttcagccaacagacattcactcatggtggggacccatcgtgaagatggcgtggccctgagaggcagccattctcttctgccaaaccaggttccggttccacagcttcctgtccagtctgcgacttcccctgacctgaacccaccccaggacccttacagaggcatgccaccaggactacaggggcagagtgtctcctctggcagctctgagatcaaatccgatgacgagggtgatgagaacctgcaagacacgaaatcttcggaggacaagaaattagatgacgacaagaaggatatcaaatcaattactaggtcaagatctagcaataatgacgatgaggacctgacaccagagcagaaggcagagcgtgagaaggagcggaggatggccaacaatgcccgagagcgtctgcgggtccgtgacatcaacgaggctttcaaagagctcggccgcatggtgcagctccacctcaagagtgacaagccccagaccaagctcctgatcctccaccaggcggtggccgtcatcctcagtctggagcagcaagtccgagaaaggaatctgaatccgaaagctgcgtgtctgaaaagaagggaggaagagaaggtgtcctcagagcctccccctctctccttggccggcccacaccctggaatgggagacgcatcgaatcacatgggacagatg

SEQ ID NO: 3904 - DNA, 1941 bp, Homo sapiens
  source 1..1941: mol_type = genomic DNA
atgttttcacctcctgtgagcagtgggaaaaatggaccaacttctttggcaagtggacattttactggctcaaatgtagaagacagaagtagctcagggtcctgggggaatggaggacatccaagcccgtccaggaactatggagatgggactccctatgaccacatgaccagcagggaccttgggtcacatgacaatctctctccaccttttgtcaattccagaatacaaagtaaaacagaaaggggctcatactcatcttatgggagagaatcaaacttacagggttgccaccagcagagtctccttggaggtgacatggatatgggcaacccaggaaccctttcgcccaccaaacctggttcccagtactatcagtattctagcaataatccccgaaggaggcctcttcacagtagtgccatggaggtacagacaaagaaagttcgaaaagttcctccaggtttgccatcttcagtctatgctccatcagcaagcactgccgactacaatagggactcgccaggctatccttcctccaaaccagcaaccagcactttccctagctccttcttcatgcaagatggccatcacagcagtgacccttggagctcctccagtgggatgaatcagcctggctatgcaggaatgttgggcaactcttctcatattccacagtccagcagctactgtagcctgcatccacatgaacgtttgagctatccatcacactcctcagcagacatcaattccagtcttcctccgatgtccactttccatcgtagtggtacaaaccattacagcacctcttcctgtacgcctcctgccaacgggacagacagtataatggcaaatagaggaagcggggcagccggcagctcccagactggagatgctctggggaaagcacttgcttcgatctattctccagatcacactaacaacagcttttcatcaaacccttcaactcctgttggctctcctccatctctctcagcaggcacagctgtttggtctagaaatggaggacaggcctcatcgtctcctaattatgaaggacccttacactctttgcaaagccgaattgaagatcgtttagaaagactggatgatgctattcatgttctccggaaccatgcagtgggcccatccacagctatgcctggtggtcatggggacatgcatggaatcattggaccttctcataatggagccatgggtggtctgggctcagggtatggaaccggccttctttcagccaacagacattcactcatggtggggacccatcgtgaagatggcgtggccctgagaggcagccattctcttctgccaaaccaggttccggttccacagcttcctgtccagtctgcgacttcccctgacctgaacccaccccaggacccttacagaggcatgccaccaggactacaggggcagagtgtctcctctggcagctctgagatcaaatccgatgacgagggtgatgagaacctgcaagacacgaaatcttcggaggacaagaaattagatgacgacaagaaggatatcaaatcaattactaggtcaagatctagcaataatgacgatgaggacctgacaccagagcagaaggcagagcgtgagaaggagcggaggatggccaacaatgcccgagagcgtctgcgggtccgtgacatcaacgaggctttcaaagagctcggccgcatggtgcagctccacctcaagagtgacaagccccagaccaagctcctgatcctccaccaggcggtggccgtcatcctcagtctggagcagcaagtccgagaaaggaatctgaatccgaaagctgcgtgtctgaaaagaagggaggaagagaaggtgtcctcagagcctccccctctctccttggccggcccacaccctggaatgggagacgcatcgaatcacatgggacagatg

SEQ ID NO: 3905 - DNA, 1800 bp, Homo sapiens
  source 1..1800: mol_type = genomic DNA
atgaaggatatttttttccagtttatcatagccagagtgaggaagtgttattccctctcttgcttgcatacattgccagtagtgcctactttacgtaaaacagaaaggggctcatactcatcttatgggagagaatcaaacttacagggttgccaccagagtctccttggaggtgacatggatatgggcaacccaggaaccctttcgcccaccaaacctggttcccagtactatcagtattctagcaataatccccgaaggaggcctcttcacagtagtgccatggaggtacagacaaagaaagttcgaaaagttcctccaggtttgccatcttcagtctatgctccatcagcaagcactgccgactacaatagggactcgccaggctatccttcctccaaaccagcaaccagcactttccctagctccttcttcatgcaagatggccatcacagcagtgacccttggagctcctccagtgggatgaatcagcctggctatgcaggaatgttgggcaactcttctcatattccacagtccagcagctactgtagcctgcatccacatgaacgtttgagctatccatcacactcctcagcagacatcaattccagtcttcctccgatgtccactttccatcgtagtggtacaaaccattacagcacctcttcctgtacgcctcctgccaacgggacagacagtataatggcaaatagaggaagcggggcagccggcagctcccagactggagatgctctggggaaagcacttgcttcgatctattctccagatcacactaacaacagcttttcatcaaacccttcaactcctgttggctctcctccatctctctcagcaggcacagctgtttggtctagaaatggaggacaggcctcatcgtctcctaattatgaaggacccttacactctttgcaaagccgaattgaagatcgtttagaaagactggatgatgctattcatgttctccggaaccatgcagtgggcccatccacagctatgcctggtggtcatggggacatgcatggaatcattggaccttctcataatggagccatgggtggtctgggctcagggtatggaaccggccttctttcagccaacagacattcactcatggtggggacccatcgtgaagatggcgtggccctgagaggcagccattctcttctgccaaaccaggttccggttccacagcttcctgtccagtctgcgacttcccctgacctgaacccaccccaggacccttacagaggcatgccaccaggactacaggggcagagtgtctcctctggcagctctgagatcaaatccgatgacgagggtgatgagaacctgcaagacacgaaatcttcggaggacaagaaattagatgacgacaagaaggatatcaaatcaattactaggtcaagatctagcaataatgacgatgaggacctgacaccagagcagaaggcagagcgtgagaaggagcggaggatggccaacaatgcccgagagcgtctgcgggtccgtgacatcaacgaggctttcaaagagctcggccgcatggtgcagctccacctcaagagtgacaagccccagaccaagctcctgatcctccaccaggcggtggccgtcatcctcagtctggagcagcaagtccgagaaaggaatctgaatccgaaagctgcgtgtctgaaaagaagggaggaagagaaggtgtcctcagagcctccccctctctccttggccggcccacaccctggaatgggagacgcatcgaatcacatgggacagatg

SEQ ID NO: 3906 - DNA, 1875 bp, Homo sapiens
  source 1..1875: mol_type = genomic DNA
atggaagaggacagcagagatgtagaagacagaagtagctcagggtcctgggggaatggaggacatccaagcccgtccaggaactatggagatgggactccctatgaccacatgaccagcagggaccttgggtcacatgacaatctctctccaccttttgtcaattccagaatacaaagtaaaacagaaaggggctcatactcatcttatgggagagaatcaaacttacagggttgccaccagcagagtctccttggaggtgacatggatatgggcaacccaggaaccctttcgcccaccaaacctggttcccagtactatcagtattctagcaataatccccgaaggaggcctcttcacagtagtgccatggaggtacagacaaagaaagttcgaaaagttcctccaggtttgccatcttcagtctatgctccatcagcaagcactgccgactacaatagggactcgccaggctatccttcctccaaaccagcaaccagcactttccctagctccttcttcatgcaagatggccatcacagcagtgacccttggagctcctccagtgggatgaatcagcctggctatgcaggaatgttgggcaactcttctcatattccacagtccagcagctactgtagcctgcatccacatgaacgtttgagctatccatcacactcctcagcagacatcaattccagtcttcctccgatgtccactttccatcgtagtggtacaaaccattacagcacctcttcctgtacgcctcctgccaacgggacagacagtataatggcaaatagaggaagcggggcagccggcagctcccagactggagatgctctggggaaagcacttgcttcgatctattctccagatcacactaacaacagcttttcatcaaacccttcaactcctgttggctctcctccatctctctcagcaggcacagctgtttggtctagaaatggaggacaggcctcatcgtctcctaattatgaaggacccttacactctttgcaaagccgaattgaagatcgtttagaaagactggatgatgctattcatgttctccggaaccatgcagtgggcccatccacagctatgcctggtggtcatggggacatgcatggaatcattggaccttctcataatggagccatgggtggtctgggctcagggtatggaaccggccttctttcagccaacagacattcactcatggtggggacccatcgtgaagatggcgtggccctgagaggcagccattctcttctgccaaaccaggttccggttccacagcttcctgtccagtctgcgacttcccctgacctgaacccaccccaggacccttacagaggcatgccaccaggactacaggggcagagtgtctcctctggcagctctgagatcaaatccgatgacgagggtgatgagaacctgcaagacacgaaatcttcggaggacaagaaattagatgacgacaagaaggatatcaaatcaattactagcaataatgacgatgaggacctgacaccagagcagaaggcagagcgtgagaaggagcggaggatggccaacaatgcccgagagcgtctgcgggtccgtgacatcaacgaggctttcaaagagctcggccgcatggtgcagctccacctcaagagtgacaagccccagaccaagctcctgatcctccaccaggcggtggccgtcatcctcagtctggagcagcaagtccgagaaaggaatctgaatccgaaagctgcgtgtctgaaaagaagggaggaagagaaggtgtcctcagagcctccccctctctccttggccggcccacaccctggaatgggagacgcatcgaatcacatgggacagatg

SEQ ID NO: 3907 - DNA, 2010 bp, Homo sapiens
  source 1..2010: mol_type = genomic DNA
atgcatcaccaacagcgaatggctgccttagggacggacaaagagctgagtgatttactggatttcagtgcgatgttttcacctcctgtgagcagtgggaaaaatggaccaacttctttggcaagtggacattttactggctcaaatgtagaagacagaagtagctcagggtcctgggggaatggaggacatccaagcccgtccaggaactatggagatgggactccctatgaccacatgaccagcagggaccttgggtcacatgacaatctctctccaccttttgtcaattccagaatacaaagtaaaacagaaaggggctcatactcatcttatgggagagaatcaaacttacagggttgccaccagcagagtctccttggaggtgacatggatatgggcaacccaggaaccctttcgcccaccaaacctggttcccagtactatcagtattctagcaataatccccgaaggaggcctcttcacagtagtgccatggaggtacagacaaagaaagttcgaaaagttcctccaggtttgccatcttcagtctatgctccatcagcaagcactgccgactacaatagggactcgccaggctatccttcctccaaaccagcaaccagcactttccctagctccttcttcatgcaagatggccatcacagcagtgacccttggagctcctccagtgggatgaatcagcctggctatgcaggaatgttgggcaactcttctcatattccacagtccagcagctactgtagcctgcatccacatgaacgtttgagctatccatcacactcctcagcagacatcaattccagtcttcctccgatgtccactttccatcgtagtggtacaaaccattacagcacctcttcctgtacgcctcctgccaacgggacagacagtataatggcaaatagaggaagcggggcagccggcagctcccagactggagatgctctggggaaagcacttgcttcgatctattctccagatcacactaacaacagcttttcatcaaacccttcaactcctgttggctctcctccatctctctcaggcacagctgtttggtctagaaatggaggacaggcctcatcgtctcctaattatgaaggacccttacactctttgcaaagccgaattgaagatcgtttagaaagactggatgatgctattcatgttctccggaaccatgcagtgggcccatccacagctatgcctggtggtcatggggacatgcatggaatcattggaccttctcataatggagccatgggtggtctgggctcagggtatggaaccggccttctttcagccaacagacattcactcatggtggggacccatcgtgaagatggcgtggccctgagaggcagccattctcttctgccaaaccaggttccggttccacagcttcctgtccagtctgcgacttcccctgacctgaacccaccccaggacccttacagaggcatgccaccaggactacaggggcagagtgtctcctctggcagctctgagatcaaatccgatgacgagggtgatgagaacctgcaagacacgaaatcttcggaggacaagaaattagatgacgacaagaaggatatcaaatcaattactaggtcaagatctagcaataatgacgatgaggacctgacaccagagcagaaggcagagcgtgagaaggagcggaggatggccaacaatgcccgagagcgtctgcgggtccgtgacatcaacgaggctttcaaagagctcggccgcatggtgcagctccacctcaagagtgacaagccccagaccaagctcctgatcctccaccaggcggtggccgtcatcctcagtctggagcagcaagtccgagaaaggaatctgaatccgaaagctgcgtgtctgaaaagaagggaggaagagaaggtgtcctcagagcctccccctctctccttggccggcccacaccctggaatgggagacgcatcgaatcacatgggacagatg

SEQ ID NO: 3908 - DNA, 1521 bp, Homo sapiens
  source 1..1521: mol_type = genomic DNA
atgtactgcgcatacacaatcccgggcatgggcggcaactctttgatgtactactataatgggaaagcggtctatgctccatcagcaagcactgccgactacaatagggactcgccaggctatccttcctccaaaccagcaaccagcactttccctagctccttcttcatgcaagatggccatcacagcagtgacccttggagctcctccagtgggatgaatcagcctggctatgcaggaatgttgggcaactcttctcatattccacagtccagcagctactgtagcctgcatccacatgaacgtttgagctatccatcacactcctcagcagacatcaattccagtcttcctccgatgtccactttccatcgtagtggtacaaaccattacagcacctcttcctgtacgcctcctgccaacgggacagacagtataatggcaaatagaggaagcggggcagccggcagctcccagactggagatgctctggggaaagcacttgcttcgatctattctccagatcacactaacaacagcttttcatcaaacccttcaactcctgttggctctcctccatctctctcagcaggcacagctgtttggtctagaaatggaggacaggcctcatcgtctcctaattatgaaggacccttacactctttgcaaagccgaattgaagatcgtttagaaagactggatgatgctattcatgttctccggaaccatgcagtgggcccatccacagctatgcctggtggtcatggggacatgcatggaatcattggaccttctcataatggagccatgggtggtctgggctcagggtatggaaccggccttctttcagccaacagacattcactcatggtggggacccatcgtgaagatggcgtggccctgagaggcagccattctcttctgccaaaccaggttccggttccacagcttcctgtccagtctgcgacttcccctgacctgaacccaccccaggacccttacagaggcatgccaccaggactacaggggcagagtgtctcctctggcagctctgagatcaaatccgatgacgagggtgatgagaacctgcaagacacgaaatcttcggaggacaagaaattagatgacgacaagaaggatatcaaatcaattactagcaataatgacgatgaggacctgacaccagagcagaaggcagagcgtgagaaggagcggaggatggccaacaatgcccgagagcgtctgcgggtccgtgacatcaacgaggctttcaaagagctcggccgcatggtgcagctccacctcaagagtgacaagccccagaccaagctcctgatcctccaccaggcggtggccgtcatcctcagtctggagcagcaagtccgagaaaggaatctgaatccgaaagctgcgtgtctgaaaagaagggaggaagagaaggtgtcctcagagcctccccctctctccttggccggcccacaccctggaatgggagacgcatcgaatcacatgggacagatg

SEQ ID NO: 3909 - DNA, 1992 bp, Homo sapiens
  source 1..1992: mol_type = genomic DNA
atgcaacgggcaaaaactgaactgttcaggcttcagattgtaactgacgatctgaggaaaaatgagatgttttcacctcctgtgagcagtgggaaaaatggaccaacttctttggcaagtggacattttactggctcaaatgtagaagacagaagtagctcagggtcctgggggaatggaggacatccaagcccgtccaggaactatggagatgggactccctatgaccacatgaccagcagggaccttgggtcacatgacaatctctctccaccttttgtcaattccagaatacaaagtaaaacagaaaggggctcatactcatcttatgggagagaatcaaacttacagggttgccaccagcagagtctccttggaggtgacatggatatgggcaacccaggaaccctttcgcccaccaaacctggttcccagtactatcagtattctagcaataatccccgaaggaggcctcttcacagtagtgccatggaggtacagacaaagaaagttcgaaaagttcctccaggtttgccatcttcagtctatgctccatcagcaagcactgccgactacaatagggactcgccaggctatccttcctccaaaccagcaaccagcactttccctagctccttcttcatgcaagatggccatcacagcagtgacccttggagctcctccagtgggatgaatcagcctggctatgcaggaatgttgggcaactcttctcatattccacagtccagcagctactgtagcctgcatccacatgaacgtttgagctatccatcacactcctcagcagacatcaattccagtcttcctccgatgtccactttccatcgtagtggtacaaaccattacagcacctcttcctgtacgcctcctgccaacgggacagacagtataatggcaaatagaggaagcggggcagccggcagctcccagactggagatgctctggggaaagcacttgcttcgatctattctccagatcacactaacaacagcttttcatcaaacccttcaactcctgttggctctcctccatctctctcaggcacagctgtttggtctagaaatggaggacaggcctcatcgtctcctaattatgaaggacccttacactctttgcaaagccgaattgaagatcgtttagaaagactggatgatgctattcatgttctccggaaccatgcagtgggcccatccacagctatgcctggtggtcatggggacatgcatggaatcattggaccttctcataatggagccatgggtggtctgggctcagggtatggaaccggccttctttcagccaacagacattcactcatggtggggacccatcgtgaagatggcgtggccctgagaggcagccattctcttctgccaaaccaggttccggttccacagcttcctgtccagtctgcgacttcccctgacctgaacccaccccaggacccttacagaggcatgccaccaggactacaggggcagagtgtctcctctggcagctctgagatcaaatccgatgacgagggtgatgagaacctgcaagacacgaaatcttcggaggacaagaaattagatgacgacaagaaggatatcaaatcaattactagcaataatgacgatgaggacctgacaccagagcagaaggcagagcgtgagaaggagcggaggatggccaacaatgcccgagagcgtctgcgggtccgtgacatcaacgaggctttcaaagagctcggccgcatggtgcagctccacctcaagagtgacaagccccagaccaagctcctgatcctccaccaggcggtggccgtcatcctcagtctggagcagcaagtccgagaaaggaatctgaatccgaaagctgcgtgtctgaaaagaagggaggaagagaaggtgtcctcagagcctccccctctctccttggccggcccacaccctggaatgggagacgcatcgaatcacatgggacagatg

SEQ ID NO: 3910 - DNA, 807 bp, Homo sapiens
  source 1..807: mol_type = genomic DNA
atgtacaaagagaccgtctactccgccttcaatctgctcatgcattacccacccccctcgggagcagggcagcacccccagccgcagcccccgctgcacaaggccaatcagcccccccacggtgtcccccaactctctctctacgaacatttcaacagcccacatcccacccctgcacctgcggacatcagccagaagcaagttcacaggcctctgcagacccctgacctctctggcttctactccctgacctcaggcagcatggggcagctcccccacactgtgagctggttcacccacccatccttgatgctaggttctggtgtacctggtcacccagcagccatcccccacccggccattgtgcccccctcagggaagcaggagctgcagcccttcgaccgcaacctgaagacacaagcagagtccaaggcagagaaggaggccaagaagccaaccatcaagaagcccctcaatgccttcatgctgtacatgaaggagatgagagccaaggtcattgcagagtgcacacttaaggagagcgctgccatcaaccagatcctgggccgcaggtggcacgcgctgtcgcgagaagagcaggccaagtactatgagctggcccgcaaggagaggcagctgcacatgcagctatacccaggctggtcagcgcgggacaactacgggaagaagaagaggcggtcgagggaaaagcaccaagaatccaccacaggaggaaaaagaaatgcattcggtacttacccggagaaggccgctgccccagccccgttccttccgatgacagtgctc

SEQ ID NO: 3911 - DNA, 807 bp, Homo sapiens
  source 1..807: mol_type = genomic DNA
atgtacaaagagaccgtctactccgccttcaatctgctcatgcattacccacccccctcgggagcagggcagcacccccagccgcagcccccgctgcacaaggccaatcagcccccccacggtgtcccccaactctctctctacgaacatttcaacagcccacatcccacccctgcacctgcggacatcagccagaagcaagttcacaggcctctgcagacccctgacctctctggcttctactccctgacctcaggcagcatggggcagctcccccacactgtgagctggttcacccacccatccttgatgctaggttctggtgtacctggtcacccagcagccatcccccacccggccattgtgcccccctcagggaagcaggagctgcagcccttcgaccgcaacctgaagacacaagcagagtccaaggcagagaaggaggccaagaagccaaccatcaagaagcccctcaatgccttcatgctgtacatgaaggagatgagagccaaggtcattgcagagtgcacacttaaggagagcgctgccatcaaccagatcctgggccgcaggtggcacgcgctgtcgcgagaagagcaggccaagtactatgagctggcccgcaaggagaggcagctgcacatgcagctatacccaggctggtcagcgcgggacaactacgggaagaagaagaggcggtcgagggaaaagcaccaagaatccaccacagagacaaactggcccagagaactcaaggatggtaatggacaagagtcactgtccatgtcttcttcctctagcccagct

SEQ ID NO: 3912 - DNA, 804 bp, Homo sapiens
  source 1..804: mol_type = genomic DNA
atgtacaaagagaccgtctactccgccttcaatctgctcatgcattacccacccccctcgggagcagggcagcacccccagccgcagcccccgctgcacaaggccaatcagcccccccacggtgtcccccaactctctctctacgaacatttcaacagcccacatcccacccctgcacctgcggacatcagccagaagcaagttcacaggcctctgcagacccctgacctctctggcttctactccctgacctcaggcagcatggggcagctcccccacactgtgagctggttcacccacccatccttgatgctaggttctggtgtacctggtcacccagcagccatcccccacccggccattgtgcccccctcagggaagcaggagctgcagcccttcgaccgcaacctgaagacacaagcagagtccaaggcagagaaggaggccaagaagccaaccatcaagaagcccctcaatgccttcatgctgtacatgaaggagatgagagccaaggtcattgcagagtgcacacttaaggagagcgctgccatcaaccagatcctgggccgcaggtggcacgcgctgtcgcgagaagagcaggccaagtactatgagctggcccgcaaggagaggcagctgcacatgcagctatacccaggctggtcagcgcgggacaactacgggaagaagaagaggcggtcgagggaaaagcaccaagaatccaccacagaccctggctcgcctaagaaatgccgtgctcgctttggcctcaaccagcagacggattggtgtggtccgtgcaga

SEQ ID NO: 3913 - DNA, 2037 bp, Homo sapiens
  source 1..2037: mol_type = genomic DNA
atgaaccagccgcagaggatggcgcctgtgggcacagacaaggagctcagtgacctcctggacttcagcatgatgttcccgctgcctgtcaccaacgggaagggccggcccgcctccctggccggggcgcagttcggaggttcaggtcttgaggaccggcccagctcaggctcctggggcagcggcgaccagagcagctcctcctttgaccccagccggaccttcagcgagggcacccacttcactgagtcgcacagcagcctctcttcatccacattcctgggaccgggactcggaggtgagtgcctggcctggtgcggtccctctgctgtgcacagatgtgcagacgtgggccttggcatggtcagtgcacgcacagcgccaggcaagagcggtgagcggggcgcctatgcctccttcgggagagacgcaggcgtgggcggcctgactcaggctggcttcctgtcaggcgagctggccctcaacagccccgggcccctgtccccttcgggcatgaaggggacctcccagtactacccctcctactccggcagctcccggcggagagcggcagacggcagcctagacacgcagcccaagaaggtccggaaggtcccgccgggtcttccatcctcggtgtacccacccagctcaggtgaggactacggcagggatgccaccgcctacccgtccgccaagacccccagcagcacctatcccgcccccttctacgtggcagatggcagcctgcacccctcagccgagctctggagtcccccgggccaggcgggcttcgggcccatgctgggtgggggctcatccccgctgcccctcccgcccggtagcggcccggtgggcagcagtggaagcagcagcacgtttggtggcctgcaccagcacgagcgtatgggctaccagctgcatggagcagaggtgaacggtgggctcccatctgcatcctccttctcctcagcccccggagccacgtacggcggcgtctccagccacacgccgcctgtcagcggggccgacagcctcctgggctcccgagggaccacagctggcagctccggggatgccctcggcaaagcactggcctcgatctactccccggatcactcaagcaataacttctcgtccagcccttctacccccgtgggctccccccagggcctggcaggaacgtcacagtggcctcgagcaggagcccccggtgccttatcgcccagctacgacgggggtctccacggcctgcagagtaagatagaagaccacctggacgaggccatccacgtgctccgcagccacgccgtgggcacagccggcgacatgcacacgctgctgcctggccacggggcgctggcctcaggtttcaccggccccatgtcactgggcgggcggcacgcaggcctggttggaggcagccaccccgaggacggcctcgcaggcagcaccagcctcatgcacaaccacgcggccctccccagccagccaggcaccctccctgacctgtctcggcctcccgactcctacagtgggctagggcgagcaggtgccacggcggccgccagcgagatcaagcgggaggagaaggaggacgaggagaacacgtcagcggctgaccactcggaggaggagaagaaggagctgaaggccccccgggcccggaccagtacggacgaggtgctgtccctggaggagaaagacctgagggaccgggagaggcgcatggccaataacgcgcgggagcgggtgcgcgtgcgggatattaacgaggccttccgggagctggggcgcatgtgccagatgcacctcaagtcggacaaagcgcagaccaagctgctcatcctgcagcaggccgtgcaggtcatcctggggctggagcagcaggtgcgagagcggaacctgaatcccaaagcagcctgtttgaaacggcgagaagaggaaaaggtgtcaggtgtggttggagacccccagatggtgctttcagctccccacccaggcctgagcgaagcccacaaccccgccgggcacatg

SEQ ID NO: 3914 - DNA, 1974 bp, Homo sapiens
  source 1..1974: mol_type = genomic DNA
atgaaccagccgcagaggatggcgcctgtgggcacagacaaggagctcagtgacctcctggacttcagcatgatgttcccgctgcctgtcaccaacgggaagggccggcccgcctccctggccggggcgcagttcggaggttcaggcaagagcggtgagcggggcgcctatgcctccttcgggagagacgcaggcgtgggcggcctgactcaggctggcttcctgtcaggcgagctggccctcaacagccccgggcccctgtccccttcgggcatgaaggggacctcccagtactacccctcctactccggcagctcccggcggagagcggcagacggcagcctagacacgcagcccaagaaggtccggaaggtcccgccgggtcttccatcctcggtgtacccacccagctcaggtgaggactacggcagggatgccaccgcctacccgtccgccaagacccccagcagcacctatcccgcccccttctacgtggcagatggcagcctgcacccctcagccgagctctggagtcccccgggccaggcgggcttcgggcccatgctgggtgggggctcatccccgctgcccctcccgcccggtagcggcccggtgggcagcagtggaagcagcagcacgtttggtggcctgcaccagcacgagcgtatgggctaccagctgcatggagcagaggtgaacggtgggctcccatctgcatcctccttctcctcagcccccggagccacgtacggcggcgtctccagccacacgccgcctgtcagcggggccgacagcctcctgggctcccgagggaccacagctggcagctccggggatgccctcggcaaagcactggcctcgatctactccccggatcactcaagcaataacttctcgtccagcccttctacccccgtgggctccccccagggcctggcaggaacgtcacagtggcctcgagcaggagcccccggtgccttatcgcccagctacgacgggggtctccacggcctgcagagtaagatagaagaccacctggacgaggccatccacgtgctccgcagccacgccgtgggcacagccggcgacatgcacacgctgctgcctggccacggggcgctggcctcaggtttcaccggccccatgtcactgggcgggcggcacgcaggcctggttggaggcagccaccccgaggacggcctcgcaggcagcaccagcctcatgcacaaccacgcggccctccccagccagccaggcaccctccctgacctgtctcggcctcccgactcctacagtgggctagggcgagcaggtgccacggcggccgccagcgagatcaagcgggaggagaaggaggacgaggagaacacgtcagcggctgaccactcggaggaggagaagaaggagctgaaggccccccgggcccggaccaggtgccaacccacccctcggcactccccaccctcaccccatcaggacgcacatgtgcacaggccacacgcacaccgcacccacactgggaggccgtcggcgggccccacgctcttcccccaacctcactgtctccctctggccccctcccggcgccctccccatagcccagacgaggacgaggacgaccttctccccccagagcagaaggccgagcgggagaaggagcgccgggtggccaataacgcccgggagcggctgcgggtccgtgacatcaacgaggcctttaaggagctggggcgcatgtgccaactgcacctcaacagcgagaagccccagaccaaactgctcatcctgcaccaggctgtctcggtcatcctgaacttggagcagcaagtgcgagagcggaacctgaatcccaaagcagcctgtttgaaacggcgagaagaggaaaaggtgtcaggtgtggttggagacccccagatggtgctttcagctccccacccaggcctgagcgaagcccacaaccccgccgggcacatg

SEQ ID NO: 3915 - DNA, 1962 bp, Homo sapiens
  source 1..1962: mol_type = genomic DNA
atgaaccagccgcagaggatggcgcctgtgggcacagacaaggagctcagtgacctcctggacttcagcatgatgttcccgctgcctgtcaccaacgggaagggccggcccgcctccctggccggggcgcagttcggaggttcaggtcttgaggaccggcccagctcaggctcctggggcagcggcgaccagagcagctcctcctttgaccccagccggaccttcagcgagggcacccacttcactgagtcgcacagcagcctctcttcatccacattcctgggaccgggactcggaggcaagagcggtgagcggggcgcctatgcctccttcgggagagacgcaggcgtgggcggcctgactcaggctggcttcctgtcaggcgagctggccctcaacagccccgggcccctgtccccttcgggcatgaaggggacctcccagtactacccctcctactccggcagctcccggcggagagcggcagacggcagcctagacacgcagcccaagaaggtccggaaggtcccgccgggtcttccatcctcggtgtacccacccagctcaggtgaggactacggcagggatgccaccgcctacccgtccgccaagacccccagcagcacctatcccgcccccttctacgtggcagatggcagcctgcacccctcagccgagctctggagtcccccgggccaggcgggcttcgggcccatgctgggtgggggctcatccccgctgcccctcccgcccggtagcggcccggtgggcagcagtggaagcagcagcacgtttggtggcctgcaccagcacgagcgtatgggctaccagctgcatggagcagaggtgaacggtgggctcccatctgcatcctccttctcctcagcccccggagccacgtacggcggcgtctccagccacacgccgcctgtcagcggggccgacagcctcctgggctcccgagggaccacagctggcagctccggggatgccctcggcaaagcactggcctcgatctactccccggatcactcaagcaataacttctcgtccagcccttctacccccgtgggctccccccagggcctggcaggaacgtcacagtggcctcgagcaggagcccccggtgccttatcgcccagctacgacgggggtctccacggcctgcagagtaagatagaagaccacctggacgaggccatccacgtgctccgcagccacgccgtgggcacagccggcgacatgcacacgctgctgcctggccacggggcgctggcctcaggtttcaccggccccatgtcactgggcgggcggcacgcaggcctggttggaggcagccaccccgaggacggcctcgcaggcagcaccagcctcatgcacaaccacgcggccctccccagccagccaggcaccctccctgacctgtctcggcctcccgactcctacagtgggctagggcgagcaggtgccacggcggccgccagcgagatcaagcgggaggagaaggaggacgaggagaacacgtcagcggctgaccactcggaggaggagaagaaggagctgaaggccccccgggcccggaccagcccagacgaggacgaggacgaccttctccccccagagcagaaggccgagcgggagaaggagcgccgggtggccaataacgcccgggagcggctgcgggtccgtgacatcaacgaggcctttaaggagctggggcgcatgtgccaactgcacctcaacagcgagaagccccagaccaaactgctcatcctgcaccaggctgtctcggtcatcctgaacttggagcagcaagtgcgagagcggaacctgaatcccaaagcagcctgtttgaaacggcgagaagaggaaaaggtgtcaggtgtggttggagacccccagatggtgctttcagctccccacccaggcctgagcgaagcccacaaccccgccgggcacatg

SEQ ID NO: 3916 - DNA, 1953 bp, Homo sapiens
  source 1..1953: mol_type = genomic DNA
atgaaccagccgcagaggatggcgcctgtgggcacagacaaggagctcagtgacctcctggacttcagcatgatgttcccgctgcctgtcaccaacgggaagggccggcccgcctccctggccggggcgcagttcggaggttcaggtcttgaggaccggcccagctcaggctcctggggcagcggcgaccagagcagctcctcctttgaccccagccggaccttcagcgagggcacccacttcactgagtcgcacagcagcctctcttcatccacattcctgggaccgggactcggaggcaagagcggtgagcggggcgcctatgcctccttcgggagagacgcaggcgtgggcggcctgactcaggctggcttcctgtcaggcgagctggccctcaacagccccgggcccctgtccccttcgggcatgaaggggacctcccagtactacccctcctactccggcagctcccggcggagagcggcagacggcagcctagacacgcagcccaagaaggtccggaaggtcccgccgggtcttccatcctcggtgtacccacccagctcaggtgaggactacggcagggatgccaccgcctacccgtccgccaagacccccagcagcacctatcccgcccccttctacgtggcagatggcagcctgcacccctcagccgagctctggagtcccccgggccaggcgggcttcgggcccatgctgggtgggggctcatccccgctgcccctcccgcccggtagcggcccggtgggcagcagtggaagcagcagcacgtttggtggcctgcaccagcacgagcgtatgggctaccagctgcatggagcagaggtgaacggtgggctcccatctgcatcctccttctcctcagcccccggagccacgtacggcggcgtctccagccacacgccgcctgtcagcggggccgacagcctcctgggctcccgagggaccacagctggcagctccggggatgccctcggcaaagcactggcctcgatctactccccggatcactcaagcaataacttctcgtccagcccttctacccccgtgggctccccccagggcctggcaggaacgtcacagtggcctcgagcaggagcccccggtgccttatcgcccagctacgacgggggtctccacggcctgcagagtaagatagaagaccacctggacgaggccatccacgtgctccgcagccacgccgtgggcacagccggcgacatgcacacgctgctgcctggccacggggcgctggcctcaggtttcaccggccccatgtcactgggcgggcggcacgcaggcctggttggaggcagccaccccgaggacggcctcgcaggcagcaccagcctcatgcacaaccacgcggccctccccagccagccaggcaccctccctgacctgtctcggcctcccgactcctacagtgggctagggcgagcaggtgccacggcggccgccagcgagatcaagcgggaggagaaggaggacgaggagaacacgtcagcggctgaccactcggaggaggagaagaaggagctgaaggccccccgggcccggaccagcagtacggacgaggtgctgtccctggaggagaaagacctgagggaccgggagaggcgcatggccaataacgcgcgggagcgggtgcgcgtgcgggatattaacgaggccttccgggagctggggcgcatgtgccagatgcacctcaagtcggacaaagcgcagaccaagctgctcatcctgcagcaggccgtgcaggtcatcctggggctggagcagcaggtgcgagagcggaacctgaatcccaaagcagcctgtttgaaacggcgagaagaggaaaaggtgtcaggtgtggttggagacccccagatggtgctttcagctccccacccaggcctgagcgaagcccacaaccccgccgggcacatg

SEQ ID NO: 3917 - DNA, 1800 bp, Homo sapiens
  source 1..1800: mol_type = genomic DNA
atgaaccagccgcagaggatggcgcctgtgggcacagacaaggagctcagtgacctcctggacttcagcatgatgttcccgctgcctgtcaccaacgggaagggccggcccgcctccctggccggggcgcagttcggaggttcaggcaagagcggtgagcggggcgcctatgcctccttcgggagagacgcaggcgtgggcggcctgactcaggctggcttcctgtcaggcgagctggccctcaacagccccgggcccctgtccccttcgggcatgaaggggacctcccagtactacccctcctactccggcagctcccggcggagagcggcagacggcagcctagacacgcagcccaagaaggtccggaaggtcccgccgggtcttccatcctcggtgtacccacccagctcaggtgaggactacggcagggatgccaccgcctacccgtccgccaagacccccagcagcacctatcccgcccccttctacgtggcagatggcagcctgcacccctcagccgagctctggagtcccccgggccaggcgggcttcgggcccatgctgggtgggggctcatccccgctgcccctcccgcccggtagcggcccggtgggcagcagtggaagcagcagcacgtttggtggcctgcaccagcacgagcgtatgggctaccagctgcatggagcagaggtgaacggtgggctcccatctgcatcctccttctcctcagcccccggagccacgtacggcggcgtctccagccacacgccgcctgtcagcggggccgacagcctcctgggctcccgagggaccacagctggcagctccggggatgccctcggcaaagcactggcctcgatctactccccggatcactcaagcaataacttctcgtccagcccttctacccccgtgggctccccccagggcctggcaggaacgtcacagtggcctcgagcaggagcccccggtgccttatcgcccagctacgacgggggtctccacggcctgcagagtaagatagaagaccacctggacgaggccatccacgtgctccgcagccacgccgtgggcacagccggcgacatgcacacgctgctgcctggccacggggcgctggcctcaggtttcaccggccccatgtcactgggcgggcggcacgcaggcctggttggaggcagccaccccgaggacggcctcgcaggcagcaccagcctcatgcacaaccacgcggccctccccagccagccaggcaccctccctgacctgtctcggcctcccgactcctacagtgggctagggcgagcaggtgccacggcggccgccagcgagatcaagcgggaggagaaggaggacgaggagaacacgtcagcggctgaccactcggaggaggagaagaaggagctgaaggccccccgggcccggaccagcagtacggacgaggtgctgtccctggaggagaaagacctgagggaccgggagaggcgcatggccaataacgcgcgggagcgggtgcgcgtgcgggatattaacgaggccttccgggagctggggcgcatgtgccagatgcacctcaagtcggacaaagcgcagaccaagctgctcatcctgcagcaggccgtgcaggtcatcctggggctggagcagcaggtgcgagagcggaacctgaatcccaaagcagcctgtttgaaacggcgagaagaggaaaaggtgtcaggtgtggttggagacccccagatggtgctttcagctccccacccaggcctgagcgaagcccacaaccccgccgggcacatg

SEQ ID NO: 3918 - DNA, 5505 bp, Homo sapiens
  source 1..5505: mol_type = genomic DNA
atggcaaactcgacggggaaggcgcctccggacgagcggagaaagggactcgctttcctggacgagctgcggcagttccaccacagcagagggtcgccttttaaaaaaatccctgcggtgggtgggaaggagctggatcttcacggtctctacaccagagtcactactttaggcggattcgcgaaggtttctgagaagaatcagtggggagaaattgttgaagagttcaactttcccagaagttgttctaacgctgcctttgctttaaaacagtattacttgcgttacctagaaaagtacgagaaagttcatcattttggggaggatgatgatgaggtaccaccaggcaatccaaagccacagcttcctattggtgcaattccatcttcctacaattaccagcaacacagtgtgtcggattatctgcgtcaaagttatgggctgtccatggactttaattcgccaaatgattataataaattggtgctttcactgttatctggactcccaaatgaagtggactttgctattaacgtatgcactctcctatcaaatgaaagcaagcacgtcatgcaacttgaaaaagatcctaaaatcatcactttactacttgctaatgccggggtgtttgacgacactttaggatccttttccactgtatttggagaagaatggaaagagaagactgatagagacttcgttaagttttggaaagacatcgttgatgataatgaagttcgtgacctcatttctgacagaaacaagtctcatgaaggtacatcaggagaatggatttgggagtctttatttcatccacctcgaaagctgggcattaacgatattgaaggacagcgggtacttcagattgcagtgattttgagaaatctttcctttgaggagggcaatgttaagctcttggcagctaatcgtacctgtcttcgtttcctattactttctgcacatagtcattttatttctttaaggcaattaggccttgacacattaggaaatattgcagctgagcttttactggaccctgttgatttcaaaactactcatctgatgtttcatactgttacaaaatgtctaatgtcaagggatagatttttaaagatgagaggcatggaaattttgggaaatctttgcaaagcagaagataatggtgttttaatttgtgaatatgtggatcaggattcctacagagagatcatttgtcatctcactttacctgatgtgctgcttgtaatctcaacactcgaggtgctatacatgctcacggaaatgggagatgttgcttgcacaaaaattgcaaaagtagaaaagagcatagacatgttagtgtgtctggtttctatggatattcagatgtttggccctgatgcactagctgcggtaaaactcattgaacacccaagttccagtcatcaaatgttatctgaaattaggccacaagctatagagcaagtccaaacccagactcatgtagcatctgccccagcttccagagcagttgtagcgcagcatgttgctccacctccaggaatagtggaaatagatagtgagaagtttgcttgtcagtggctaaatgctcattttgaagtaaatccagattgttctgtttctcgagcagaaatgtattctgaatacctctcgacttgcagtaaattagctcgtggtggaatcctaacatcaactggattttataaatgtcttagaacggtctttccaaatcatacagtgaagagagtggaggattccagtagcaatgggcaggcacatattcatgtggtaggagtaaaacggagggctataccacttcccattcagatgtactatcagcagcaaccagtttctacttctgttgttcgtgttgattctgttcctgatgtatctcctgctccttcacctgcaggaatccctcatggatcacaaaccataggaaaccattttcagaggactcctgttgccaaccaatcttcaaatctgactgcaacacaaatgtcttttcctgtacaaggtgttcatactgtggcacaaactgtttcaagaattccacaaaatccttcacctcatacccaccagcaacaaaatgctccagtgactgtcattcaaagtaaagctccaattccttgtgaagttgttaaggctacagttatccagaattccataccccagacaggagttcctgttagtattgctgttggaggaggacctccacagagttctgttgttcagaatcatagtacagggccacaacctgttacagttgtgaattctcagacattgcttcaccatccatctgtaattccacagcagtctccattacacacagtggtaccaggacagatcccttcaggcactcctgttacagtaattcaacaagctgtcccacagagtcatatgtttggcagagtacagaacataccagcatgtacttctacagtttcacagggtcaacagttaatcaccacatcaccccaacctgtgcaaacttcatctcaacagacatcagctggtagccagtcacaagatactgttatcatagcacccccacagtatgtaacaacttctgcatccaatattgtctcagcaacttcagtacagaattttcaggtagctacaggacaaatggttactattgctggtgtcccaagtccacaagcctcaagggtagggtttcagaacattgcaccaaaacctctcccttctcagcaagtttcatctacagtggtacagcagcctattcaacaaccacagcagccaacccaacaaagcgtagtgattgtaagccagccagctcaacaaggtcaaacttatgcaccagccattcaccaaattgttcttgctaatccagcagctcttccagctggtcagacagttcagctaactggacaacctaacataactccatcttcttcaccatcacctgtcccagctactaataaccaagtccctactgccatgtcgtcgtcctctacccctcaatcacagggaccacctcctactgtcagtcaaatgttatctgtgaaaaggcagcaacagcagcaacattcaccagcacccccaccacagcaggtacaagtacaagttcagcagccccaacaagtacagatgcaagttcaacctcaacagtcgaatgcaggagttggtcagcctgcctctggtgagtcgagtctgattaaacagcttctgcttccgaaacgtggtccttcaacaccaggtggtaagcttattctcccagctccacagattcctccccctaataatgcaagagctcctagccctcaggtggtctatcaggtggccagtaaccaagccgcaggttttggagtgcaggggcaaactccagctcagcagctattggttgggcagcaaaatgttcagttggtcccaagtgcaatgccaccctcagggggagtacaaactgtgcccatttcgaacttacaaatattgccaggtccactgatctcaaatagcccagcaaccattttccaagggacttctggcaaccaggtaaccataacagttgtgccaaatacgagttttgcacctgcaactgtgagtcagggaaatgcaactcagctcattgctccagcaggaattaccatgagcggaacgcagacaggagttggacttccagtacaaacgcttccagccactcaagcatctcctgctggacaatcatcatgtactactgctactcccccattcaaaggtgataaaataatttgccaaaaggaggaggaagcaaaggaagcaacaggtttacatgttcatgaacgtaaaattgaagtcatggagaacccgtcctgccgacgaggagccacaaacaccagcaatggggatacaaaggaaaatgaaatgcatgtgggaagtcttttaaatgggagaaagtacagtgactcaagtctacctccttcaaactcagggaaaattcaaagtgagactaatcagtgctcactaatcagtaatgggccatcattggaattaggtgagaatggagcatctgggaaacagaactcagaacaaatagacatgcaagatatcaaaagtgatttgagaaaaccgctagttaatggaatctgtgattttgataaaggagatggttctcatttaagcaaaaacattccaaatcataaaacttccaatcatgtaggaaatggtgagatatctccaatggaaccacaagggactttagatatcactcagcaagatactgccaaaggtgatcaactagaaagaatttctaatggacctgtattaactttgggtggttcatctgtgagcagtatacaggaggcttcaaatgcggcaacacagcaatttagtggtactgatttgcttaatggacctctagcttcaagtttgaattcagatgtgcctcagcaacgcccaagtgtagttgtctcaccacattctacaacctctgttatacagggacatcaaatcatagcagttcccgactcaggatcaaaagtatcccattctcctgccctatcatctgacgttcggtctacaaatggcacagcagaatgcaaaactgtaaagaggccagcagaggatactgatagggaaacagtcgcaggaattccaaataaagtaggagttagaattgttacaatcagtgaccccaacaatgctggctgcagcgcaacaatggttgctgtgccagcaggagcagatccaagcactgtagctaaagtagcaatagaaagtgctgttcagcaaaagcaacagcatccaccaacatatgtacagaatgtggtcccgcagaacactcctatgccaccttcaccagctgtacaagtgcagggccagcctaacagttctcagccttctccattcagtggatccagtcagcctggagatccaatgagaaaacctggacagaacttcatgtgtctgtggcagtcttgtaaaaagtggtttcagacaccctcacaggttttctaccatgcagcaactgaacatggaggaaaagatgtatatccagggcagtgtctttgggaaggttgtgagccttttcagcgacagcggttttcttttattacccacttgcaggataagcactgttcaaaggatgccctacttgcaggattaaaacaagatgaaccaggacaagcaggaagtcagaagtcttctaccaagcagccaactgtagggggcacaagctcaactcctagagcacaaaaggccattgtgaatcatcccagtgctgcacttatggctctgaggagaggatcaagaaaccttgtctttcgagattttacagatgaaaaagagggaccaataactaaacacatccgactaacagctgccttaatattaaaaaatattggtaaatattcagaatgtggtcgcagattgttaaagagacatgaaaataacttatcagtgctagccattagtaacatggaagcttcctccacccttgccaaatgcctttatgaacttaattttacagttcagagtaaggaacaagaaaaagactcagaaatgctgcag

SEQ ID NO: 3919 - DNA, 1554 bp, Homo sapiens
  source 1..1554: mol_type = genomic DNA
atggcggcggccgcgctgaggcccccggctcagggcactgtgacctttgaagatgtggctgtgaacttttcccaggaggaatggagtctccttagtgaggctcagagatgcctttatcatgacgtgatgctggagaacctgacacttatatcttctctaggttgttggtatggagcaaaagacgagacaccttctaagcagaccctttctatacaacaggagtccccactcaggacacattggacaggtgtatgtaccaagaaggtccacctctggggaatgtgtggccctctcctgggagatatcttacaccagggaacacaacacaatcagaaattgaatgggtttggggcatatgaaaaaaaattggatgacgatgcaaaccatcatcaagaccagaagcagcacattggagagaaatcgtacagaagcaatgccaagggaacatcttttgtaaagaactgtaaattccatatgtcacatgagccatttatctttcatgaggttgggaaagactttttgtccagcttgagattactccaacaagaggacattcacacttcagggaagtcaaactttgaaactaagcatgggataccccttcagggtggaaaaactcattacatctgtggagagtccacaataccgtttagcaacaaacactcacttgtccttcaccagagacttctccctagagaaggaccttatgtatgcagtgattctgggaaattcactagcaaaagtaatagttttaataatcatcagggagttcgcactggaaaaagaccttatcagtgtggacaatgtgatgaatcattttggtataaggcccacctcactgaacaccagagagttcacactggagaaagaccttatgagtgtggagaatgtgataaatcttttagtcataagcacagtcttgttgaccatcagcgagttcacactggagaaagaccttatgaatgtgacgaatgtgggaaatcttttagccataagcgcagccttgttcaccaccagcgagttcacactggagaaagaccttatcagtgtggagaatgtgggaaatcgtttaatcacaagtgcaacctcattcagcatcagcgagttcacactggagaaagaccttttgagtgtacggcatgtgggaagttatttaggagcaactcccacctaaaggaacaccagagagttcacactggagaaagaccctatgagtgtaaagaatgtaggaaatcatttaggtacaagtcacacctcactgaacaccagagagttcacactggagaaaggccatatgagtgtagagaatgtgggaaatgttttcatcaaaagggcagtctcattcaacatcagcagatccactctggagaaaggccacatgagtgtggagaatgtgggaaatgttttcatcaaaagggcagtctcattcgacatcagcagattcactctggagaaaggccacatgagtgtggagaatgtggaaagtgttttcgtcaaaagggaaacctcattaaacatcaacgagttcacacgggagaaagacatcatgaatgt

SEQ ID NO: 3920 - DNA, 777 bp, Homo sapiens
  source 1..777: mol_type = genomic DNA
atgtcagaggtccccgttgctcgcgtctggctggtactgctcctgctgactgtccaggtcggcgtgacagccggcgctccgtggcagtgcgcgccctgctccgccgagaagctcgcgctctgcccgccggtgtccgcctcgtgctcggaggtcacccggtccgccggctgcggctgttgcccgatgtgcgccctgcctctgggcgccgcgtgcggcgtggcgactgcacgctgcgcccggggactcagttgccgcgcgctgccgggggagcagcaacctctgcacgccctcacccgcggccaaggcgcctgcgtgcaggagtctgacgcctccgctccccatgctgcagaggcagggagccctgaaagcccagagagcacggagataactgaggaggagctcctggataatttccatctgatggccccttctgaagaggatcattccatcctttgggacgccatcagtacctatgatggctcgaaggctctccatgtcaccaacatcaaaaaatggaaggagccctgccgaatagaactctacagagtcgtagagagtttagccaaggcacaggagacatcaggagaagaaatttccaaattttacctgccaaactgcaacaagaatggattttatcacagcagacagtgtgagacatccatggatggagaggcgggactctgctggtgcgtctacccttggaatgggaagaggatccctgggtctccagagatcaggggagaccccaactgccagatatattttaatgtacaaaac

SEQ ID NO: 3921 - DNA, 1803 bp, Homo sapiens
  source 1..1803: mol_type = genomic DNA
atgggaccattggaatttagagatgtggccatagaattctctctggaggagtggcattgcctggacactgcacagcagaatttatatagggatgtgatgttagagaactacagacacctggtcttccttggtattgttgtcactaagccagacctgatcacctgtctggagcaaggaaaaaaacccttcactgtgaagagacatgagatgattgccaaatccccagttatgtgttttcattttgcccaagacctttgtccagagcagagcctaaaagattccttccaaaaagtgatagtgacaagatatgaaaaacgtgaatatggcaatttagagttaaaaaaaggttgtgaaagtgtggatgagggtaaagtacacaaaagaggttataatggacttaaccaatgtttgacagctacccagagcaaagtatttcaatgtgatacatatgtgaaagtctctcatatattttcaaattcaaacagacataagataagagatactggaaaaaaacctttcaaatgtatagaatgtggcaaagctttcaaccagtcctcaacccttgctacacataagaaaattcatactggagagataacctgcaaatgtgaagaatgtggcaaagccttcaacaggtcctcacaccttacttcacataagagaattcatactggagagaaacggtacaaatgtgaagattgtggcaaagaattaaagtattcctctacccttactgcacataagagaattcatactggagagaaacggtacaaatgtgaagattgtggcaaagaattaaagtattcctctacccttactgcacataagagaattcatactggagagaaaccctacaagtgtgataaatgtggcagagcatttatttcatcctcgatcctttatgtacataagataagtcatactgaagagaaaccctacaaatgtgaagaatgtggcaaagccttcaagctctcctcaatccttagtacacataagagaatccatactggagagaaaccctacaaatgtgaagaatgtggcaaagccttcaggcgctccttagtccttcgtacacataagagaattcatactggagagaaaccctacaagtgtgataaatgtggcaaagcatttatttcatcctcactcctttataaacataagataagtcatagtgaaaagaaaccctacaaatgtgaagaatgtggcaaagccttcaagcgctcctcaacacttactatacataagataagtcatactgaagagaaaccctacaaatgtcaagaatgtgacaaagtcttcaaacgctcctcagcccttagcacacataagataattcatagtggagagaaaccctacaaatgtgaagaatgtggcaaagccttcaagcgctcctcaaaccttactacacataagataagtcatactgaagagaaactctacaaatgtcaagaatgtgacaaagccttcaagtactcctcagcccttagcacacataagataattcacagtggagagaatccctacaaatgtgaagaatgtggcaaagccttcaagcgctcctcagtccttagtaaacataagataattcatactggagcgaaaccctacaaatgtgaagaatgtggcaaagcctttaagcgctcctcacagcttactagtcataagataagtcatactggagagaaaccctacaaatgtgaagaatgtggcaaagcttttaacttgtcctcagaccttaatacacataagaggattcatattggacagaaagcctacatagtgaagaacatggcaaatctt

SEQ ID NO: 3922 - DNA, 1419 bp, Homo sapiens
  source 1..1419: mol_type = genomic DNA
atggggagaaaaaagattcagattacgaggattatggatgaacgtaacagacaggtgacatttacaaagaggaaatttgggttgatgaagaaggcttatgagctgagcgtgctgtgtgactgtgagattgcgctgatcatcttcaacagcaccaacaagctgttccagtatgccagcaccgacatggacaaagtgcttctcaagtacacggagtacaacgagccgcatgagagccggacaaactcagacatcgtggagacgttgagaaagaagggccttaatggctgtgacagcccagaccccgatgcggacgattccgtaggtcacagccctgagtctgaggacaagtacaggaaaattaacgaagatattgatctaatgatcagcaggcaaagattgtgtgctgttccacctcccaacttcgagatgccagtctccatcccagtgtccagccacaacagtttggtgtacagcaaccctgtcagctcactgggaaaccccaacctattgccactggctcacccttctctgcagaggaatagtatgtctcctggtgtaacacatcgacctccaagtgcaggtaacacaggtggtctgatgggtggagacctcacgtctggtgcaggcaccagtgcagggaacgggtatggcaatccccgaaactcaccaggtctgctggtctcacctggtaacttgaacaagaatatgcaagcaaaatctcctcccccaatgaatttaggaatgaataaccgtaaaccagatctccgagttcttattccaccaggcagcaagaatacgatgccatcagtgtctgaggatgtcgacctgcttttgaatcaaaggataaataactcccagtcggctcagtcattggctaccccagtggtttccgtagcaactcctactttaccaggacaaggaatgggaggatatccatcagccatttcaacaacatatggtaccgagtactctctgagtagtgcagacctgtcatctctgtctgggtttaacaccgccagcgctcttcaccttggttcagtaactggctggcaacagcaacacctacataacatgccaccatctgccctcagtcagttgggagcttgcactagcactcatttatctcagagttcaaatctctccctgccttctactcaaagcctcaacatcaagtcagaacctgtttctcctcctagagaccgtaccaccaccccttcgagatacccacaacacacgcgccacgaggcggggagatctcctgttgacagcttgagcagctgtagcagttcgtacgacgggagcgaccgagaggatcaccggaacgaattccactcccccattggactcaccagaccttcgccggacgaaagggaaagtccctcagtcaagcgcatgcgactttctgaaggatgggcaaca

SEQ ID NO: 3923 - DNA, 1299 bp, Homo sapiens
  source 1..1299: mol_type = genomic DNA
atggggagaaaaaagattcagattacgaggattatggatgaacgtaacagacaggtgacatttacaaagaggaaatttgggttgatgaagaaggcttatgagctgagcgtgctgtgtgactgtgagattgcgctgatcatcttcaacagcaccaacaagctgttccagtatgccagcaccgacatggacaaagtgcttctcaagtacacggagtacaacgagccgcatgagagccggacaaactcagacatcgtggagacgttgagaaagaagggccttaatggctgtgacagcccagaccccgatgcggacgattccgtaggtcacagccctgagtctgaggacaagtacaggaaaattaacgaagatattgatctaatgatcagcaggcaaagattgtgtgctgttccacctcccaacttcgagatgccagtctccatcccagtgtccagccacaacagtttggtgtacagcaaccctgtcagctcactgggaaaccccaacctattgccactggctcacccttctctgcagaggaatagtatgtctcctggtgtaacacatcgacctccaagtgcaggtaacacaggtggtctgatgggtggagacctcacgtctggtgcaggcaccagtgcagggaacgggtatggcaatccccgaaactcaccaggtctgctggtctcacctggtaacttgaacaagaatatgcaagcaaaatctcctcccccaatgaatttaggaatgaataaccgtaaaccagatctccgagttcttattccaccaggcagcaagaatacgatgccatcagtgaatcaaaggataaataactcccagtcggctcagtcattggctaccccagtggtttccgtagcaactcctactttaccaggacaaggaatgggaggatatccatcagccatttcaacaacatatggtaccgagtactctctgagtagtgcagacctgtcatctctgtctgggtttaacaccgccagcgctcttcaccttggttcagtaactggctggcaacagcaacacctacataacatgccaccatctgccctcagtcagttgggagaccgtaccaccaccccttcgagatacccacaacacacgcgccacgaggcggggagatctcctgttgacagcttgagcagctgtagcagttcgtacgacgggagcgaccgagaggatcaccggaacgaattccactcccccattggactcaccagaccttcgccggacgaaagggaaagtccctcagtcaagcgcatgcgactttctgaaggatgggcaaca

SEQ ID NO: 3924 - DNA, 1293 bp, Homo sapiens
  source 1..1293: mol_type = genomic DNA
atggggagaaaaaagattcagattacgaggattatggatgaacgtaacagacaggtgacatttacaaagaggaaatttgggttgatgaagaaggcttatgagctgagcgtgctgtgtgactgtgagattgcgctgatcatcttcaacagcaccaacaagctgttccagtatgccagcaccgacatggacaaagtgcttctcaagtacacggagtacaacgagccgcatgagagccggacaaactcagacatcgtggaggcattgaacaagaaagaaaacaaaggctgtgaaagccccgatcccgactcctcttatgcactcaccccacgcactgaagaaaaatacaaaaaaattaatgaagaatttgataatatgatcaagagtcataaaattcctgctgttccacctcccaacttcgagatgccagtctccatcccagtgtccagccacaacagtttggtgtacagcaaccctgtcagctcactgggaaaccccaacctattgccactggctcacccttctctgcagaggaatagtatgtctcctggtgtaacacatcgacctccaagtgcaggtaacacaggtggtctgatgggtggagacctcacgtctggtgcaggcaccagtgcagggaacgggtatggcaatccccgaaactcaccaggtctgctggtctcacctggtaacttgaacaagaatatgcaagcaaaatctcctcccccaatgaatttaggaatgaataaccgtaaaccagatctccgagttcttattccaccaggcagcaagaatacgatgccatcagtgaatcaaaggataaataactcccagtcggctcagtcattggctaccccagtggtttccgtagcaactcctactttaccaggacaaggaatgggaggatatccatcagccatttcaacaacatatggtaccgagtactctctgagtagtgcagacctgtcatctctgtctgggtttaacaccgccagcgctcttcaccttggttcagtaactggctggcaacagcaacacctacataacatgccaccatctgccctcagtcagttgggagaccgtaccaccaccccttcgagatacccacaacacacgcgccacgaggcggggagatctcctgttgacagcttgagcagctgtagcagttcgtacgacgggagcgaccgagaggatcaccggaacgaattccactcccccattggactcaccagaccttcgccggacgaaagggaaagtccctcagtcaagcgcatgcgactttctgaaggatgggcaaca

SEQ ID NO: 3925 - DNA, 1389 bp, Homo sapiens
  source 1..1389: mol_type = genomic DNA
atggggagaaaaaagattcagattacgaggattatggatgaacgtaacagacaggtgacatttacaaagaggaaatttgggttgatgaagaaggcttatgagctgagcgtgctgtgtgactgtgagattgcgctgatcatcttcaacagcaccaacaagctgttccagtatgccagcaccgacatggacaaagtgcttctcaagtacacggagtacaacgagccgcatgagagccggacaaactcagacatcgtggaggcattgaacaagaaagaaaacaaaggctgtgaaagccccgatcccgactcctcttatgcactcaccccacgcactgaagaaaaatacaaaaaaattaatgaagaatttgataatatgatcaagagtcataaaattcctgctgttccacctcccaacttcgagatgccagtctccatcccagtgtccagccacaacagtttggtgtacagcaaccctgtcagctcactgggaaaccccaacctattgccactggctcacccttctctgcagaggaatagtatgtctcctggtgtaacacatcgacctccaagtgcaggtaacacaggtggtctgatgggtggagacctcacgtctggtgcaggcaccagtgcagggaacgggtatggcaatccccgaaactcaccaggtctgctggtctcacctggtaacttgaacaagaatatgcaagcaaaatctcctcccccaatgaatttaggaatgaataaccgtaaaccagatctccgagttcttattccaccaggcagcaagaatacgatgccatcagtgaatcaaaggataaataactcccagtcggctcagtcattggctaccccagtggtttccgtagcaactcctactttaccaggacaaggaatgggaggatatccatcagccatttcaacaacatatggtaccgagtactctctgagtagtgcagacctgtcatctctgtctgggtttaacaccgccagcgctcttcaccttggttcagtaactggctggcaacagcaacacctacataacatgccaccatctgccctcagtcagttgggagcttgcactagcactcatttatctcagagttcaaatctctccctgccttctactcaaagcctcaacatcaagtcagaacctgtttctcctcctagagaccgtaccaccaccccttcgagatacccacaacacacgcgccacgaggcggggagatctcctgttgacagcttgagcagctgtagcagttcgtacgacgggagcgaccgagaggatcaccggaacgaattccactcccccattggactcaccagaccttcgccggacgaaagggaaagtccctcagtcaagcgcatgcgactttctgaaggatgggcaaca

SEQ ID NO: 3926 - DNA, 1251 bp, Homo sapiens
  source 1..1251: mol_type = genomic DNA
atggggagaaaaaagattcagattacgaggattatggatgaacgtaacagacaggtgacatttacaaagaggaaatttgggttgatgaagaaggcttatgagctgagcgtgctgtgtgactgtgagattgcgctgatcatcttcaacagcaccaacaagctgttccagtatgccagcaccgacatggacaaagtgcttctcaagtacacggagtacaacgagccgcatgagagccggacaaactcagacatcgtggaggctgttccacctcccaacttcgagatgccagtctccatcccagtgtccagccacaacagtttggtgtacagcaaccctgtcagctcactgggaaaccccaacctattgccactggctcacccttctctgcagaggaatagtatgtctcctggtgtaacacatcgacctccaagtgcaggtaacacaggtggtctgatgggtggagacctcacgtctggtgcaggcaccagtgcagggaacgggtatggcaatccccgaaactcaccaggtctgctggtctcacctggtaacttgaacaagaatatgcaagcaaaatctcctcccccaatgaatttaggaatgaataaccgtaaaccagatctccgagttcttattccaccaggcagcaagaatacgatgccatcagtgaatcaaaggataaataactcccagtcggctcagtcattggctaccccagtggtttccgtagcaactcctactttaccaggacaaggaatgggaggatatccatcagccatttcaacaacatatggtaccgagtactctctgagtagtgcagacctgtcatctctgtctgggtttaacaccgccagcgctcttcaccttggttcagtaactggctggcaacagcaacacctacataacatgccaccatctgccctcagtcagttgggagcttgcactagcactcatttatctcagagttcaaatctctccctgccttctactcaaagcctcaacatcaagtcagaacctgtttctcctcctagagaccgtaccaccaccccttcgagatacccacaacacacgcgccacgaggcggggagatctcctgttgacagcttgagcagctgtagcagttcgtacgacgggagcgaccgagaggatcaccggaacgaattccactcccccattggactcaccagaccttcgccggacgaaagggaaagtccctcagtcaagcgcatgcgactttctgaaggatgggcaaca

SEQ ID NO: 3927 - DNA, 1413 bp, Homo sapiens
  source 1..1413: mol_type = genomic DNA
atggggagaaaaaagattcagattacgaggattatggatgaacgtaacagacaggtgacatttacaaagaggaaatttgggttgatgaagaaggcttatgagctgagcgtgctgtgtgactgtgagattgcgctgatcatcttcaacagcaccaacaagctgttccagtatgccagcaccgacatggacaaagtgcttctcaagtacacggagtacaacgagccgcatgagagccggacaaactcagacatcgtggaggcattgaacaagaaagaaaacaaaggctgtgaaagccccgatcccgactcctcttatgcactcaccccacgcactgaagaaaaatacaaaaaaattaatgaagaatttgataatatgatcaagagtcataaaattcctgctgttccacctcccaacttcgagatgccagtctccatcccagtgtccagccacaacagtttggtgtacagcaaccctgtcagctcactgggaaaccccaacctattgccactggctcacccttctctgcagaggaatagtatgtctcctggtgtaacacatcgacctccaagtgcaggtaacacaggtggtctgatgggtggagacctcacgtctggtgcaggcaccagtgcagggaacgggtatggcaatccccgaaactcaccaggtctgctggtctcacctggtaacttgaacaagaatatgcaagcaaaatctcctcccccaatgaatttaggaatgaataaccgtaaaccagatctccgagttcttattccaccaggcagcaagaatacgatgccatcagtgtctgaggatgtcgacctgcttttgaatcaaaggataaataactcccagtcggctcagtcattggctaccccagtggtttccgtagcaactcctactttaccaggacaaggaatgggaggatatccatcagccatttcaacaacatatggtaccgagtactctctgagtagtgcagacctgtcatctctgtctgggtttaacaccgccagcgctcttcaccttggttcagtaactggctggcaacagcaacacctacataacatgccaccatctgccctcagtcagttgggagcttgcactagcactcatttatctcagagttcaaatctctccctgccttctactcaaagcctcaacatcaagtcagaacctgtttctcctcctagagaccgtaccaccaccccttcgagatacccacaacacacgcgccacgaggcggggagatctcctgttgacagcttgagcagctgtagcagttcgtacgacgggagcgaccgagaggatcaccggaacgaattccactcccccattggactcaccagaccttcgccggacgaaagggaaagtccctcagtcaagcgcatgcgactttctgaaggatgggcaaca

SEQ ID NO: 3928 - DNA, 1395 bp, Homo sapiens
  source 1..1395: mol_type = genomic DNA
atggggagaaaaaagattcagattacgaggattatggatgaacgtaacagacaggtgacatttacaaagaggaaatttgggttgatgaagaaggcttatgagctgagcgtgctgtgtgactgtgagattgcgctgatcatcttcaacagcaccaacaagctgttccagtatgccagcaccgacatggacaaagtgcttctcaagtacacggagtacaacgagccgcatgagagccggacaaactcagacatcgtggagacgttgagaaagaagggccttaatggctgtgacagcccagaccccgatgcggacgattccgtaggtcacagccctgagtctgaggacaagtacaggaaaattaacgaagatattgatctaatgatcagcaggcaaagattgtgtgctgttccacctcccaacttcgagatgccagtctccatcccagtgtccagccacaacagtttggtgtacagcaaccctgtcagctcactgggaaaccccaacctattgccactggctcacccttctctgcagaggaatagtatgtctcctggtgtaacacatcgacctccaagtgcaggtaacacaggtggtctgatgggtggagacctcacgtctggtgcaggcaccagtgcagggaacgggtatggcaatccccgaaactcaccaggtctgctggtctcacctggtaacttgaacaagaatatgcaagcaaaatctcctcccccaatgaatttaggaatgaataaccgtaaaccagatctccgagttcttattccaccaggcagcaagaatacgatgccatcagtgaatcaaaggataaataactcccagtcggctcagtcattggctaccccagtggtttccgtagcaactcctactttaccaggacaaggaatgggaggatatccatcagccatttcaacaacatatggtaccgagtactctctgagtagtgcagacctgtcatctctgtctgggtttaacaccgccagcgctcttcaccttggttcagtaactggctggcaacagcaacacctacataacatgccaccatctgccctcagtcagttgggagcttgcactagcactcatttatctcagagttcaaatctctccctgccttctactcaaagcctcaacatcaagtcagaacctgtttctcctcctagagaccgtaccaccaccccttcgagatacccacaacacacgcgccacgaggcggggagatctcctgttgacagcttgagcagctgtagcagttcgtacgacgggagcgaccgagaggatcaccggaacgaattccactcccccattggactcaccagaccttcgccggacgaaagggaaagtccctcagtcaagcgcatgcgactttctgaaggatgggcaaca

SEQ ID NO: 3929 - DNA, 1179 bp, Homo sapiens
  source 1..1179: mol_type = genomic DNA
atggggagaaaaaagattcagattacgaggattatggatgaacgtaacagacaggtgacatttacaaagaggaaatttgggttgatgaagaaggcttatgagctgagcgtgctgtgtgactgtgagattgcgctgatcatcttcaacagcaccaacaagctgttccagtatgccagcaccgacatggacaaagtgcttctcaagtacacggagtacaacgagccgcatgagagccggacaaactcagacatcgtggaggctgttccacctcccaacttcgagatgccagtctccatcccagtgtccagccacaacagtttggtgtacagcaaccctgtcagctcactgggaaaccccaacctattgccactggctcacccttctctgcagaggaatagtatgtctcctggtgtaacacatcgacctccaagtgcaggtaacacaggtggtctgatgggtggagacctcacgtctggtgcaggcaccagtgcagggaacgggtatggcaatccccgaaactcaccaggtctgctggtctcacctggtaacttgaacaagaatatgcaagcaaaatctcctcccccaatgaatttaggaatgaataaccgtaaaccagatctccgagttcttattccaccaggcagcaagaatacgatgccatcagtgtctgaggatgtcgacctgcttttgaatcaaaggataaataactcccagtcggctcagtcattggctaccccagtggtttccgtagcaactcctactttaccaggacaaggaatgggaggatatccatcagccatttcaacaacatatggtaccgagtactctctgagtagtgcagacctgtcatctctgtctgggtttaacaccgccagcgctcttcaccttggttcagtaactggctggcaacagcaacacctacataacatgccaccatctgccctcagtcagttgggagaccgtaccaccaccccttcgagatacccacaacacacgcgccacgaggcggggagatctcctgttgacagcttgagcagctgtagcagttcgtacgacgggagcgaccgagaggatcaccggaacgaattccactcccccattggactcaccagaccttcgccggacgaaagggaaagtccctcagtcaagcgcatgcgactttctgaaggatgggcaaca

SEQ ID NO: 3930 - DNA, 1323 bp, Homo sapiens
  source 1..1323: mol_type = genomic DNA
atggggagaaaaaagattcagattacgaggattatggatgaacgtaacagacaggtgacatttacaaagaggaaatttgggttgatgaagaaggcttatgagctgagcgtgctgtgtgactgtgagattgcgctgatcatcttcaacagcaccaacaagctgttccagtatgccagcaccgacatggacaaagtgcttctcaagtacacggagtacaacgagccgcatgagagccggacaaactcagacatcgtggagacgttgagaaagaagggccttaatggctgtgacagcccagaccccgatgcggacgattccgtaggtcacagccctgagtctgaggacaagtacaggaaaattaacgaagatattgatctaatgatcagcaggcaaagattgtgtgctgttccacctcccaacttcgagatgccagtctccatcccagtgtccagccacaacagtttggtgtacagcaaccctgtcagctcactgggaaaccccaacctattgccactggctcacccttctctgcagaggaatagtatgtctcctggtgtaacacatcgacctccaagtgcaggtaacacaggtggtctgatgggtggagacctcacgtctggtgcaggcaccagtgcagggaacgggtatggcaatccccgaaactcaccaggtctgctggtctcacctggtaacttgaacaagaatatgcaagcaaaatctcctcccccaatgaatttaggaatgaataaccgtaaaccagatctccgagttcttattccaccaggcagcaagaatacgatgccatcagtgtctgaggatgtcgacctgcttttgaatcaaaggataaataactcccagtcggctcagtcattggctaccccagtggtttccgtagcaactcctactttaccaggacaaggaatgggaggatatccatcagccatttcaacaacatatggtaccgagtactctctgagtagtgcagacctgtcatctctgtctgggtttaacaccgccagcgctcttcaccttggttcagtaactggctggcaacagcaacacctacataacatgccaccatctgccctcagtcagttgggagaccgtaccaccaccccttcgagatacccacaacacacgcgccacgaggcggggagatctcctgttgacagcttgagcagctgtagcagttcgtacgacgggagcgaccgagaggatcaccggaacgaattccactcccccattggactcaccagaccttcgccggacgaaagggaaagtccctcagtcaagcgcatgcgactttctgaaggatgggcaaca

SEQ ID NO: 3931 - DNA, 1449 bp, Homo sapiens
  source 1..1449: mol_type = genomic DNA
atggggagaaaaaagattcagattacgaggattatggatgaacgtaacagacaggtgacatttacaaagaggaaatttgggttgatgaagaaggcttatgagctgagcgtgctgtgtgactgtgagattgcgctgatcatcttcaacagcaccaacaagctgttccagtatgccagcaccgacatggacaaagtgcttctcaagtacacggagtacaacgagccgcatgagagccggacaaactcagacatcgtggagacgttgagaaagaagggccttaatggctgtgacagcccagaccccgatgcggacgattccgcattgaacaagaaagaaaacaaaggctgtgaaagccccgatcccgactcctcttatgcactcaccccacgcactgaagaaaaatacaaaaaaattaatgaagaatttgataatatgatcaagagtcataaaattcctgctgttccacctcccaacttcgagatgccagtctccatcccagtgtccagccacaacagtttggtgtacagcaaccctgtcagctcactgggaaaccccaacctattgccactggctcacccttctctgcagaggaatagtatgtctcctggtgtaacacatcgacctccaagtgcaggtaacacaggtggtctgatgggtggagacctcacgtctggtgcaggcaccagtgcagggaacgggtatggcaatccccgaaactcaccaggtctgctggtctcacctggtaacttgaacaagaatatgcaagcaaaatctcctcccccaatgaatttaggaatgaataaccgtaaaccagatctccgagttcttattccaccaggcagcaagaatacgatgccatcagtgaatcaaaggataaataactcccagtcggctcagtcattggctaccccagtggtttccgtagcaactcctactttaccaggacaaggaatgggaggatatccatcagccatttcaacaacatatggtaccgagtactctctgagtagtgcagacctgtcatctctgtctgggtttaacaccgccagcgctcttcaccttggttcagtaactggctggcaacagcaacacctacataacatgccaccatctgccctcagtcagttgggagcttgcactagcactcatttatctcagagttcaaatctctccctgccttctactcaaagcctcaacatcaagtcagaacctgtttctcctcctagagaccgtaccaccaccccttcgagatacccacaacacacgcgccacgaggcggggagatctcctgttgacagcttgagcagctgtagcagttcgtacgacgggagcgaccgagaggatcaccggaacgaattccactcccccattggactcaccagaccttcgccggacgaaagggaaagtccctcagtcaagcgcatgcgactttctgaaggatgggcaaca

SEQ ID NO: 3932 - DNA, 1104 bp, Homo sapiens
  source 1..1104: mol_type = genomic DNA
atggggaggaaaaaaatccagatctcccgcatcctggaccaaaggaatcggcaggtgacgttcaccaagcggaagttcgggctgatgaagaaggcctatgagctgagcgtgctctgtgactgtgagatagccctcatcatcttcaacagcgccaaccgcctcttccagtatgccagcacggacatggaccgtgtgctgctgaagtacacagagtacagcgagccccacgagagccgcaccaacactgacatcctcgagacgctgaagcggaggggcattggcctcgatgggccagagctggagccggatgaagggcctgaggagccaggagagaagtttcggaggctggcaggcgaagggggtgatccggccttgccccgaccccggctgtatcctgcagctcctgctatgcccagcccagatgtggtatacggggccttaccgccaccaggctgtgaccccagtgggcttggggaagcactgcccgcccagagccgcccatctcccttccgaccagcagcccccaaagccgggcccccaggcctggtgcaccctctcttctcaccaagccacctcaccagcaagacaccacccccactgtacctgccgacggaagggcggaggtcagacctgcctggtggcctggctgggccccgagggggactaaacacctccagaagcctctacagtggcctgcagaacccctgctccactgcaactcccggacccccactggggagcttccccttcctccccggaggccccccagaatatggcctgggagaccctccaccgccccctggcttgttgcagccccccaccctggccccctggcagccctcgaggggtgatgggccccccgccgtgtcctcccagcccagtgggggccgaagcctgggcgaggagggtcccccaacccgcggcgcctccccgccgacccccccagtcagcatcaagtctgagcgcctctctccggcccccgggggccccggcgactttcctaagaccttcccctatcccttgctcctcgcccggtccctggcagagcctctgcggcctgggcccgccctgcgccggctgcccttggccgacggctggccccgg

SEQ ID NO: 3933 - DNA, 1311 bp, Homo sapiens
  source 1..1311: mol_type = genomic DNA
atggggcggaagaaaatacaaatcacacgcataatggatgaaaggaaccgacagactttaagaaagaaaggccttaatggttgtgagagccctgatgctgacgattactttgagcacagtccactctcggaggacagattcagcaaactaaatgaagatagtgattttattttcaaacgaggccctcctggtctgccacctcagaacttttcaatgtctgtcacagttccagtgaccagccccaatgctttgtcctacactaacccagggagttcactggtgtccccatctttggcagccagctcaacgttaacagattcaagcatgctctctccacctcaaaccacattacatagaaatgtgtctcctggagctcctcagagaccaccaagtactggcaatgcaggtgggatgttgagcactacagacctcacagtgccaaatggagctggaagcagtccagtggggaatggatttgtaaactcaagagcttctccaaatttgattggagctactggtgcaaatagcttaggcaaagtcatgcctacaaagtctccccctccaccaggtggtggtaatcttggaatgaacagtaggaaaccagatcttcgagttgtcatccccccttcaagcaagggcatgatgcctccactatcggaggaagaggaattggagttgaatacccagaggatcagtagttctcaagccactcaacctcttgctaccccagtcgtgtctgtgacaaccccaagcttgcctccgcaaggacttgtgtactcagcaatgccgactgcctacaacactgattattcactgaccagcgctgacctgtcagcccttcaaggcttcaactcgccaggaatgctgtcgctgggacaggtgtcggcctggcagcagcaccacctaggacaagcagccctcagctctcttgttgctggagggcagttatctcagggttccaatttatccattaataccaaccaaaacatcagcatcaagtccgaaccgatttcacctcctcgggatcgtatgaccccatcgggcttccagcagcagcagcagcagcagcagcagcagcagccgccgccaccaccgcagccccagccacaacccccgcagccccagccccgacaggaaatggggcgctcccctgtggacagtctgagcagctctagtagctcctatgatggcagtgatcgggaggatccacggggcgacttccattctccaattgtgcttggccgacccccaaacactgaggacagagaaagcccttctgtaaagcgaatgaggatggacgcgtgggtgacc

SEQ ID NO: 3934 - DNA, 1491 bp, Homo sapiens
  source 1..1491: mol_type = genomic DNA
atggggcggaagaaaatacaaatcacacgcataatggatgaaaggaaccgacaggtcacttttacaaagagaaagtttggattaatgaagaaagcctatgaacttagtgtgctctgtgactgtgaaatagcactcatcattttcaacagctctaacaaactgtttcaatatgctagcactgatatggacaaagttcttctcaagtatacagaatataatgaacctcatgaaagcagaaccaactcggatattgttgagactttaagaaagaaaggccttaatggttgtgagagccctgatgctgacgattactttgagcacagtccactctcggaggacagattcagcaaactaaatgaagatagtgattttattttcaaacgaggccctcctggtctgccacctcagaacttttcaatgtctgtcacagttccagtgaccagccccaatgctttgtcctacactaacccagggagttcactggtgtccccatctttggcagccagctcaacgttaacagattcaagcatgctctctccacctcaaaccacattacatagaaatgtgtctcctggagctcctcagagaccaccaagtactggcaatgcaggtgggatgttgagcactacagacctcacagtgccaaatggagctggaagcagtccagtggggaatggatttgtaaactcaagagcttctccaaatttgattggagctactggtgcaaatagcttaggcaaagtcatgcctacaaagtctccccctccaccaggtggtggtaatcttggaatgaacagtaggaaaccagatcttcgagttgtcatccccccttcaagcaagggcatgatgcctccactaaatacccagaggatcagtagttctcaagccactcaacctcttgctaccccagtcgtgtctgtgacaaccccaagcttgcctccgcaaggacttgtgtactcagcaatgccgactgcctacaacactgattattcactgaccagcgctgacctgtcagcccttcaaggcttcaactcgccaggaatgctgtcgctgggacaggtgtcggcctggcagcagcaccacctaggacaagcagccctcagctctcttgttgctggagggcagttatctcagggttccaatttatccattaataccaaccaaaacatcagcatcaagtccgaaccgatttcacctcctcgggatcgtatgaccccatcgggcttccagcagcagcagcagcagcagcagcagcagcagccgccgccaccaccgcagccccagccacaacccccgcagccccagccccgacaggaaatggggcgctcccctgtggacagtctgagcagctctagtagctcctatgatggcagtgatcgggaggatccacggggcgacttccattctccaattgtgcttggccgacccccaaacactgaggacagagaaagcccttctgtaaagcgaatgaggatggacgcgtgggtgacc

SEQ ID NO: 3935 - DNA, 1515 bp, Homo sapiens
  source 1..1515: mol_type = genomic DNA
atggggcggaagaaaatacaaatcacacgcataatggatgaaaggaaccgacaggtcacttttacaaagagaaagtttggattaatgaagaaagcctatgaacttagtgtgctctgtgactgtgaaatagcactcatcattttcaacagctctaacaaactgtttcaatatgctagcactgatatggacaaagttcttctcaagtatacagaatataatgaacctcatgaaagcagaaccaactcggatattgttgagactttaagaaagaaaggccttaatggttgtgagagccctgatgctgacgattactttgagcacagtccactctcggaggacagattcagcaaactaaatgaagatagtgattttattttcaaacgaggccctcctggtctgccacctcagaacttttcaatgtctgtcacagttccagtgaccagccccaatgctttgtcctacactaacccagggagttcactggtgtccccatctttggcagccagctcaacgttaacagattcaagcatgctctctccacctcaaaccacattacatagaaatgtgtctcctggagctcctcagagaccaccaagtactggcaatgcaggtgggatgttgagcactacagacctcacagtgccaaatggagctggaagcagtccagtggggaatggatttgtaaactcaagagcttctccaaatttgattggagctactggtgcaaatagcttaggcaaagtcatgcctacaaagtctccccctccaccaggtggtggtaatcttggaatgaacagtaggaaaccagatcttcgagttgtcatccccccttcaagcaagggcatgatgcctccactatcggaggaagaggaattggagttgaatacccagaggatcagtagttctcaagccactcaacctcttgctaccccagtcgtgtctgtgacaaccccaagcttgcctccgcaaggacttgtgtactcagcaatgccgactgcctacaacactgattattcactgaccagcgctgacctgtcagcccttcaaggcttcaactcgccaggaatgctgtcgctgggacaggtgtcggcctggcagcagcaccacctaggacaagcagccctcagctctcttgttgctggagggcagttatctcagggttccaatttatccattaataccaaccaaaacatcagcatcaagtccgaaccgatttcacctcctcgggatcgtatgaccccatcgggcttccagcagcagcagcagcagcagcagcagcagcagccgccgccaccaccgcagccccagccacaacccccgcagccccagccccgacaggaaatggggcgctcccctgtggacagtctgagcagctctagtagctcctatgatggcagtgatcgggaggatccacggggcgacttccattctccaattgtgcttggccgacccccaaacactgaggacagagaaagcccttctgtaaagcgaatgaggatggacgcgtgggtgacc

SEQ ID NO: 3936 - DNA, 1287 bp, Homo sapiens
  source 1..1287: mol_type = genomic DNA
atggggcggaagaaaatacaaatcacacgcataatggatgaaaggaaccgacagactttaagaaagaaaggccttaatggttgtgagagccctgatgctgacgattactttgagcacagtccactctcggaggacagattcagcaaactaaatgaagatagtgattttattttcaaacgaggccctcctggtctgccacctcagaacttttcaatgtctgtcacagttccagtgaccagccccaatgctttgtcctacactaacccagggagttcactggtgtccccatctttggcagccagctcaacgttaacagattcaagcatgctctctccacctcaaaccacattacatagaaatgtgtctcctggagctcctcagagaccaccaagtactggcaatgcaggtgggatgttgagcactacagacctcacagtgccaaatggagctggaagcagtccagtggggaatggatttgtaaactcaagagcttctccaaatttgattggagctactggtgcaaatagcttaggcaaagtcatgcctacaaagtctccccctccaccaggtggtggtaatcttggaatgaacagtaggaaaccagatcttcgagttgtcatccccccttcaagcaagggcatgatgcctccactaaatacccagaggatcagtagttctcaagccactcaacctcttgctaccccagtcgtgtctgtgacaaccccaagcttgcctccgcaaggacttgtgtactcagcaatgccgactgcctacaacactgattattcactgaccagcgctgacctgtcagcccttcaaggcttcaactcgccaggaatgctgtcgctgggacaggtgtcggcctggcagcagcaccacctaggacaagcagccctcagctctcttgttgctggagggcagttatctcagggttccaatttatccattaataccaaccaaaacatcagcatcaagtccgaaccgatttcacctcctcgggatcgtatgaccccatcgggcttccagcagcagcagcagcagcagcagcagcagcagccgccgccaccaccgcagccccagccacaacccccgcagccccagccccgacaggaaatggggcgctcccctgtggacagtctgagcagctctagtagctcctatgatggcagtgatcgggaggatccacggggcgacttccattctccaattgtgcttggccgacccccaaacactgaggacagagaaagcccttctgtaaagcgaatgaggatggacgcgtgggtgacc

SEQ ID NO: 3937 - DNA, 324 bp, Homo sapiens
  source 1..324: mol_type = genomic DNA
atggctgtaactggagatgacacagctgccactggtgacatgccaacttaccagatccgagctcctactgctgctttgccacagggagtggtgatggctgcatcgcccggaagtttgcacagtccccagcagctggcagaagaagcaacacgcaaacgagagctgaggctaatgaaaaacagggaagctgcccgggagtgtcgcaggaagaagaaagaatatgtcaaatgtcttgaaaatcgtgtggctgtgcttgaaaaccaaaacaagactctcattgaggaactcaaggccctcaaagatctttattgccataaagtagag

SEQ ID NO: 3938 - DNA, 360 bp, Homo sapiens
  source 1..360: mol_type = genomic DNA
atggctgtaactggagatgacacagatgaggaaactgaacttgccccaagtcacatggctgctgccactggtgacatgccaacttaccagatccgagctcctactgctgctttgccacagggagtggtgatggctgcatcgcccggaagtttgcacagtccccagcagctggcagaagaagcaacacgcaaacgagagctgaggctaatgaaaaacagggaagctgcccgggagtgtcgcaggaagaagaaagaatatgtcaaatgtcttgaaaatcgtgtggctgtgcttgaaaaccaaaacaagactctcattgaggaactcaaggccctcaaagatctttattgccataaagtagag

SEQ ID NO: 3939 - DNA, 375 bp, Homo sapiens
  source 1..375: mol_type = genomic DNA
atgaacagaactcaggagttgtctggccagcttagtgatgaggaaactgaacttgccccaagtcacatggctgctgccactggtgacatgccaacttaccagatccgagctcctactgctgctttgccacagggagtggtgatggctgcatcgcccggaagtttgcacagtccccagcagctggcagaagaagcaacacgcaaacgagagctgaggctaatgaaaaacagggaagctgccaaagaatgtcgacgtcgaaagaaagaatatgtaaaatgtctggagagccgagttgcagtgctggaagtccagaacaagaagcttatagaggaacttgaaaccttgaaagacatttgttctcccaaaacagattac

SEQ ID NO: 3940 - DNA, 663 bp, Homo sapiens
  source 1..663: mol_type = genomic DNA
atgaccatggaaacagttgaatcccagcatgatggaagtataacagcttctttgacagagagcaagtctgctcatgtgcagactcagactggccaaaattcaatccctgctttagctcaggtagcagcaattgcagagacagatgaatctgcagaatcagaaggtgtaattgattctcataaacgtagagaaatcctttcacgaagaccctcttataggaaaatactgaatgaactgtcctctgatgtgcctggtgttcccaagattgaagaagagagatcagaggaagaaggaacaccacctagtattgctaccatggcagtaccaactagcatatatcagactagcacggggcaatacactgccactggtgacatgccaacttaccagatccgagctcctactgctgctttgccacagggagtggtgatggctgcatcgcccggaagtttgcacagtccccagcagctggcagaagaagcaacacgcaaacgagagctgaggctaatgaaaaacagggaagctgccaaagaatgtcgacgtcgaaagaaagaatatgtaaaatgtctggagagccgagttgcagtgctggaagtccagaacaagaagcttatagaggaacttgaaaccttgaaagacatttgttctcccaaaacagattac

SEQ ID NO: 3941 - DNA, 900 bp, Homo sapiens
  source 1..900: mol_type = genomic DNA
atgagcaaatgtgcaaggaaaaaatatattaagacaaatccaagacaaatgaccatggaaacagttgaatcccagcatgatggaagtataacagcttctttgacagagagcaagtctgctcatgtgcagactcagactggccaaaattcaatccctgctttagctcaggtagcagcaattgcagagacagatgaatctgcagaatcagaaggtgtaattgattctcataaacgtagagaaatcctttcacgaagaccctcttataggaaaatactgaatgaactgtcctctgatgtgcctggtgttcccaagattgaagaagagagatcagaggaagaaggaacaccacctagtattgctaccatggcagtaccaactagcatatatcagactagcacggggcaatacattgctatagcccaaggtggaacaatccagatttctaacccaggatctgatggtgttcagggactgcaggcattaacaatgacaaattcaggagctcctccaccaggtgctacaattgtacagtacgcagcacaatcagctgatggcacacagcagttctttgtcccaggcagccaggttgttgttcaagctgccactggtgacatgccaacttaccagatccgagctcctactgctgctttgccacagggagtggtgatggctgcatcgcccggaagtttgcacagtccccagcagctggcagaagaagcaacacgcaaacgagagctgaggctaatgaaaaacagggaagctgccaaagaatgtcgacgtcgaaagaaagaatatgtaaaatgtctggagagccgagttgcagtgctggaagtccagaacaagaagcttatagaggaacttgaaaccttgaaagacatttgttctcccaaaacagattac

SEQ ID NO: 3942 - DNA, 327 bp, Homo sapiens
  source 1..327: mol_type = genomic DNA
atggctgtaactggagatgacacagctgccactggtgacatgccaacttaccagatccgagctcctactgctgctttgccacagggagtggtgatggctgcatcgcccggaagtttgcacagtccccagcagctggcagaagaagcaacacgcaaacgagagctgaggctaatgaaaaacagggaagctgccaaagaatgtcgacgtcgaaagaaagaatatgtaaaatgtctggagagccgagttgcagtgctggaagtccagaacaagaagcttatagaggaacttgaaaccttgaaagacatttgttctcccaaaacagattac

SEQ ID NO: 3943 - DNA, 735 bp, Homo sapiens
  source 1..735: mol_type = genomic DNA
atggtagcagcaattgcagagacagatgaatctgcagaatcagaaggtgtaattgattctcataaacgtagagaaatcctttcacgaagaccctcttataggaaaatactgaatgaactgtcctctgatgtgcctggtgttcccaagattgaagaagagagatcagaggaagaaggaacaccacctagtattgctaccatggcagtaccaactagcatatatcagactagcacggggcaatacattgctatagcccaaggtggaacaatccagatttctaacccaggatctgatggtgttcagggactgcaggcattaacaatgacaaattcaggagctcctccaccaggtgctacaattgtacagtacgcagcacaatcagctgatggcacacagcagttctttgtcccaggcagccaggttgttgttcaagctgccactggtgacatgccaacttaccagatccgagctcctactgctgctttgccacagggagtggtgatggctgcatcgcccggaagtttgcacagtccccagcagctggcagaagaagcaacacgcaaacgagagctgaggctaatgaaaaacagggaagctgccaaagaatgtcgacgtcgaaagaaagaatatgtaaaatgtctggagagccgagttgcagtgctggaagtccagaacaagaagcttatagaggaacttgaaaccttgaaagacatttgttctcccaaaacagattac

SEQ ID NO: 3944 - DNA, 363 bp, Homo sapiens
  source 1..363: mol_type = genomic DNA
atggctgtaactggagatgacacagatgaggaaactgaacttgccccaagtcacatggctgctgccactggtgacatgccaacttaccagatccgagctcctactgctgctttgccacagggagtggtgatggctgcatcgcccggaagtttgcacagtccccagcagctggcagaagaagcaacacgcaaacgagagctgaggctaatgaaaaacagggaagctgccaaagaatgtcgacgtcgaaagaaagaatatgtaaaatgtctggagagccgagttgcagtgctggaagtccagaacaagaagcttatagaggaacttgaaaccttgaaagacatttgttctcccaaaacagattac

SEQ ID NO: 3945 - DNA, 336 bp, Homo sapiens
  source 1..336: mol_type = genomic DNA
atgaacagaactcaggagttgtctggccagcttagtgctgccactggtgacatgccaacttaccagatccgagctcctactgctgctttgccacagggagtggtgatggctgcatcgcccggaagtttgcacagtccccagcagctggcagaagaagcaacacgcaaacgagagctgaggctaatgaaaaacagggaagctgcccgggagtgtcgcaggaagaagaaagaatatgtcaaatgtcttgaaaatcgtgtggctgtgcttgaaaaccaaaacaagactctcattgaggaactcaaggccctcaaagatctttattgccataaagtagag

SEQ ID NO: 3946 - DNA, 846 bp, Homo sapiens
  source 1..846: mol_type = genomic DNA
atgtggtggcatcagcataatctatgtttcaggcgtcctatagaagaggattattcttcaggggatgtggaagaaaaggtagcagcaattgcagagacagatgaatctgcagaatcagaaggtgtaattgattctcataaacgtagagaaatcctttcacgaagaccctcttataggaaaatactgaatgaactgtcctctgatgtgcctggtgttcccaagattgaagaagagagatcagaggaagaaggaacaccacctagtattgctaccatggcagtaccaactagcatatatcagactagcacggggcaatacattgctatagcccaaggtggaacaatccagatttctaacccaggatctgatggtgttcagggactgcaggcattaacaatgacaaattcaggagctcctccaccaggtgctacaattgtacagtacgcagcacaatcagctgatggcacacagcagttctttgtcccaggcagccaggttgttgttcaagatgaggaaactgaacttgccccaagtcacatggctgctgccactggtgacatgccaacttaccagatccgagctcctactgctgctttgccacagggagtggtgatggctgcatcgcccggaagtttgcacagtccccagcagctggcagaagaagcaacacgcaaacgagagctgaggctaatgaaaaacagggaagctgccaaagaatgtcgacgtcgaaagaaagaatatgtaaaatgtctggagagccgagttgcagtgctggaagtccagaacaagaagcttatagaggaacttgaaaccttgaaagacatttgttctcccaaaacagattac

SEQ ID NO: 3947 - DNA, 810 bp, Homo sapiens
  source 1..810: mol_type = genomic DNA
atgtggtggcatcagcataatctatgtttcaggcgtcctatagaagaggattattcttcaggggatgtggaagaaaaggtagcagcaattgcagagacagatgaatctgcagaatcagaaggtgtaattgattctcataaacgtagagaaatcctttcacgaagaccctcttataggaaaatactgaatgaactgtcctctgatgtgcctggtgttcccaagattgaagaagagagatcagaggaagaaggaacaccacctagtattgctaccatggcagtaccaactagcatatatcagactagcacggggcaatacattgctatagcccaaggtggaacaatccagatttctaacccaggatctgatggtgttcagggactgcaggcattaacaatgacaaattcaggagctcctccaccaggtgctacaattgtacagtacgcagcacaatcagctgatggcacacagcagttctttgtcccaggcagccaggttgttgttcaagctgccactggtgacatgccaacttaccagatccgagctcctactgctgctttgccacagggagtggtgatggctgcatcgcccggaagtttgcacagtccccagcagctggcagaagaagcaacacgcaaacgagagctgaggctaatgaaaaacagggaagctgccaaagaatgtcgacgtcgaaagaaagaatatgtaaaatgtctggagagccgagttgcagtgctggaagtccagaacaagaagcttatagaggaacttgaaaccttgaaagacatttgttctcccaaaacagattac

SEQ ID NO: 3948 - DNA, 708 bp, Homo sapiens
  source 1..708: mol_type = genomic DNA
atgagcaaatgtgcaaggaaaaaatatattaagacaaatccaagacaaatgaccatggaaacagttgaatcccagcatgatggaagtataacagcttctttgacagagagcaagtctgctcatgtgcagactcagactggccaaaattcaatccctgctttagctcaggtagcagcaattgcagagacagatgaatctgcagaatcagaaggtgtaattgattctcataaacgtagagaaatcctttcacgaagaccctcttataggaaaatactgaatgaactgtcctctgatgtgcctggtgttcccaagattgaagaagagagatcagaggaagaaggaacaccacctagtattgctaccatggcagtaccaactagcatatatcagactagcacggggcaatacactgccactggtgacatgccaacttaccagatccgagctcctactgctgctttgccacagggagtggtgatggctgcatcgcccggaagtttgcacagtccccagcagctggcagaagaagcaacacgcaaacgagagctgaggctaatgaaaaacagggaagctgcccgggagtgtcgcaggaagaagaaagaatatgtcaaatgtcttgaaaatcgtgtggctgtgcttgaaaaccaaaacaagactctcattgaggaactcaaggccctcaaagatctttattgccataaagtagag

SEQ ID NO: 3949 - DNA, 339 bp, Homo sapiens
  source 1..339: mol_type = genomic DNA
atgaacagaactcaggagttgtctggccagcttagtgctgccactggtgacatgccaacttaccagatccgagctcctactgctgctttgccacagggagtggtgatggctgcatcgcccggaagtttgcacagtccccagcagctggcagaagaagcaacacgcaaacgagagctgaggctaatgaaaaacagggaagctgccaaagaatgtcgacgtcgaaagaaagaatatgtaaaatgtctggagagccgagttgcagtgctggaagtccagaacaagaagcttatagaggaacttgaaaccttgaaagacatttgttctcccaaaacagattac

SEQ ID NO: 3950 - DNA, 744 bp, Homo sapiens
  source 1..744: mol_type = genomic DNA
atgagcaaatgtgcaaggaaaaaatatattaagacaaatccaagacaaatgaccatggaaacagttgaatcccagcatgatggaagtataacagcttctttgacagagagcaagtctgctcatgtgcagactcagactggccaaaattcaatccctgctttagctcaggtagcagcaattgcagagacagatgaatctgcagaatcagaaggtgtaattgattctcataaacgtagagaaatcctttcacgaagaccctcttataggaaaatactgaatgaactgtcctctgatgtgcctggtgttcccaagattgaagaagagagatcagaggaagaaggaacaccacctagtattgctaccatggcagtaccaactagcatatatcagactagcacggggcaatacaatgaggaaactgaacttgccccaagtcacatggctgctgccactggtgacatgccaacttaccagatccgagctcctactgctgctttgccacagggagtggtgatggctgcatcgcccggaagtttgcacagtccccagcagctggcagaagaagcaacacgcaaacgagagctgaggctaatgaaaaacagggaagctgcccgggagtgtcgcaggaagaagaaagaatatgtcaaatgtcttgaaaatcgtgtggctgtgcttgaaaaccaaaacaagactctcattgaggaactcaaggccctcaaagatctttattgccataaagtagag

SEQ ID NO: 3951 - DNA, 936 bp, Homo sapiens
  source 1..936: mol_type = genomic DNA
atgagcaaatgtgcaaggaaaaaatatattaagacaaatccaagacaaatgaccatggaaacagttgaatcccagcatgatggaagtataacagcttctttgacagagagcaagtctgctcatgtgcagactcagactggccaaaattcaatccctgctttagctcaggtagcagcaattgcagagacagatgaatctgcagaatcagaaggtgtaattgattctcataaacgtagagaaatcctttcacgaagaccctcttataggaaaatactgaatgaactgtcctctgatgtgcctggtgttcccaagattgaagaagagagatcagaggaagaaggaacaccacctagtattgctaccatggcagtaccaactagcatatatcagactagcacggggcaatacattgctatagcccaaggtggaacaatccagatttctaacccaggatctgatggtgttcagggactgcaggcattaacaatgacaaattcaggagctcctccaccaggtgctacaattgtacagtacgcagcacaatcagctgatggcacacagcagttctttgtcccaggcagccaggttgttgttcaagatgaggaaactgaacttgccccaagtcacatggctgctgccactggtgacatgccaacttaccagatccgagctcctactgctgctttgccacagggagtggtgatggctgcatcgcccggaagtttgcacagtccccagcagctggcagaagaagcaacacgcaaacgagagctgaggctaatgaaaaacagggaagctgccaaagaatgtcgacgtcgaaagaaagaatatgtaaaatgtctggagagccgagttgcagtgctggaagtccagaacaagaagcttatagaggaacttgaaaccttgaaagacatttgttctcccaaaacagattac

SEQ ID NO: 3952 - DNA, 897 bp, Homo sapiens
  source 1..897: mol_type = genomic DNA
atgagcaaatgtgcaaggaaaaaatatattaagacaaatccaagacaaatgaccatggaaacagttgaatcccagcatgatggaagtataacagcttctttgacagagagcaagtctgctcatgtgcagactcagactggccaaaattcaatccctgctttagctcaggtagcagcaattgcagagacagatgaatctgcagaatcagaaggtgtaattgattctcataaacgtagagaaatcctttcacgaagaccctcttataggaaaatactgaatgaactgtcctctgatgtgcctggtgttcccaagattgaagaagagagatcagaggaagaaggaacaccacctagtattgctaccatggcagtaccaactagcatatatcagactagcacggggcaatacattgctatagcccaaggtggaacaatccagatttctaacccaggatctgatggtgttcagggactgcaggcattaacaatgacaaattcaggagctcctccaccaggtgctacaattgtacagtacgcagcacaatcagctgatggcacacagcagttctttgtcccaggcagccaggttgttgttcaagctgccactggtgacatgccaacttaccagatccgagctcctactgctgctttgccacagggagtggtgatggctgcatcgcccggaagtttgcacagtccccagcagctggcagaagaagcaacacgcaaacgagagctgaggctaatgaaaaacagggaagctgcccgggagtgtcgcaggaagaagaaagaatatgtcaaatgtcttgaaaatcgtgtggctgtgcttgaaaaccaaaacaagactctcattgaggaactcaaggccctcaaagatctttattgccataaagtagag

SEQ ID NO: 3953 - DNA, 414 bp, Homo sapiens
  source 1..414: mol_type = genomic DNA
atgacaaattcaggagctcctccaccaggtgctacaattgtacagtacgcagcacaatcagctgatggcacacagcagttctttgtcccaggcagccaggttgttgttcaagctgccactggtgacatgccaacttaccagatccgagctcctactgctgctttgccacagggagtggtgatggctgcatcgcccggaagtttgcacagtccccagcagctggcagaagaagcaacacgcaaacgagagctgaggctaatgaaaaacagggaagctgccaaagaatgtcgacgtcgaaagaaagaatatgtaaaatgtctggagagccgagttgcagtgctggaagtccagaacaagaagcttatagaggaacttgaaaccttgaaagacatttgttctcccaaaacagattac

SEQ ID NO: 3954 - DNA, 411 bp, Homo sapiens
  source 1..411: mol_type = genomic DNA
atgaccatggaaacagttgaatcccagcatgatggaagtataacagcttctttgacagagagcaagtctgctcatgtgcagactcagactggccaaaattcaatccctgctttagctcaggtagcagcaattgcagagacagatgaatctgcagaatcagaaggtgtaattgattctcataaacgtagagaaatcctttcacgaagaccctcttataggaaaatactgaatgaactgtcctctgatgtgcctggtgttcccaagattgaagaagagagatcagaggaagaaggaacaccacctagtattgctaccatggcagtaccaactagcatatatcagactagcacggggcaatacagtatgtatgctgcaattcgatatgatacagtgctagctttaagtcttctc

SEQ ID NO: 3955 - DNA, 306 bp, Homo sapiens
  source 1..306: mol_type = genomic DNA
atggctgctgccactggtgacatgccaacttaccagatccgagctcctactgctgctttgccacagggagtggtgatggctgcatcgcccggaagtttgcacagtccccagcagctggcagaagaagcaacacgcaaacgagagctgaggctaatgaaaaacagggaagctgcccgggagtgtcgcaggaagaagaaagaatatgtcaaatgtcttgaaaatcgtgtggctgtgcttgaaaaccaaaacaagactctcattgaggaactcaaggccctcaaagatctttattgccataaagtagag

SEQ ID NO: 3956 - DNA, 1542 bp, Homo sapiens
  source 1..1542: mol_type = genomic DNA
atggggaggaaaaagattcagatccagcgaatcaccgacgagcggaaccgacaggtgactttcaccaagcggaagtttggcctgatgaagaaggcgtatgagctgagcgtgctatgtgactgcgagatcgcactcatcatcttcaaccactccaacaagctgttccagtacgccagcaccgacatggacaaggtgctgctcaagtacacggagtacaatgagccacacgagagccgcaccaacgccgacatcatcgagaccctgaggaagaagggcttcaacggctgcgacagccccgagcccgacggggaggactcgctggaacagagccccctgctggaggacaagtaccgacgcgccagcgaggagctcgacgggctcttccggcgctatgggtcaactgtcccggcccccaactttgccatgcctgtcacggtgcccgtgtccaatcagagctcactgcagttcagcaatcccagcggctccctggtcaccccttccctggtgacatcatccctcacggacccgcggctcctgtccccccagcagccagcactacagaggaacagtgtgtctcctggcctgccccagcggccagctagtgcgggggccatgctggggggtgacctgaacagtgctaacggagcctgccccagccctgttgggaatggctacgtcagtgctcgggcttcccctggcctcctccctgtggccaatggcaacagcctaaacaaggtcatccctgccaagtctccacccccacctacccacagcacccagcttggagcccccagccgcaagcccgacctgcgagtcatcacttcccaggcaggaaaggggttaatgcatcacttgaacaatgcccagcgccttggggtctcccagtctactcattcgctcaccaccccagtggtttctgtggcaacgccgagtttactcagccagggcctccccttctcttccatgcccactgcctacaacacagattaccagttgaccagtgcagagctctcctccttaccagcctttagttcacctggggggctgtcgctaggcaatgtcactgcctggcaacagccacagcagccccagcagccgcagcagccacagcctccacagcagcagccaccgcagccacagcagccacagccacagcagcctcagcagccgcaacagccacctcagcaacagtcccacctggtccctgtatctctcagcaacctcatcccgggcagccccctgccccacgtgggtgctgccctcacagtcaccacccacccccacatcagcatcaagtcagaaccggtgtccccaagccgtgagcgcagccctgcgcctccccctccagctgtgttcccagctgcccgccctgagcctggcgatggtctcagcagcccagccgggggatcctatgagacgggagaccgggatgacggacggggggacttcgggcccacactgggcctgctgcgcccagccccagagcctgaggctgagggctcagctgtgaagaggatgcggcttgatacctggacattaaag

SEQ ID NO: 3957 - DNA, 1539 bp, Homo sapiens
  source 1..1539: mol_type = genomic DNA
atggggaggaaaaagattcagatccagcgaatcaccgacgagcggaaccgacaggtgactttcaccaagcggaagtttggcctgatgaagaaggcgtatgagctgagcgtgctatgtgactgcgagatcgcactcatcatcttcaaccactccaacaagctgttccagtacgccagcaccgacatggacaaggtgctgctcaagtacacggagtacaatgagccacacgagagccgcaccaacgccgacatcatcgaggcgctgcacaagaagcacagggaatgtgagagccctgaggtggacgaggtgtttgccctgaccccccagacggaagagaaatataaaaagatagacgaggagtttgataaaatgatgcagagttatagactggcctcaactgtcccggcccccaactttgccatgcctgtcacggtgcccgtgtccaatcagagctcactgcagttcagcaatcccagcggctccctggtcaccccttccctggtgacatcatccctcacggacccgcggctcctgtccccccagcagccagcactacagaggaacagtgtgtctcctggcctgccccagcggccagctagtgcgggggccatgctggggggtgacctgaacagtgctaacggagcctgccccagccctgttgggaatggctacgtcagtgctcgggcttcccctggcctcctccctgtggccaatggcaacagcctaaacaaggtcatccctgccaagtctccacccccacctacccacagcacccagcttggagcccccagccgcaagcccgacctgcgagtcatcacttcccaggcaggaaaggggttaatgcatcacttgaacaatgcccagcgccttggggtctcccagtctactcattcgctcaccaccccagtggtttctgtggcaacgccgagtttactcagccagggcctccccttctcttccatgcccactgcctacaacacagattaccagttgaccagtgcagagctctcctccttaccagcctttagttcacctggggggctgtcgctaggcaatgtcactgcctggcaacagccacagcagccccagcagccgcagcagccacagcctccacagcagcagccaccgcagccacagcagccacagccacagcagcctcagcagccgcaacagccacctcagcaacagtcccacctggtccctgtatctctcagcaacctcatcccgggcagccccctgccccacgtgggtgctgccctcacagtcaccacccacccccacatcagcatcaagtcagaaccggtgtccccaagccgtgagcgcagccctgcgcctccccctccagctgtgttcccagctgcccgccctgagcctggcgatggtctcagcagcccagccgggggatcctatgagacgggagaccgggatgacggacggggggacttcgggcccacactgggcctgctgcgcccagccccagagcctgaggctgagggctcagctgtgaagaggatgcggcttgatacctggacattaaag

SEQ ID NO: 3958 - DNA, 1449 bp, Homo sapiens
  source 1..1449: mol_type = genomic DNA
atgaagagacatgagatggtagctaaacatttagttatgttttattattttgcccaacacctttggccagagcagaacataagagattctttccagaaagtgaccctaagaagatatagaaaatgtggatatgagaatttacagttaagaaaaggctgtaaaagtgtggttgagtgtaaacagcacaaaggagattatagtggacttaaccaatgtttgaaaactaccttgagcaaaatatttcaatgtaataaatatgtagaagttttccataaaatttcaaattcaaatagacacaagatgagacatactgaaaataaacattttaaatgtaaagaatgtcgcaaaacattttgcatgctttcacacctaactcaacataaaagaatccaaactagagtgaatttctacaaatgtgaagcatatggaagagcctttaactggtcctcaacccttaataaacataagagaattcatactggagaaaaaccttacaaatgtaaagaatgtggcaaagcctttaaccagacctcacaccttattagacataagagaattcatactgaagagaaaccctacaaatgtgaagaatgtggcaaagcctttaaccagtcatcgacccttactacacataatataattcatactggggaaattccctacaaatgtgagaaatgtgttagagcttttaaccaagcctcaaagcttactgaacataagttaattcataccggagagaaacgttatgaatgtgaagaatgcggcaaagcttttaaccgatcctcaaaacttactgaacataagtacattcatactggagagaagctgtacaaatgtgaagaatgtggtaaagcctttaaccagtcctcaacccttactacacataagagaattcatagtggagagaagccctacaaatgtgaagaatgtggcaaagcttttaaacaattttcaaatcttactgaccataaaaaaattcatactggagagaaaccctacaaatgtgaggaatgtggcaaagcttttaaccaactctcaaaccttactagacataaggtaattcatactggagagaaaccctacaaatgtggagaatgtggcaaagcctttaaccagtcctcagcccttaatacacataagataatccatactggagagaatccccacaaatgtagagaatctggcaaagttttccacctatcctcaaaacttagtacatgtaagaaaattcatactggagagaaactctacaaatgtgaagaatgtggcaaagcctttaaccgatcttcaacccttattggacataagagaattcatactggagagaaaccctacaaatgtgaagaatgtggcaaagcttttaaccaatcttcaacacttactacacataagataattcatactgaagagaaacagtacaaatgtgatgaatgtggcaaagcttctacc

SEQ ID NO: 3959 - DNA, 1890 bp, Homo sapiens
  source 1..1890: mol_type = genomic DNA
atggccttgccaacggctcgacccctgttggggtcctgtgggacccccgccctcggcagcctcctgttcctgctcttcagcctcggatgggtgcagccctcgaggaccctggctggagagacagggcaggaggctgcgcccctggacggagtcctggccaacccacctaacatttccagcctctcccctcgccaactccttggcttcccgtgtgcggaggtgtccggcctgagcacggagcgtgtccgggagctggctgtggccttggcacagaagaatgtcaagctctcaacagagcagctgcgctgtctggctcaccggctctctgagccccccgaggacctggacgccctcccattggacctgctgctattcctcaacccagatgcgttctcggggccccaggcctgcacccgtttcttctcccgcatcacgaaggccaatgtggacctgctcccgaggggggctcccgagcgacagcggctgctgcctgcggctctggcctgctggggtgtgcgggggtctctgctgagcgaggctgatgtgcgggctctgggaggcctggcttgcgacctgcctgggcgctttgtggccgagtcggccgaagtgctgctaccccggctggtgagctgcccgggacccctggaccaggaccagcaggaggcagccagggcggctctgcagggcgggggacccccctacggccccccgtcgacatggtctgtctccacgatggacgctctgcggggcctgctgcccgtgctgggccagcccatcatccgcagcatcccgcagggcatcgtggccgcgtggcggcaacgctcctctcgggacccatcctggcggcagcctgaacggaccatcctccggccgcggttccggcgggaagtggagaagacagcctgtccttcaggcaagaaggcccgcgagatagacgagagcctcatcttctacaagaagtgggagctggaagcctgcgtggatgcggccctgctggccacccagatggaccgcgtgaacgccatccccttcacctacgagcagctggacgtcctaaagcataaactggatgagctctacccacaaggttaccccgagtctgtgatccagcacctgggctacctcttcctcaagatgagccctgaggacattcgcaagtggaatgtgacgtccctggagaccctgaaggctttgcttgaagtcaacaaagggcacgaaatgagtcctcaggctcctcggcggcccctcccacaggtggccaccctgatcgaccgctttgtgaagggaaggggccagctagacaaagacaccctagacaccctgaccgccttctaccctgggtacctgtgctccctcagccccgaggagctgagctccgtgccccccagcagcatctgggcggtcaggccccaggacctggacacgtgtgacccaaggcagctggacgtcctctatcccaaggcccgccttgctttccagaacatgaacgggtccgaatacttcgtgaagatccagtccttcctgggtggggcccccacggaggatttgaaggcgctcagtcagcagaatgtgagcatggacttggccacgttcatgaagctgcggacggatgcggtgctgccgttgactgtggctgaggtgcagaaacttctgggaccccacgtggagggcctgaaggcggaggagcggcaccgcccggtgcgggactggatcctacggcagcggcaggacgacctggacacgctggggctggggctacagggcggcatccccaacggctacctggtcctagacctcagcatgcaagaggccctctcggggacgccctgcctcctaggacctggacctgttctcaccgtcctggcactgctcctagcctccaccctggcc

SEQ ID NO: 3960 - DNA, 1866 bp, Homo sapiens
  source 1..1866: mol_type = genomic DNA
atggccttgccaacggctcgacccctgttggggtcctgtgggacccccgccctcggcagcctcctgttcctgctcttcagcctcggatgggtgcagccctcgaggaccctggctggagagacagggcaggaggctgcgcccctggacggagtcctggccaacccacctaacatttccagcctctcccctcgccaactccttggcttcccgtgtgcggaggtgtccggcctgagcacggagcgtgtccgggagctggctgtggccttggcacagaagaatgtcaagctctcaacagagcagctgcgctgtctggctcaccggctctctgagccccccgaggacctggacgccctcccattggacctgctgctattcctcaacccagatgcgttctcggggccccaggcctgcacccgtttcttctcccgcatcacgaaggccaatgtggacctgctcccgaggggggctcccgagcgacagcggctgctgcctgcggctctggcctgctggggtgtgcgggggtctctgctgagcgaggctgatgtgcgggctctgggaggcctggcttgcgacctgcctgggcgctttgtggccgagtcggccgaagtgctgctaccccggctggtgagctgcccgggacccctggaccaggaccagcaggaggcagccagggcggctctgcagggcgggggacccccctacggccccccgtcgacatggtctgtctccacgatggacgctctgcggggcctgctgcccgtgctgggccagcccatcatccgcagcatcccgcagggcatcgtggccgcgtggcggcaacgctcctctcgggacccatcctggcggcagcctgaacggaccatcctccggccgcggttccggcgggaagtggagaagacagcctgtccttcaggcaagaaggcccgcgagatagacgagagcctcatcttctacaagaagtgggagctggaagcctgcgtggatgcggccctgctggccacccagatggaccgcgtgaacgccatccccttcacctacgagcagctggacgtcctaaagcataaactggatgagctctacccacaaggttaccccgagtctgtgatccagcacctgggctacctcttcctcaagatgagccctgaggacattcgcaagtggaatgtgacgtccctggagaccctgaaggctttgcttgaagtcaacaaagggcacgaaatgagtcctcaggtggccaccctgatcgaccgctttgtgaagggaaggggccagctagacaaagacaccctagacaccctgaccgccttctaccctgggtacctgtgctccctcagccccgaggagctgagctccgtgccccccagcagcatctgggcggtcaggccccaggacctggacacgtgtgacccaaggcagctggacgtcctctatcccaaggcccgccttgctttccagaacatgaacgggtccgaatacttcgtgaagatccagtccttcctgggtggggcccccacggaggatttgaaggcgctcagtcagcagaatgtgagcatggacttggccacgttcatgaagctgcggacggatgcggtgctgccgttgactgtggctgaggtgcagaaacttctgggaccccacgtggagggcctgaaggcggaggagcggcaccgcccggtgcgggactggatcctacggcagcggcaggacgacctggacacgctggggctggggctacagggcggcatccccaacggctacctggtcctagacctcagcatgcaagaggccctctcggggacgccctgcctcctaggacctggacctgttctcaccgtcctggcactgctcctagcctccaccctggcc

SEQ ID NO: 3961 - DNA, 2739 bp, Homo sapiens
  source 1..2739: mol_type = genomic DNA
atgaccaaattccaggagatggtgacattcaaggatgttgctgtggtcttcactgaggaggagctggggctgctggactctgtccagaggaagctgtaccgagatgtgatgctggagaacttcaggaacctgctcttagtagcacatcagcccttcaagccagacctaatatcccagctggagagagaagaaaagcttttgatggtggagacagaaaccccaagagatggatgttcaggaaggaagaatcaacaaaagatggagagtattcaggaagtaacagtaagctacttttcccccaaagagctttcctcccgtcagacctggcaacaaagtgcaggtgggttaatcaggtgtcaagatttcctgaaagtttttcaagggaagaattctcagttgcaagaacaaggtaattccctcggccaggtttgggcaggaataccagttcagatttctgaagataagaactatatattcactcatatagggaatggctccaattatataaaaagtcaagggtatccatcttggagggcacatcattcttggaggaaaatgtatctgaaagagtcacataattatcagtgtagatgtcagcaaatttccatgaaaaatcatttctgtaagtgtgacagtgtcagttggctctcacatcacaatgataaactggaagtacacagaaaagaaaactacagctgccatgactgtggagaagatatcatgaaggtatcattacttaatcaggagtcaattcaaacagaggagaagccctatccatgtactgggtatagaaaagccttcagtaatgactccagctctgaggttcatcagcagttccacttggaagggaagccctatacatacagttcatgtggaaagggctgtaattatagttcacttcttcatattcatcaaaatattgagagagaagatgatattgagaattcacatctgaaatcctatcagagagtgcatacagaggagaaaccatgcaaatgtggtgaatatggtgagaacttcaatcactgttcccctcttaacacttatgaacttatccacacaggtgagatgtcctataggcacaacatttatgagaaagccttcagtcatagcttagaccttaatagtatttttagggtccatactagggatgaaccccatgaatatgaggaaaatgagaatgtctttaatcagagttcatgtcttcaagtccatcaaaaaatccacactgaagagaaactatacacagatatagagtatggaaagagtttcatttgtagttcaaatcttgacattcagcatagggttcatatggaagagaattcatataattctgaggagtgtggtaatggcttcagtctggcctcacattttcaggaccttcagatagtccacactaaggaacaaccatataaacgctatgtgtgtagtaacagcttcagccataatttatatcttcaaggtcatccaaaaattcacattggagagaaaccacgtaaggagcatgggaatggcttcaactggagctcaaaacttaaagatcatcagagagtccacactggacagaagccatacaaatgcaatatatgcggcaaaggtttcaatcatagatcagttctgaatgttcatcagagagtccacacaggagagaaaccttataaatgcgaggaatgtgataagggattcagtcggagttcatatcttcaagcccatcagagagtccacactggagaaaaaccttataaatgtgaggaatgtgggaaggggttcagtcgaaattcataccttcaaggccatcagagagttcacactggagaaaaaccatacaagtgtgaggagtgtgggaagggcttcagtcggagttcacaccttcaaggccatcagagagtccacactggagaaaaaccattcaaatgtgaggaatgtgggaaggggttcagttggagctttaatcttcaaattcatcagagggttcacacaggagaaaaaccctataaatgtgaagaatgtggtaaaggcttcagtaaggcctcaacacttttggcccatcagagggtccacacgggagagaagccataccaatgtgatgagtgtggtaagagtttcagtcagagatcataccttcagagtcatcagagtgtccattctggagaaagaccatatatatgtgaggtatgtggaaagggcttcagtcagagagcatatcttcaaggtcatcagagagtccacactagagtgaaaccgtataaatgtgagatgtgtgggaagggctttagtcagagttcgcgccttgaagcacatcggagggttcacacaggagggaaaccatacaaatgtgaggtgtgtacaaagggtttcagtgagagttcacgccttcaagcacaccaaagggttcatgtggaagggagaccctataaatgtgaacagtgtggtaagggtttcagtgggtattcaagtcttcaagcccatcacagagtccacacaggagagaaaccatacaaatgtgaggtatgtggaaagggcttcagtcagagatcaaatcttcaggctcaccagagagtccacacaggagagaaaccatacaaatgtgatgcatgtggtaagggtttccgttggagctcaggtcttctcattcatcaaagagtccatagtagtgataaattctataaaagcgaagactatggtaaggactacccttcatcagagaatctacacagaaatgaagattctgttttgttt

SEQ ID NO: 3962 - DNA, 2721 bp, Homo sapiens
  source 1..2721: mol_type = genomic DNA
atggtgacattcaaggatgttgctgtggtcttcactgaggaggagctggggctgctggactctgtccagaggaagctgtaccgagatgtgatgctggagaacttcaggaacctgctcttagtagcacatcagcccttcaagccagacctaatatcccagctggagagagaagaaaagcttttgatggtggagacagaaaccccaagagatggatgttcaggaaggaagaatcaacaaaagatggagagtattcaggaagtaacagtaagctacttttcccccaaagagctttcctcccgtcagacctggcaacaaagtgcaggtgggttaatcaggtgtcaagatttcctgaaagtttttcaagggaagaattctcagttgcaagaacaaggtaattccctcggccaggtttgggcaggaataccagttcagatttctgaagataagaactatatattcactcatatagggaatggctccaattatataaaaagtcaagggtatccatcttggagggcacatcattcttggaggaaaatgtatctgaaagagtcacataattatcagtgtagatgtcagcaaatttccatgaaaaatcatttctgtaagtgtgacagtgtcagttggctctcacatcacaatgataaactggaagtacacagaaaagaaaactacagctgccatgactgtggagaagatatcatgaaggtatcattacttaatcaggagtcaattcaaacagaggagaagccctatccatgtactgggtatagaaaagccttcagtaatgactccagctctgaggttcatcagcagttccacttggaagggaagccctatacatacagttcatgtggaaagggctgtaattatagttcacttcttcatattcatcaaaatattgagagagaagatgatattgagaattcacatctgaaatcctatcagagagtgcatacagaggagaaaccatgcaaatgtggtgaatatggtgagaacttcaatcactgttcccctcttaacacttatgaacttatccacacaggtgagatgtcctataggcacaacatttatgagaaagccttcagtcatagcttagaccttaatagtatttttagggtccatactagggatgaaccccatgaatatgaggaaaatgagaatgtctttaatcagagttcatgtcttcaagtccatcaaaaaatccacactgaagagaaactatacacagatatagagtatggaaagagtttcatttgtagttcaaatcttgacattcagcatagggttcatatggaagagaattcatataattctgaggagtgtggtaatggcttcagtctggcctcacattttcaggaccttcagatagtccacactaaggaacaaccatataaacgctatgtgtgtagtaacagcttcagccataatttatatcttcaaggtcatccaaaaattcacattggagagaaaccacgtaaggagcatgggaatggcttcaactggagctcaaaacttaaagatcatcagagagtccacactggacagaagccatacaaatgcaatatatgcggcaaaggtttcaatcatagatcagttctgaatgttcatcagagagtccacacaggagagaaaccttataaatgcgaggaatgtgataagggattcagtcggagttcatatcttcaagcccatcagagagtccacactggagaaaaaccttataaatgtgaggaatgtgggaaggggttcagtcgaaattcataccttcaaggccatcagagagttcacactggagaaaaaccatacaagtgtgaggagtgtgggaagggcttcagtcggagttcacaccttcaaggccatcagagagtccacactggagaaaaaccattcaaatgtgaggaatgtgggaaggggttcagttggagctttaatcttcaaattcatcagagggttcacacaggagaaaaaccctataaatgtgaagaatgtggtaaaggcttcagtaaggcctcaacacttttggcccatcagagggtccacacgggagagaagccataccaatgtgatgagtgtggtaagagtttcagtcagagatcataccttcagagtcatcagagtgtccattctggagaaagaccatatatatgtgaggtatgtggaaagggcttcagtcagagagcatatcttcaaggtcatcagagagtccacactagagtgaaaccgtataaatgtgagatgtgtgggaagggctttagtcagagttcgcgccttgaagcacatcggagggttcacacaggagggaaaccatacaaatgtgaggtgtgtacaaagggtttcagtgagagttcacgccttcaagcacaccaaagggttcatgtggaagggagaccctataaatgtgaacagtgtggtaagggtttcagtgggtattcaagtcttcaagcccatcacagagtccacacaggagagaaaccatacaaatgtgaggtatgtggaaagggcttcagtcagagatcaaatcttcaggctcaccagagagtccacacaggagagaaaccatacaaatgtgatgcatgtggtaagggtttccgttggagctcaggtcttctcattcatcaaagagtccatagtagtgataaattctataaaagcgaagactatggtaaggactacccttcatcagagaatctacacagaaatgaagattctgttttgttt

SEQ ID NO: 3963 - DNA, 5613 bp, Homo sapiens
  source 1..5613: mol_type = genomic DNA
atggacaagggaagagagagaatggccgctgccgccgccgctgctgccgccgccgccgccgccgctcagtgccggagccctcggtgcgcggcggagagaagaggattccggcgggaactcgactcttggcgccaccgcctcatgcactgtgtaggttttgagagtattttagaagggctttatggaccacggctacgaagagacctcagtttatttgaagactgtgaaccagaagagctgactgactggtctatggatgaaaaatgttcattttgtaacctacagagagaagcagtcagtgattgtataccatctcttgattcttcacagtcaacaccaacagaggagctatcatctcagggccagtccaacactgataagattgaatgccaagcagaaaattacctaaatgcactctttcgaaagaaagatcttcctcagaactgtgatcctaacattcccctagttgctcaggaattaatgaaaaagatgatacgtcaatttgcgattgagtacatttcaaaaagtggtaaaactcaagagaatagaaatggttcaattggaccaagtatagtatgtaaaagtatccaaatgaatcaagcagaaaactcccttcaggaagagcaggaaggccccttagacctcactgtgaatcgaatgcaagaacaaaatactcagcaaggggatggagtgttagatctctctacaaagaaaaccagcataaaatctgaagagtcatccatatgtgatccttcttctgaaaattcagtggctggttcaactgttgatgcaaaatcagaggaagctactaaaatggaaaaaagaaaatcagcattaaacaaagttttggaatctttgtgcatacatcaccagcaacaagttttggctatgttgaaatttctagtccaagagcagaatgctgcttctctttgctgttgtaatacatcatgtgttgtgtcttcagaatctcaaaagcccttaatcgaagatgatttatgtggtctgttctgtagttgtgaatataggctggcagaaagaggttgtttacaaaacgaaaaacaaagccctggtttagaacctctgccagtctgtattaaagatttacattgtttatcttgccaaactgtaactgttgaacacgttaagccagtagtgaatagaggaattgcagacagttataattctcacaggtgctgttctggactgttaccaaacattcactctacaaaatcagcctttcgtagtcctcttttgtcaaaggaagtatgtgatctttcagtcactcttaaagatgcctgtagatctcgaagtccctcacccccaccattatcacctatagaaactgaaggatttgaaaaattgaaagacgtcatctcagagatttcagccttagaaaataacaaacttgaagcaaacattaaccagcctccatctctcacaccagcagaaatcagcagcaataagagtgatcatcaagataaaatacttaaaactaaaaaatccagtaactcttattctttactctcaaatgacagcaataattctactacaaatcatgaaaaaggtgaaactgctgtaatttttcaagatttaatggatcgcattaatgaaaaactaaaatcaatagaaaccacggatatgacaagccttgtaaaattatctagcagtgattataatacatataatgatttaaaattgggagatttcataacatctctcttgcataatgcaaaagccagtgattatagttttatggaattattgagtcaacatgataaaaaggtagaaaataaaattattcagacaagatttcgaaagcgtcaagaaactttatttgcaatgcgcaactcctctgattcacccatgtttagaaggcagtctttacagataaaaagagaacttgctagtcttgatgaaaattttacaagaaaaaaatacaccgaaaaaagttcaaggaaattgacacaaaacaatgagatatcttcatcagacaaaggagaattctatcatgaccaagggccttctttacaaaattctaaaagacttcaaggtaaaaatcatgctgaaacatcattttcaccaaattatgcattacagtcactgcaactacctcttcatagttcagaaactaacttgtcttttaatgaattttcagaaagctttaaaacaacttcccctgagaaaatgagcataagaaagccacaggagaaatctgcagatggaaaacaatttttgcaaaatgataggaaaaatccaaagttaggtaatactcaaactcttttgagaaatgatgtttctggacttttgagcagaactaaacgaaatattgtgcctccagggtggtattctgtatatgtaacaaataattatgtttttaaaaaatcccctaaagccaaaaaagtatccgaatccacaacaaaaaacgatccagtgaaaaatattcacattgaaagctcacacaatatagacctaaacaaaattgcaatgaattctaatttacaagtggttgtgaagcgtttggaagatacaataagtatagccaaaaaatcctggaataatcagccattatcagaaggatataaagcatccaagaaattgatagaaattgatggtaaagaccaacatgctgacagaaatatgactcttactctaaatagaatgacatgcaaagaacagagcttatcaaaatctgtggtagcatccggcaatattatcaatagtcactgcatgcctacagtggatttgaataacaaaagacttgaaaatctgaaaaagtcatctattttagatatgggtcgcttgatttccagtgttgaaaatgtaccagcaaaatatgaaggtactgaaagttcatctgtttccaactattctagtcctatcaaactcatgtttttatctgaggttaaaagtagtgaaggggtcaaatatactttaacttcagttggcacttcccattcaaatgttgttctcccttctgaaaaacctacaacccatcacgtaactgaagaaaaaacagaaacaaatgaggatatctcaaatgcgaactctgaaaattatcactccagtcattatgatactgatacttttcaaagagaactaaacaaattcagtcatgcaaaagaaactgcaggatcctctacaatgtttataggtgatataaatagtgataagccacaagaagaacctaaggacaattcaagcagtgctactgatccatcttttaaaagaaaaccaggtagaccaaaaaaaataggtccccaagttgtgaaacagattaagcgaccaattggaagaccaccaaagcctaaaattgatcaaacaaacatcactgtttgccagaatgagccctttagtgctggaaggaaaagcccagaatgtctcatatcagaagtaaaagaaggtatttataaaaagagtattacagtaactgttatttacggaaggtcaagaagaactaaaaggcatgtttctgaaggaagggtaaacataagcaaccttatgtctttaaacaataatgctggtgattttccaactgaatataatagtcccagaaatattagtgaagacaaaattgacttgggtgaaagaataagtgctgtagcaagcttgactactgaaagtgagatcttggggtctggctttgaatatgtgagacccatcaagaacaaatctgtgatacctcagccttccaagaacattattcgaccaaatcagaagcctttggcaataagtaggaagcctggtagaccggcaaaagtgaaaatctctggcatatctgtgactattaatagaacttcacctcaggaaagagaagtaagtattagcagctgcttgcctcctttagaacaggataatacgtcaggaaaaaatctgcctgaagaaaagtatgaccaacagtgcactcaaatggataaaataaggcacactgaagctgatatatttaaaaatggatcaaaacgtatgattgctactgtacctttgagacattctattagggatagaaaaccatctctgcatttcttacattcattagcatcttctagctcacttatttatagaaacgctctgctccataaatcatataaactgcatttgcagaaaaataaaagtcagaaggaaaaacataggcactcaaagatgaaaatagcttacaaagataccccaagaaacagactttcgcggaatgcaaaaaagtgtttggaagataataaattagtacctatttctgaagtatccttggatcctataatttcatcaaaccctttgctcaggtggtgggctacttctgcttcaaatgattccttattagaggaattaaacaatagatttgagcaaataacaaatgcttgggtgcaagtaagtggagatgaagctgaaaattgtattcataaaaaaagagaacacattgaaaatgatcatttcaaagtagcaagccctttggaaacttgtcttttagaacttgaagtttcacctgtaaaaatgctttttcagaaaaagtatgatttgaatgaactctgtacttggtttatgcaaacaacagaaacacagtctctttcactagttagaaaagcaaatgcccgaaaccctttggaagtaataaataccaggggaatcaaattagggaccaaatattctgactttaatgccagccccttcagaaagcactttaaaaaatttgcactctcttctccttcaaaatcagcagagaaattgcatatactgcataaagtggctaactctccactcttaaatgtgaaaagtaatttagcaatagctagattaaaaaggactgagtttaagaggttgcatcatgaaaggtggaaaagagagggaaagctgcacaaccatggaacagttgactggaactctaaaaggagaaacttaagatttttctgccagaaccaatttttaaataagactgagggagaaacaaatgctgacatcccactccaaggaaaaagcatagtagataatcagtgtgttttgccacctgagatcaggggtgacttgcagcagagggtagtaatgcctgacttcaaaatacatgctagttttgagaataaatttaagtcagaagcaaaagagaatggaacaaattgcagccaaaaagactttcaaaagggaccaagactagaaaatgtatgtcctaatagttggaggtcaaaaaccttaaaagactgtagaatatttttgaggaagctcaactgtcttgaacacagaaatacttttaagctaaatacaatcatttactctcctgaatctactgacagtggaaatactcatcagactcatatggaagaatcaaagcgctttactttaagatctcattctgctaggcaaaattcttttaaaaagcaatctaaagaaatagaaaatgctaacacaaataatccttcagctgatgaatttgctgaccatcttggcaatagtaaattaagcaaatgtgttaactttgacaagaatcctgatagttttgaagttcttagcaatttgaacaaaagaaaaagaccaccatggaagatcacagaaatgtcaacaaaaagacataaacgacagtcttgcaacagtggacaaatggcaaactatttttccaaatccctagcatgctacaag

SEQ ID NO: 3964 - DNA, 954 bp, Homo sapiens
  source 1..954: mol_type = genomic DNA
atggacaagggaagagagagaatggccgctgccgccgccgctgctgccgccgccgccgccgccgctcagtgccggagccctcggtgcgcggcggagagaagaggattccggcgggaactcgactcttggcgccaccgcctcatgcactgtgtaggttttgagagtattttagaagggctttatggaccacggctacgaagagacctcagtttatttgaagactgtgaaccagaagagctgactgactggtctatggatgaaaaatgttcattttgtaacctacagagagaagcagtcagtgattgtataccatctcttgattcttcacagtcaacaccaacagaggagctatcatctcagggccagtccaacactgataagattgaatgccaagcagaaaattacctaaatgcactctttcgaaagaaagatcttcctcagaactgtgatcctaacattcccctagttgctcaggaattaatgaaaaagatgatacgtcaatttgcgattgagtacatttcaaaaagtggtaaaactcaagagaatagaaatggttcaattggaccaagtatagtatgtaaaagtatccaaatgaatcaagcagaaaactcccttcaggaagagcaggaaggccccttagacctcactgtgaatcgaatgcaagaacaaaatactcagcaaggggatggagtgttagatctctctacaaagaaaaccagcataaaatctgaagagtcatccatatgtgatccttcttctgaaaattcagtggctggcatgctacaagtgaaaactgatgagaaactgaatgtgtctgatgagaatacagcaagttgccctttgagccccattaagatgtgccttaatcgtcccattgaatggaatctgaatttgacaacagcatctctaacgagctgtacagttcataaccaaaatctcaaaagcgaagagaaa

SEQ ID NO: 3965 - DNA, 1806 bp, Homo sapiens
  source 1..1806: mol_type = genomic DNA
atggacaagggaagagagagaatggccgctgccgccgccgctgctgccgccgccgccgccgccgctcagtgccggagccctcggtgcgcggcggagagaagaggattccggcgggaactcgactcttggcgccaccgcctcatgcactgtgtaggttttgagagtattttagaagggctttatggaccacggctacgaagagacctcagtttatttgaagactgtgaaccagaagagctgactgactggtctatggatgaaaaatgttcattttgtaacctacagagagaagcagtcagtgattgtataccatctcttgattcttcacagtcaacaccaacagaggagctatcatctcagggccagtccaacactgataagattgaatgccaagcagaaaattacctaaatgcactctttcgaaagaaagatcttcctcagaactgtgatcctaacattcccctagttgctcaggaattaatgaaaaagatgatacgtcaatttgcgattgagtacatttcaaaaagtggtaaaactcaagagaatagaaatggttcaattggaccaagtatagtatgtaaaagtatccaaatgaatcaagcagaaaactcccttcaggaagagcaggaaggccccttagacctcactgtgaatcgaatgcaagaacaaaatactcagcaaggggatggagtgttagatctctctacaaagaaaaccagcataaaatctgaagagtcatccatatgtgatccttcttctgaaaattcagtggctgggagactacacagaaacagagaggactatgtggaaagaagtgctgagtttgcagatggtttgctctcaaaagctttgaaagacattcagtctggagcactggacataaataaagcaggcatactttatggcatacctcaaaaaactttacttcttcacttagaagccttaccagcagggaagcctgcatcttttaaaaacaaaactcgagatttccatgatagttattcatataaggacagtaaagaaacttgtgcagtgctgcaaaaagtagccttgtgggcaagagctcaagcagagcgcacagaaaaaagtaaactcaatctacttgaaacctcagaaataaaattcccaacagcttccacttacctccatcagctaactctacagaaaatggtcactcagtttaaagaaaaaaatgaaagcctccaatatgaaacttcaaatcctactgtacagttaaaaattcctcagctacgagtaagttctgtctcaaaatcacaacctgatggttctggtctgttggatgttatgtatcaagtttccaaaacctcttcagtcctagaaggatcagctctccaaaaactgaaaaatatactccctaaacagaacaaaatagaatgttctgggcctgtaactcactcaagtgttgactcttactttctacatggggacctctctcctttgtgtcttaattctaaaaatggaacagttgatggaacctctgaaaatactgaagatggattagatcgaaaagacagtaagcagcccaggaaaaaacgtggccgctatcggcaatatgatcatgaaataatggaagaagctattgcaatggtaatgagcggaaaaatgagtgtttccaaagcacaaggaatttatggggtacctcacagcactttagaatacaaggtaaaagaaagatctggaacactgaagactcctccgaagaagaaactacgattaccagacactgggttatataatatgacagattcagggactggcagctgcaaaaacagcagcaagcctgtg

SEQ ID NO: 3966 - DNA, 2253 bp, Homo sapiens
  source 1..2253: mol_type = genomic DNA
atgggacctcagggagccaggagacaggctttcttggcatttggggatgtcactgtggatttcacccagaaggaatggaggctgctgagccctgctcagagggccctgtacagggaggtgacactggagaactacagccacctggtctcactaggaattctccattctaaaccagaactcatcaggcggctagagcaaggggaagtgccctggggagaagagagaagacgccggccaggcccctgtgcaggaatatatgcagaacatgtcctgcggcccaagaatcttggacttgcacatcagaggcaacagcaactacaattttctgatcaaagcttccagagtgacacagctgaaggtcaagagaaagaaaaaagcactaagcccatggcattttccagcccacccctaagacatgcagtaagctcaaggaggaggaacagtgtagtggaaatagagtctagtcaaggccagagggaaaatcctacagaaatagacaaagtattgaaaggaatagaaaattcaagatggggagcattcaagtgtgcagagcgtgggcaagacttcagccggaagatgatggtaatcatacacaaaaaagcacattccaggcagaaactttttacatgcagggagtgtcaccagggctttagagatgagtcagcattgctcttgcaccagaacacacacacaggagagaagtcctatgtgtgcagtgtgtgtgggcgaggcttcagcctcaaggccaacctcctcagacaccagaggacacactcaggagagaagccttttctgtgcaaggtgtgtggacgaggctataccagtaagtcatacctcactgtgcatgagagaacacacacaggagagaagccttatgaatgccaggagtgtgggcgaaggtttaacgataagtcctcatacaacaagcacttgaaggcgcattcaggggagaagccttttgtgtgcaaggagtgtgggcgaggctatactaataagtcatacttcgttgtgcacaagagaatacactcaggagagaagccttacagatgccaggagtgtggccgaggctttagcaataagtcacaccttatcacacaccagaggacacactcaggggagaagccctttgcgtgcaggcagtgtaagcaaagttttagcgtgaaaggaagtctcctcagacaccagagaacacactcaggggagaagccttttgtgtgcaaggattgtgagcgaagctttagccaaaagtcaactcttgtctaccaccagagaacacactcaggggagaaaccttttgtttgtagagaatgtgggcaaggatttattcagaagtcaacccttgtgaaacatcagatcacacactcagaggagaagccttttgtgtgcaaggactgtggacgaggctttatccaaaagtcaaccttcactttacaccagaggacacactcagaggagaagccttatggatgtcgggagtgtgggcgaaggtttcgggataagtcctcctataacaagcacctgagggcacacttgggtgagaaacgttttttctgcagggattgtgggcgaggctttaccttgaagccaaatctcaccatacatcagaggacacactcaggagagaagcccttcatgtgcaagcagtgtgagaaaagttttagtttgaaggcaaatcttcttagacatcagtggacacactcgggggaaaggccatttaattgcaaggattgcgggcgaggcttcatcctaaaatcaactctcctcttccaccagaagacacactcaggggagaagcctttcatctgtagtgaatgtgggcaaggatttatctggaagtcaaatcttgtgaaacaccagcttgcacattctggcaagcagccttttgtatgcaaggagtgtgggcgaggcttcaactggaagggaaatctcctcacacaccagaggacacactcaggggagaagcccttcgtgtgtaatgtgtgtgggcaaggcttcagctggaagagaagtctcaccagacaccactggcggatacactcaaaggagaagccttttgtttgccaggagtgtaagcgaggctataccagtaagtcagacctcactgtgcatgaaagaatacacacaggagagaggccttatgaatgccaagagtgtggacgaaagtttagcaataagtcatactacagtaagcacttaaagagacacttacgtgagaagcgtttttgtacagggagtgtgggtgaggcttcatct

SEQ ID NO: 3967 - DNA, 2109 bp, Homo sapiens
  source 1..2109: mol_type = genomic DNA
atgtgtgttttcttacatctcctttcttacataaaagataccagtttcattccaggacctgactgtgaacttcacccaagaggaatggcagcaactggaccctgctcagaggctcctgtacagggatgtgatgctggagaactacagcaacttggtctctgtggagtctctgatgtccaaagatcttggtccaagttctgtaatttcccattaacagggtatcatgttagcaaaccagatgtgattttcaaattggagcaaggagaagagccatggatagtggaggaattctcaaatcagaactacccagacattgatgatgccttagagaagaacaaggaaatccaagataaacatttgacacaaactgtattcttcagcaacaaaacactgattacagaaagagagaatgtatttgggaaaacacttaatctgggcatgaatagtgttccctcaagaaaaatgccctataaatgtaatccaggaggaaacagtttgaaaactaattcagaagtaattgttgcaaagaaaagcaaagaaaacagaaagattcctgatggatacagtggatttgggaagcatgagaaaagtcatttgggaatgaaaaaatacagatacaatccaatgaggaaagccagcaatcaaaacgaaaatcttattctgcaccagaacattcagattttgaaacaaccgtttgactataataaatgtgggaaaaccttcttcaagagggcaattctcattacacaaaaggggagacagactgaaaggaaaccaaatgaatgtaatgaatgtaggaaaaccttttctaagagatctaccctcattgtacatcagagaattcatacaggggagaaaccgtatgtttgtagtgattgtaggaaaacttttcgtgtgaagacaagcctcactcgacaccgaagaattcatactggagagagaccctatgaatgcagtgaatgcaggaaaaccttcattgacaaatctgcccttattgtacaccagaaaattcatggaggggagaaatcctatgagtgtaatgaatgtggaaagaccttttttcggaagtcagccctggctgaacatttcaggtcacacacaggggagaagccttacgaatgcaaggaatgtggaaatgccttcagcaagaaatcgtatcttgttgtacatcaaagaactcacagaggagagaagccaaatgaatgtaaggaatgtgggaaaaccttcttctgtcagtcagcccttactgcgcatcagagaattcacacaggggaaaaaccctatgaatgtagtgaatgtgagaaaaccttcttttgtcaatctgccctcaatgtgcatcgaagaagtcatacaggagagaagccctatgaatgcagtcaatgtggaaaatttttatgtacgaaatcagccctcattgcacatcagataactcatagaggaaagaagtcttatgaatgtaatgaatgtgggaaatttttctgccataagtcaacactcactatacatcagagaacacacacaggagagaaacatggtgtgtttaataaatgtggtagaatctccattgtgaagtcaaactgcagtcagtgtaagagaatgaacacaaaggagaatctttatgagtgtagtgaacatgggcatgccgtcagcaaaaactcacacctcattgtacatcagagaactatatgggagagaccatatgaatgcaatgaatgtgggagaacctactgcaggaagtcagccctgactcaccatcagagaacacacacaggacagagaccctatgagtgtaatgaatgtgggaaaaccttctgtcagaagttctcctttgttgaacatcagcgaactcacactggggagaaaccatatgaatgtaatgaatgtgggaaatccttctgccataagtcagccttcagagtccatagaagaattcacacaggagagaaaccatatgaatgtaatcaatgtgggaaaacctaccgtcgcctgtggactctcactgaacatcagaaaatacacacaggagagaaaccttatgaatgtaacaaatgtgagaaaacatttcgccacaaatcaaactttcttttacatcagaaatcccacaaggaa

SEQ ID NO: 3968 - DNA, 2040 bp, Homo sapiens
  source 1..2040: mol_type = genomic DNA
atgaaaatgaaaaaatttcagataccagtttcattccaggacctgactgtgaacttcacccaagaggaatggcagcaactggaccctgctcagaggctcctgtacagggatgtgatgctggagaactacagcaacttggtctctgtggggtatcatgttagcaaaccagatgtgattttcaaattggagcaaggagaagagccatggatagtggaggaattctcaaatcagaactacccagacattgatgatgccttagagaagaacaaggaaatccaagataaacatttgacacaaactgtattcttcagcaacaaaacactgattacagaaagagagaatgtatttgggaaaacacttaatctgggcatgaatagtgttccctcaagaaaaatgccctataaatgtaatccaggaggaaacagtttgaaaactaattcagaagtaattgttgcaaagaaaagcaaagaaaacagaaagattcctgatggatacagtggatttgggaagcatgagaaaagtcatttgggaatgaaaaaatacagatacaatccaatgaggaaagccagcaatcaaaacgaaaatcttattctgcaccagaacattcagattttgaaacaaccgtttgactataataaatgtgggaaaaccttcttcaagagggcaattctcattacacaaaaggggagacagactgaaaggaaaccaaatgaatgtaatgaatgtaggaaaaccttttctaagagatctaccctcattgtacatcagagaattcatacaggggagaaaccgtatgtttgtagtgattgtaggaaaacttttcgtgtgaagacaagcctcactcgacaccgaagaattcatactggagagagaccctatgaatgcagtgaatgcaggaaaaccttcattgacaaatctgcccttattgtacaccagaaaattcatggaggggagaaatcctatgagtgtaatgaatgtggaaagaccttttttcggaagtcagccctggctgaacatttcaggtcacacacaggggagaagccttacgaatgcaaggaatgtggaaatgccttcagcaagaaatcgtatcttgttgtacatcaaagaactcacagaggagagaagccaaatgaatgtaaggaatgtgggaaaaccttcttctgtcagtcagcccttactgcgcatcagagaattcacacaggggaaaaaccctatgaatgtagtgaatgtgagaaaaccttcttttgtcaatctgccctcaatgtgcatcgaagaagtcatacaggagagaagccctatgaatgcagtcaatgtggaaaatttttatgtacgaaatcagccctcattgcacatcagataactcatagaggaaagaagtcttatgaatgtaatgaatgtgggaaatttttctgccataagtcaacactcactatacatcagagaacacacacaggagagaaacatggtgtgtttaataaatgtggtagaatctccattgtgaagtcaaactgcagtcagtgtaagagaatgaacacaaaggagaatctttatgagtgtagtgaacatgggcatgccgtcagcaaaaactcacacctcattgtacatcagagaactatatgggagagaccatatgaatgcaatgaatgtgggagaacctactgcaggaagtcagccctgactcaccatcagagaacacacacaggacagagaccctatgagtgtaatgaatgtgggaaaaccttctgtcagaagttctcctttgttgaacatcagcgaactcacactggggagaaaccatatgaatgtaatgaatgtgggaaatccttctgccataagtcagccttcagagtccatagaagaattcacacaggagagaaaccatatgaatgtaatcaatgtgggaaaacctaccgtcgcctgtggactctcactgaacatcagaaaatacacacaggagagaaaccttatgaatgtaacaaatgtgagaaaacatttcgccacaaatcaaactttcttttacatcagaaatcccacaaggaa

SEQ ID NO: 3969 - DNA, 1926 bp, Homo sapiens
  source 1..1926: mol_type = genomic DNA
atgctggagaactacagcaacttggtctctgtggggtatcatgttagcaaaccagatgtgattttcaaattggagcaaggagaagagccatggatagtggaggaattctcaaatcagaactacccagacattgatgatgccttagagaagaacaaggaaatccaagataaacatttgacacaaactgtattcttcagcaacaaaacactgattacagaaagagagaatgtatttgggaaaacacttaatctgggcatgaatagtgttccctcaagaaaaatgccctataaatgtaatccaggaggaaacagtttgaaaactaattcagaagtaattgttgcaaagaaaagcaaagaaaacagaaagattcctgatggatacagtggatttgggaagcatgagaaaagtcatttgggaatgaaaaaatacagatacaatccaatgaggaaagccagcaatcaaaacgaaaatcttattctgcaccagaacattcagattttgaaacaaccgtttgactataataaatgtgggaaaaccttcttcaagagggcaattctcattacacaaaaggggagacagactgaaaggaaaccaaatgaatgtaatgaatgtaggaaaaccttttctaagagatctaccctcattgtacatcagagaattcatacaggggagaaaccgtatgtttgtagtgattgtaggaaaacttttcgtgtgaagacaagcctcactcgacaccgaagaattcatactggagagagaccctatgaatgcagtgaatgcaggaaaaccttcattgacaaatctgcccttattgtacaccagaaaattcatggaggggagaaatcctatgagtgtaatgaatgtggaaagaccttttttcggaagtcagccctggctgaacatttcaggtcacacacaggggagaagccttacgaatgcaaggaatgtggaaatgccttcagcaagaaatcgtatcttgttgtacatcaaagaactcacagaggagagaagccaaatgaatgtaaggaatgtgggaaaaccttcttctgtcagtcagcccttactgcgcatcagagaattcacacaggggaaaaaccctatgaatgtagtgaatgtgagaaaaccttcttttgtcaatctgccctcaatgtgcatcgaagaagtcatacaggagagaagccctatgaatgcagtcaatgtggaaaatttttatgtacgaaatcagccctcattgcacatcagataactcatagaggaaagaagtcttatgaatgtaatgaatgtgggaaatttttctgccataagtcaacactcactatacatcagagaacacacacaggagagaaacatggtgtgtttaataaatgtggtagaatctccattgtgaagtcaaactgcagtcagtgtaagagaatgaacacaaaggagaatctttatgagtgtagtgaacatgggcatgccgtcagcaaaaactcacacctcattgtacatcagagaactatatgggagagaccatatgaatgcaatgaatgtgggagaacctactgcaggaagtcagccctgactcaccatcagagaacacacacaggacagagaccctatgagtgtaatgaatgtgggaaaaccttctgtcagaagttctcctttgttgaacatcagcgaactcacactggggagaaaccatatgaatgtaatgaatgtgggaaatccttctgccataagtcagccttcagagtccatagaagaattcacacaggagagaaaccatatgaatgtaatcaatgtgggaaaacctaccgtcgcctgtggactctcactgaacatcagaaaatacacacaggagagaaaccttatgaatgtaacaaatgtgagaaaacatttcgccacaaatcaaactttcttttacatcagaaatcccacaaggaa

SEQ ID NO: 3970 - DNA, 2037 bp, Homo sapiens
  source 1..2037: mol_type = genomic DNA
atggaaaatgagaaggagataccagtttcattccaggacctgactgtgaacttcacccaagaggaatggcagcaactggaccctgctcagaggctcctgtacagggatgtgatgctggagaactacagcaacttggtctctgtggggtatcatgttagcaaaccagatgtgattttcaaattggagcaaggagaagagccatggatagtggaggaattctcaaatcagaactacccagacattgatgatgccttagagaagaacaaggaaatccaagataaacatttgacacaaactgtattcttcagcaacaaaacactgattacagaaagagagaatgtatttgggaaaacacttaatctgggcatgaatagtgttccctcaagaaaaatgccctataaatgtaatccaggaggaaacagtttgaaaactaattcagaagtaattgttgcaaagaaaagcaaagaaaacagaaagattcctgatggatacagtggatttgggaagcatgagaaaagtcatttgggaatgaaaaaatacagatacaatccaatgaggaaagccagcaatcaaaacgaaaatcttattctgcaccagaacattcagattttgaaacaaccgtttgactataataaatgtgggaaaaccttcttcaagagggcaattctcattacacaaaaggggagacagactgaaaggaaaccaaatgaatgtaatgaatgtaggaaaaccttttctaagagatctaccctcattgtacatcagagaattcatacaggggagaaaccgtatgtttgtagtgattgtaggaaaacttttcgtgtgaagacaagcctcactcgacaccgaagaattcatactggagagagaccctatgaatgcagtgaatgcaggaaaaccttcattgacaaatctgcccttattgtacaccagaaaattcatggaggggagaaatcctatgagtgtaatgaatgtggaaagaccttttttcggaagtcagccctggctgaacatttcaggtcacacacaggggagaagccttacgaatgcaaggaatgtggaaatgccttcagcaagaaatcgtatcttgttgtacatcaaagaactcacagaggagagaagccaaatgaatgtaaggaatgtgggaaaaccttcttctgtcagtcagcccttactgcgcatcagagaattcacacaggggaaaaaccctatgaatgtagtgaatgtgagaaaaccttcttttgtcaatctgccctcaatgtgcatcgaagaagtcatacaggagagaagccctatgaatgcagtcaatgtggaaaatttttatgtacgaaatcagccctcattgcacatcagataactcatagaggaaagaagtcttatgaatgtaatgaatgtgggaaatttttctgccataagtcaacactcactatacatcagagaacacacacaggagagaaacatggtgtgtttaataaatgtggtagaatctccattgtgaagtcaaactgcagtcagtgtaagagaatgaacacaaaggagaatctttatgagtgtagtgaacatgggcatgccgtcagcaaaaactcacacctcattgtacatcagagaactatatgggagagaccatatgaatgcaatgaatgtgggagaacctactgcaggaagtcagccctgactcaccatcagagaacacacacaggacagagaccctatgagtgtaatgaatgtgggaaaaccttctgtcagaagttctcctttgttgaacatcagcgaactcacactggggagaaaccatatgaatgtaatgaatgtgggaaatccttctgccataagtcagccttcagagtccatagaagaattcacacaggagagaaaccatatgaatgtaatcaatgtgggaaaacctaccgtcgcctgtggactctcactgaacatcagaaaatacacacaggagagaaaccttatgaatgtaacaaatgtgagaaaacatttcgccacaaatcaaactttcttttacatcagaaatcccacaaggaa

SEQ ID NO: 3971 - DNA, 4026 bp, Homo sapiens
  source 1..4026: mol_type = genomic DNA
atggaggagaacgaggtggagagcagcagcgacgcggcccctgggcctggccggcccgaggagccctctgagagcggcctgggtgtgggcacctcagaagccgtgtccgccgacagcagcgacgccgcggccgccccggggcaggcagaggccgatgactctggcgtggggcaaagctcggaccgcggcagccgttctcaggaggaggtatctgagagcagctcgagcgcagaccccctgcctaatagctacctccctgattcatcgtctgtgtctcatgggccagtggcaggggtgacaggcggtcccccagcacttgtgcactctagtgcactcccagaccccaacatgctggtgtccgactgcacagcttcctcctcggacctgggctcggccatcgacaagatcatcgagtccaccatcgggcccgacctcatccagaactgcatcactgtgaccagtgctgaggatggcggggccgagaccacacggtacctgatcctacagggcccagatgatggagcccccatgacatcaccaatgtccagttccaccttggcccacagcctagcagccattgaggccctggcagatggccccacatccacatccacatgcctggaggcacagggtgggcccagctccccggtgcagctgcccccagcctccggtgccgaagagccggacctgcagagcctggaggccatgatggaggtggtggtggtgcagcagttcaaatgcaagatgtgccagtaccggagcagcaccaaggccacactgctgcgccacatgcgggaacgccacttccgtccagtagcagcagccgcagcagcagctggtaaaaaaggacgtctacggaagtggagcacctccaccaagagccaagaggaagagggaccagaggaggaggacgatgatgacattgtagacgctggagccattgatgacctggaggaggatagcgactataatccagctgaggatgagccccgaggccggcagcttcggctccagcgccccacccccagtaccccaaggccccgaaggagacctggccggccccggaagctgccccgcctggagatctcagacctcccagatggtgtggaaggagagcctctagtgagttcccagagtggacagagccctccagagccacaggatcccgaggctcccagctcctcaggcccaggacacctggtggccatgggcaaggtgagcaggacccctgtggaagctggtgtgagccagtcagatgcagagaacgcagccccctcctgcccggatgagcatgacactctgccccggcgccgaggtcgaccttccaggcgcttcctaggcaagaaataccgcaagtactattacaagtcgcccaaaccacttttgaggcccttcctgtgccgcatctgtggttctcgctttctgtcccacgaggacctgcgcttccacgtcaactcccatgaggctggcgatccccagctcttcaagtgcctgcagtgcagctatcgttcccgccgctggtcctcgctcaaggagcacatgttcaaccacgtgggcagcaagccctacaagtgtgacgagtgcagctacaccagtgtctaccggaaggacgtcattcggcacgccgctgtgcacagccgggaccggaagaagaggccagatccgactccaaagctgagctctttcccctgccctgtgtgtggccgtgtgtaccccatgcagaaaagactcacgcagcacatgaagacgcacagcactgagaagccccacatgtgtgacaagtgtggaaagtcctttaagaagcgctacaccttcaaaatgcacctgctcacgcacatccaggctgttgccaaccgcaggttcaagtgtgagttctgtgagtttgtttgtgaagacaagaaggcactgctgaaccaccagttgtcccacgtcagtgacaagcccttcaaatgcagcttttgtccctaccgcaccttccgagaggacttcttgctgtcccatgtggctgtcaagcacacaggggccaagcccttcgcctgtgagtactgccacttcagcacacggcacaagaagaacctgcgcctgcacgtacggtgccgacacgcaagcagcttcgaggaatgggggaggcgccaccctgaggagcccccctcccgccgtcgccccttcttctctctgcagcagattgaggagctgaagcagcagcacagtgcggcccctggaccacctcccagttccccaggacctcctgagatacccccagaggcgacaactttccagtcatctgaggctccctcattgctctgttctgacaccctgggcggcgccaccatcatctaccagcaaggagctgaggagtcgacagcgatggccacgcagacagccttggatcttctgctgaacatgagtgctcagcgggaactggggggcacagccctgcaggtggctgtggtgaagtcggaagatgtggaagcagggttagcatcccctggtgggcagccctcccctgaaggtgccactccacaggtggtcaccctccacgtggcagagccagggggcggtgcagcagccgagagccagctaggccctcctgacctaccgcagatcaccctggcacctggtccatttggtgggactggctacagtgtcatcacagcaccccctatggaggagggaacatcagctcctggcacaccttacagcgaggagcccgcaggagaggcagcccaggctgtggttgtgagtgacaccctaaaagaagctggcacccactacatcatggctactgatggtacccagttgcaccacattgagctcaccgcagatggctccatctccttcccaagtccagatgctctggcctctggtgccaaatggcccctgctgcagtgtgggggactgcccagagacggccctgagcccccatctccagccaagacccactgcgtaggggactcccagagctctgcctcctcacctcctgcaaccagcaaagccctgggcctggcagtgcccccgtcaccgccatctgcagccactgctgcatcaaagaagttttcctgcaagatctgtgccgaggccttccctggccgagctgagatggagagtcacaagcgggcccacgctgggcctggtgccttcaagtgccccgactgccccttcagtgcccgccagtggcccgaggtccgggcgcacatggcacagcactcaagcctacggccccaccagtgtagccagtgcagctttgcctccaagaacaagaaggacctgcgtcggcacatgctgactcacacaaaggagaagccttttgcatgccacctctgcgggcagcgtttcaaccgtaacgggcacctcaagttccacatccagcggctgcacagtcctgatgggaggaagtcaggaacccctacagcccgggcccctacccagaccccaacccagaccatcatcctgaacagtgatgacgaaacactggccaccctgcacactgcactccagtccagtcacggggtcctgggcccagagcggctacagcaggcactgagccaggaacacatcatcgttgcccaggaacagacagtgaccaatcaggaggaagccgcctacatccaagagatcaccacggcagatggccagaccgtacagcacctggtgacctccgacaaccaggtgcagtatatcatctcccaggatggtgtccagcacctgctcccccaggaatatgttgtggtccctgaaggccatcacatccaggtacaggagggccagatcacacacatccagtatgaacaaggagccccgttccttcaggagtcccagatccagtatgtgcctgtgtccccaggccagcagcttgtcacacaggctcaacttgaggctgcagcacactcagctgtcacagcagtggctgatgctgccatggcccaagcccagggcctgtttggtacagacgagacagtgcccgaacacattcaacagctgcagcaccagggcatcgagtacgacgtcatcaccctggccgatgac

SEQ ID NO: 3972 - DNA, 909 bp, Homo sapiens
  source 1..909: mol_type = genomic DNA
atggaatccgtcacctttgaggatgtggccgtggagttcatccaggagtgggcattgctggacagcgcacggaggagcctgtgcaaatacaggatgcttgaccagtgcaggaccctggcctccaggggaactccaccatgcaaacccagttgtgtctcccagctggggcaaagagcagagccaaaggcaacagaacgagggattctccgtgccacaggtgttgcctgggaatctcaacttaaacccgaagagttgccttctatgcaggatcttttggaagaagcatcctccagggacatgcaaatggggccggggctgttcctgaggatgcagctggtgccctccatagaagagagggagacaccattgactcgagaggaccggccagctctccaggagccgccttggtctctgggatgcacgggactgaaggccgctatgcagattcagagggtggtgataccagtgcctactctgggccaccgcaacccatgggtggccagggattctgctgtgcctgcacgtgaccctgcctggcttcaggaggacaaagtggaggaagaagctatggctcctgggctgccaaccgcctgttcacaggaaccagtcacctttgcagatgtggctgtggtgttcaccccagaagaatgggtgtttctggactctactcagaggagcctgtatagagatgtgatgctggagaactacaggaacctggcctctgtggctgatcaactgtgcaaacccaatgcgttgtcttatttggaagaaagaggagagcagtggaccactgacaggggcgtcctctcagacacctgtgcagaacctcagtgtcaaccccaagaggcaattcctagccaagatacttttacagagatcctgtccattgatgtgaaagggccacccaac

SEQ ID NO: 3973 - DNA, 1995 bp, Homo sapiens
  source 1..1995: mol_type = genomic DNA
atggaatccgtcacctttgaggatgtggccgtggagttcatccaggagtgggcattgctggacagcgcacggaggagcctgtgcaaatacaggatgcttgaccagtgcaggaccctggcctccaggggaactccaccatgcaaacccagttgtgtctcccagctggggcaaagagcagagccaaaggcaacagaacgagggattctccgtgccacaggtgttgcctgggaatctcaacttaaacccgaagagttgccttctatgcaggatcttttggaagaagcatcctccagggacatgcaaatggggccggggctgttcctgaggatgcagctggtgccctccatagaagagagggagacaccattgactcgagaggaccggccagctctccaggagccgccttggtctctgggatgcacgggactgaaggccgctatgcagattcagagggtggtgataccagtgcctactctgggccaccgcaacccatgggtggccagggattctgctgtgcctgcacgtgaccctgcctggcttcaggaggacaaagtggaggaagaagctatggctcctgggctgccaaccgcctgttcacaggaaccagtcacctttgcagatgtggctgtggtgttcaccccagaagaatgggtgtttctggactctactcagaggagcctgtatagagatgtgatgctggagaactacaggaacctggcctctgtggctgatcaactgtgcaaacccaatgcgttgtcttatttggaagaaagaggagagcagtggaccactgacaggggcgtcctctcagacacctgtgcagaacctcagtgtcaaccccaagaggcaattcctagccaagatacttttacagagatcctgtccattgatgtgaaaggggagcaacctcagcctggagaaaaactctataaatataatgaacttgagaaaccttttaacagcattgaaccacttttccagtaccagagaattcatgctggagaggcatcctgtgaatgtcaagagattagaaattccttcttccagagtgcccacctaattgtgcccgagaaaatccgtagtggggataaatcctatgcatgtaacaaatgtgaaaaatccttcagatacagctctgaccttatcaggcatgagaagactcatactgcagagaagtgctttgactgtcaagaatgtgggcaagccttcaaatattcctcgaatctccggcgacacatgagaacccataccggagagaagccatttgaatgtagtcagtgtgggaaaaccttcacgaggaactttaacctgattttgcaccagagaaaccacacaggagagaagccctacgagtgtaaagattgtgggaaagccttcaatcagccatcatccctcaggagccacgtgagaactcacactggagagaagccctttgaatgcagccagtgtgggaaagccttcagggaacactcttcactgaagacacatctgcgaacccataccagagagaaaccatatgaatgcaaccagtgtggcaagcccttccggacgagcactcatctgaacgtgcacaagaggatacacacaggggagaaactgtatgagtgcgcgacttgcggtcaggtcttgagtcgtctttcaaccctgaagagtcacatgcgaactcacactggagagaagccctatgtgtgccaggaatgtgggcgagccttcagtgagccctcatccctcaggaaacatgcaaggactcacagtggcaagaagccctatgcatgccaggaatgcgggcgagcctttggtcagtcttcacatcttattgtacatgtgagaacacacagtgccgggagaccctatcaatgtaatcagtgtgagaaagccttcaggcacagctcctcactcactgtacacaaaagaacccatgtgggaagagagaccattaggaatggcagcctgcctttatccatgtctcatccatactgtgggccccttgctaat

SEQ ID NO: 3974 - DNA, 1389 bp, Homo sapiens
  source 1..1389: mol_type = genomic DNA
atggcccagggtttggtgacgttcgccgacgtagccatagacttttctcaggaggagtgggcctgtctgaactctgctcagagggacctgtactgggacgtgatgctggagaactacagtaacttggtctcactggatttggagtcagcatatgaaaataagagtttacctacagaaaaaaacattcatgaaataagggcttccaaaaggaattcagatagaagaagtaaatcccttggccgtaactggatatgtgaaggtacgcttgaaagaccacagcgctccagagggaggtatgtcaatcagatgatcatcaattatgtcaaaagacctgctactagagaaggcacccctcctagaacacatcagagacatcataaggagaattcctttgaatgtaaggactgtgggaaggcctttagtcgtggctatcaacttagtcaacatcagaaaatccatactggtgagaaaccttatgaatgtaaagaatgtaagaaggccttccgttggggcaatcagcttactcaacatcaaaaaattcatactggggagaagccctacgaatgtaaagactgtgggaaggcttttcgatggggctcaagcctcgttattcataagaggattcatactggtgaaaaaccctatgaatgtaaagactgtggaaaggcctttcggcgtggtgatgagctcactcagcaccagagattccacactggggagaaagactacgaatgcaaagactgtgggaagacctttagccgtgtgtataaacttattcagcacaagagaattcatagtggggagaagccttacgagtgtaaagactgtgggaaggcttttatttgtggttcaagcctcattcagcataaaagaattcacacaggtgagaaaccctatgaatgtcaagaatgtgggaaggcctttactcgagtcaattaccttactcagcatcagaagatccacaccggtgagaagcctcacgaatgtaaggagtgtgggaaggcctttcgctggggttcgagcctcgttaagcacgagaggatacatacgggcgagaagccgtacaagtgcacagaatgtgggaaggccttcaattgtggctatcacctcactcagcacgagagaatccacacaggcgaaaccccgtataaatgtaaggagtgtgggaaggctttcatttatggatcgagcctcgtgaaacatgagagaattcataccggggtgaaaccctatgggtgtacagaatgtgggaagagctttagtcacggccatcagcttacacaacatcagaaaacgcacagtggggcgaaatcctacgaatgtaaggagtgcgggaaggcatgtaaccacctaaaccatctccgagaacatcagaggatccacaacagt

SEQ ID NO: 3975 - DNA, 3477 bp, Homo sapiens
  source 1..3477: mol_type = genomic DNA
atgccaggaacccctggaagcctagaaatgggactgttgacatttagggatgtggccatagaattctctccggaggagtggcaatgtctggacactgcacagcagaatttatataggaatgtgatgttagagaactacagaaacctggccttcctgggtatatgtcctcattttcctcaagacttttggccagagcagagcatggaagattcttttcaaaaagtattactgagaaaatatgaaaaatgtggacatgagaatttacagttaagaaaaggttgtaaaagtgtggatgagtgtaaggtgcacaaagaaggttataataaacttaaccagtgtctcacaactgcccagagcaaagtatttcaatgtgggaaatatttgaaagtcttctataaatttttaaattcaaacagacatacgataagacatactggaaagaaatgcttcaaatgtaaaaaatgtgtcaagtcattttgcatccgtttacacaaaacccaacataaatgcgtttatattacagagaagtcctgtaaatgtaaagaatgtgaaaaaacctttcattggtcctcaacccttactaatcataaggaaattcatactgaagataaaccctacaaatgtgaagaatgtggcaaagcttttaagcagctctcaacccttactacacataaaataatctgtgctaaagagaaaatctacaagtgtgaagaatgtggcaaagcatttctatggtcctcaaccctaactagacataagaggatacacactggagagaaaccctacaaatgtgaagaatgtggcaaagcttttagccattcttcaacccttgctaaacataagagaattcatactggagagaaaccctacaaatgtgaagaatgtggcaaagcttttagccgttcttcaacccttgctaaacataagagaattcatactggagagaaaccctacaaatgtaaagaatgtggcaaagcttttagcaattcctcaacccttgctaatcataagataactcatactgaagagaaaccctacaaatgtaaagaatgtgacaaagcttttaagcgactctcaacccttactaaacataaaataatacatgctggagagaaactctacaaatgtgaagaatgtggcaaagcttttaatcgatcttcaaatcttactatacataagtttattcatactggagagaaaccttacaagtgtgaagaatgtggcaaagcatttaactggtcctcaagccttactaaacataaaagatttcatactagagagaaacccttcaaatgtaaagaatgtggcaaagcatttatatggtcttcaaccctaactagacataagaggatacacactggagagaagccctacaaatgtgaagaatgtggcaaagcttttaggcaatcctcaacccttactaaacataagataattcatactggagagaaaccctacaaatttgaagaatgtggcaaagcttttagacaatccttaacccttaataaacataagataattcatagtagagagaaaccctacaaatgtaaagaatgtggcaaagcttttaagcaattctcaacccttactacacataaaataattcatgctggaaagaaactctacaaatgtgaagaatgtggcaaagcttttaatcattcctcaagtctttctacacataagataattcatactggagagaagtcttacaagtgtgaagaatgtggcaaagcatttctatggtcctcaaccctaagaagacataagaggatacacactggagagaaaccctacaaatgtgaagaatgtggcaaagcttttagccattcttcagcccttgctaaacataagagaattcatactggagagaaaccctacaaatgtaaagaatgtggcaaagcttttagcaattcctcaacccttgctaatcataagataactcatactgaagagaaaccctacaaatgtaaagaatgtgacaaaacttttaagcgactctcaacccttactaaacataaaataatacatgctggagagaaactctacaaatgtgaagaatgtggcaaagcttttaatcgatcttcaaatcttactatacataagtttattcatactggagagaaaccttacaagtgtgaagaatgtggcaaagcatttaactggtcctcaagccttactaaacataaaagaattcatactagagagaaacccttcaaatgtaaagaatgtggcaaagcatttatatggtcttcaaccctaactagacataagaggatacacactggagagaagccctacaaatgtgaagaatgtggcaaagcttttagccgttcctcaacccttactaagcataagacaattcatactggagagaaaccctacaaatgtaaagaatgtggcaaagcttttaagcactcctcagcccttgctaaacataaaataatacatgctggagagaaactctacaaatgtgaggaatgtggcaaagcttttaatcaatcttcaaatcttacgacacataagataattcatactaaagagaaaccttccaagagtgaagaatgtgacaaagcatttatctggtcctcaacccttactgaacataagagaattcataccagagagaaaacctacaaatgtgaagaatgtggcaaagcatttagccagccttcacaccttactacacataagaggatgcacactggagagaaaccctacaaatgtgaagaatgtggcaaagcttttagccaatcctcaacccttactacacataagataattcatactggagagaaaccctacaaatgtgaagaatgtggcaaagcttttaggaaatcttcaactcttactgaacataagataattcatactggagagaaaccctacaaatgtgaagaatgtggcaaagcatttagccaatcctcaaccctaactagacatacgaggatgcacactggagagaaaccatacaaatgtgaagaatgtggcaaagcttttaatcgatcctcaaagcttactacacataagataattcatactggagagaaaccttacaagtgtgaagaatgtggcaaagcatttatatcatcctcaaccctaaatggacataagagaattcatactagagagaaaccctacaaatgtgaagaatgtggcaaagcatttagccaatcttcaaccctaactagacataagaggttgcacaccggagagaaaccctacaaatgtggagaatgtggcaaagcctttaaagagtcctcagctcttactaaacataagataattcacactggagagaaaccctacaaatgtgaaaaatgtggcaaagcctttaaccagtcttcaatccttactaaccataagaaaattcatactatcacacctgtaatcccactactttgggaggccgaggcgggcggatcacgaggtcaggagatggagaccatcctggctaacacagtgaaaccccttctctac

SEQ ID NO: 3976 - DNA, 3573 bp, Homo sapiens
  source 1..3573: mol_type = genomic DNA
atgccaggaacccctggaagcctagaaatgggactgttgacatttagggatgtggccatagaattctctccggaggagtggcaatgtctggacactgcacagcagaatttatataggaatgtgatgttagagaactacagaaacctggccttcctgggtattgctctctctaagccagacctgattacttatctggagcaaggaaaagagccctggaatatgaagcaacatgagatggtggatgaacccacaggtatatgtcctcattttcctcaagacttttggccagagcagagcatggaagattcttttcaaaaagtattactgagaaaatatgaaaaatgtggacatgagaatttacagttaagaaaaggttgtaaaagtgtggatgagtgtaaggtgcacaaagaaggttataataaacttaaccagtgtctcacaactgcccagagcaaagtatttcaatgtgggaaatatttgaaagtcttctataaatttttaaattcaaacagacatacgataagacatactggaaagaaatgcttcaaatgtaaaaaatgtgtcaagtcattttgcatccgtttacacaaaacccaacataaatgcgtttatattacagagaagtcctgtaaatgtaaagaatgtgaaaaaacctttcattggtcctcaacccttactaatcataaggaaattcatactgaagataaaccctacaaatgtgaagaatgtggcaaagcttttaagcagctctcaacccttactacacataaaataatctgtgctaaagagaaaatctacaagtgtgaagaatgtggcaaagcatttctatggtcctcaaccctaactagacataagaggatacacactggagagaaaccctacaaatgtgaagaatgtggcaaagcttttagccattcttcaacccttgctaaacataagagaattcatactggagagaaaccctacaaatgtgaagaatgtggcaaagcttttagccgttcttcaacccttgctaaacataagagaattcatactggagagaaaccctacaaatgtaaagaatgtggcaaagcttttagcaattcctcaacccttgctaatcataagataactcatactgaagagaaaccctacaaatgtaaagaatgtgacaaagcttttaagcgactctcaacccttactaaacataaaataatacatgctggagagaaactctacaaatgtgaagaatgtggcaaagcttttaatcgatcttcaaatcttactatacataagtttattcatactggagagaaaccttacaagtgtgaagaatgtggcaaagcatttaactggtcctcaagccttactaaacataaaagatttcatactagagagaaacccttcaaatgtaaagaatgtggcaaagcatttatatggtcttcaaccctaactagacataagaggatacacactggagagaagccctacaaatgtgaagaatgtggcaaagcttttaggcaatcctcaacccttactaaacataagataattcatactggagagaaaccctacaaatttgaagaatgtggcaaagcttttagacaatccttaacccttaataaacataagataattcatagtagagagaaaccctacaaatgtaaagaatgtggcaaagcttttaagcaattctcaacccttactacacataaaataattcatgctggaaagaaactctacaaatgtgaagaatgtggcaaagcttttaatcattcctcaagtctttctacacataagataattcatactggagagaagtcttacaagtgtgaagaatgtggcaaagcatttctatggtcctcaaccctaagaagacataagaggatacacactggagagaaaccctacaaatgtgaagaatgtggcaaagcttttagccattcttcagcccttgctaaacataagagaattcatactggagagaaaccctacaaatgtaaagaatgtggcaaagcttttagcaattcctcaacccttgctaatcataagataactcatactgaagagaaaccctacaaatgtaaagaatgtgacaaaacttttaagcgactctcaacccttactaaacataaaataatacatgctggagagaaactctacaaatgtgaagaatgtggcaaagcttttaatcgatcttcaaatcttactatacataagtttattcatactggagagaaaccttacaagtgtgaagaatgtggcaaagcatttaactggtcctcaagccttactaaacataaaagaattcatactagagagaaacccttcaaatgtaaagaatgtggcaaagcatttatatggtcttcaaccctaactagacataagaggatacacactggagagaagccctacaaatgtgaagaatgtggcaaagcttttagccgttcctcaacccttactaagcataagacaattcatactggagagaaaccctacaaatgtaaagaatgtggcaaagcttttaagcactcctcagcccttgctaaacataaaataatacatgctggagagaaactctacaaatgtgaggaatgtggcaaagcttttaatcaatcttcaaatcttacgacacataagataattcatactaaagagaaaccttccaagagtgaagaatgtgacaaagcatttatctggtcctcaacccttactgaacataagagaattcataccagagagaaaacctacaaatgtgaagaatgtggcaaagcatttagccagccttcacaccttactacacataagaggatgcacactggagagaaaccctacaaatgtgaagaatgtggcaaagcttttagccaatcctcaacccttactacacataagataattcatactggagagaaaccctacaaatgtgaagaatgtggcaaagcttttaggaaatcttcaactcttactgaacataagataattcatactggagagaaaccctacaaatgtgaagaatgtggcaaagcatttagccaatcctcaaccctaactagacatacgaggatgcacactggagagaaaccatacaaatgtgaagaatgtggcaaagcttttaatcgatcctcaaagcttactacacataagataattcatactggagagaaaccttacaagtgtgaagaatgtggcaaagcatttatatcatcctcaaccctaaatggacataagagaattcatactagagagaaaccctacaaatgtgaagaatgtggcaaagcatttagccaatcttcaaccctaactagacataagaggttgcacaccggagagaaaccctacaaatgtggagaatgtggcaaagcctttaaagagtcctcagctcttactaaacataagataattcacactggagagaaaccctacaaatgtgaaaaatgtggcaaagcctttaaccagtcttcaatccttactaaccataagaaaattcatactatcacacctgtaatcccactactttgggaggccgaggcgggcggatcacgaggtcaggagatggagaccatcctggctaacacagtgaaaccccttctctac

SEQ ID NO: 3977 - DNA, 3153 bp, Homo sapiens
  source 1..3153: mol_type = genomic DNA
atgaagagcgaagactatccccatgaaactatggcgccggatatccacgaagaacggcaatatcgctgcgaagactgtgaccagctctttgaatctaaggctgaactagcagatcaccaaaagtttccatgcagtactcctcactcagcattttcaatggttgaagaggactttcagcaaaaactcgaaagcgagaatgatctccaagagatacacacgatccaggagtgtaaggaatgtgaccaagtttttcctgatttgcaaagcctggagaaacacatgctgtcacatactgaagagagggaatacaagtgtgatcagtgtcccaaggcatttaactggaagtccaatttaattcgccaccagatgtcacatgacagtggaaagcactatgaatgtgaaaactgtgccaaggttttcacggaccctagcaaccttcagcggcacattcgctctcagcatgtcggtgcccgggcccatgcatgcccggagtgtggcaaaacgtttgccacttcgtcgggcctcaaacaacacaagcacatccacagcagtgtgaagccctttatctgtgaggtctgccataaatcctatactcagttttcaaacctttgccgtcataagcgcatgcatgctgattgcagaacccaaatcaagtgcaaagactgtggacaaatgttcagcactacgtcttccttaaataaacacaggaggttttgtgagggcaagaaccattttgcggcaggtggattttttggccaaggcatttcacttcctggaaccccagctatggataaaacgtccatggttaatatgagtcatgccaacccgggccttgctgactattttggcgccaataggcatcctgctggtcttacctttccaacagctcctggattttcttttagcttccctggtctgtttccttccggcttgtaccacaggcctcctttgatacctgctagttctcctgttaaaggactatcaagtactgaacagacaaacaaaagtcaaagtcccctcatgacacatcctcagatactgccagctacacaggatattttgaaggcactatctaaacacccatctgtaggggacaataagccagtggagctccagcccgagaggtcctctgaagagaggccctttgagaaaatcagtgaccagtcagagagtagtgaccttgatgatgtcagtacaccaagtggcagtgacctggaaacaacctcgggctctgatctggaaagtgacattgaaagtgataaagagaaatttaaagaaaatggtaaaatgttcaaagacaaagtaagccctcttcagaatctggcttcaataaataataagaaagaatacagcaatcattccattttctcaccatctttagaggagcagactgcggtgtcaggagctgtgaatgattctataaaggctattgcttctattgctgaaaaatactttggttcaacaggactggtggggctgcaagacaaaaaagttggagctttaccttacccttccatgtttcccctcccattttttccagcattctctcaatcaatgtacccatttcctgatagagacttgagatcgttacctttgaaaatggaaccccaatcaccaggtgaagtaaagaaactgcagaagggcagctctgagtccccctttgatctcaccactaagcgaaaggatgagaagcccttgactccagtcccctccaagcctccagtgacacctgccacaagccaagaccagcccctggatctaagtatgggcagtaggagtagagccagtgggacaaagctgactgagcctcgaaaaaaccacgtgtttgggggaaaaaaaggaagcaacgtcgaatcaagacctgcttcagatggttccttgcagcatgcaagacccactcctttctttatggaccctatttacagagtagagaaaagaaaactaactgacccacttgaagctttaaaagagaaatacttgaggccttctccaggattcttgtttcacccacaattccaactgcctgatcagagaacttggatgtcagctattgaaaacatggcagaaaagctagagagcttcagtgccctgaaacctgaggccagtgagctcttacagtcagtgccctctatgttcaacttcagggcgcctcccaatgccctgccagagaaccttctgcggaagggaaaggagcgctatacctgcagatactgtggcaagatttttccaaggtctgcaaacctaacacggcacttgagaacccacacaggagagcagccttacagatgcaaatactgtgacagatcatttagcatatcttctaacttgcaaaggcatgttcgcaacatccacaataaagagaagccatttaagtgtcacttatgtgataggtgttttggtcaacaaaccaatttagacagacacctaaagaaacatgagaatgggaacatgtccggtacagcaacatcgtcgcctcattctgaactggaaagtacaggtgcgattctggatgacaaagaagatgcttacttcacagaaattcgaaatttcattgggaacagcaaccatggcagccaatctcccaggaatgtggaggagagaatgaatggcagtcattttaaagatgaaaaggctttggtgaccagtcaaaattcagacttgctggatgatgaagaagttgaagatgaggtgttgttagatgaggaggatgaagacaatgatattactggaaaaacaggaaaggaaccagtgacaagtaatttacatgaaggaaaccctgaggatgactatgaagaaaccagtgccctggagatgagttgcaagacatccccagtgaggtataaagaggaagaatataaaagtggactttctgctctagatcatataaggcacttcacagatagcctcaaaatgaggaaaatggaagataatcaatattctgaagctgagctgtcttcttttagtacttcccatgtgccagaggaacttaagcagccgttacacagaaagtccaaatcgcaggcatatgctatgatgctgtcactgtctgacaaggagtccctccattctacatcccacagttcttccaacgtgtggcacagtatggccagggctgcggcggaatccagtgctatccagtccataagccacgta

SEQ ID NO: 3978 - DNA, 3348 bp, Homo sapiens
  source 1..3348: mol_type = genomic DNA
atgatcttagacgaattttacaatgtgaagttctgcatagatgccagtcaaccagatgttggaagctggctcaagtacattagattcgctggctgttatgatcagcacaaccttgttgcatgccagataaatgatcagatattctatagagtagttgcagacattgcgccgggagaggagcttctgctgttcatgaagagcgaagactatccccatgaaactatggcgccggatatccacgaagaacggcaatatcgctgcgaagactgtgaccagctctttgaatctaaggctgaactagcagatcaccaaaagtttccatgcagtactcctcactcagcattttcaatggttgaagaggactttcagcaaaaactcgaaagcgagaatgatctccaagagatacacacgatccaggagtgtaaggaatgtgaccaagtttttcctgatttgcaaagcctggagaaacacatgctgtcacatactgaagagagggaatacaagtgtgatcagtgtcccaaggcatttaactggaagtccaatttaattcgccaccagatgtcacatgacagtggaaagcactatgaatgtgaaaactgtgccaagcaggttttcacggaccctagcaaccttcagcggcacattcgctctcagcatgtcggtgcccgggcccatgcatgcccggagtgtggcaaaacgtttgccacttcgtcgggcctcaaacaacacaagcacatccacagcagtgtgaagccctttatctgtgaggtctgccataaatcctatactcagttttcaaacctttgccgtcataagcgcatgcatgctgattgcagaacccaaatcaagtgcaaagactgtggacaaatgttcagcactacgtcttccttaaataaacacaggaggttttgtgagggcaagaaccattttgcggcaggtggattttttggccaaggcatttcacttcctggaaccccagctatggataaaacgtccatggttaatatgagtcatgccaacccgggccttgctgactattttggcgccaataggcatcctgctggtcttacctttccaacagctcctggattttcttttagcttccctggtctgtttccttccggcttgtaccacaggcctcctttgatacctgctagttctcctgttaaaggactatcaagtactgaacagacaaacaaaagtcaaagtcccctcatgacacatcctcagatactgccagctacacaggatattttgaaggcactatctaaacacccatctgtaggggacaataagccagtggagctccagcccgagaggtcctctgaagagaggccctttgagaaaatcagtgaccagtcagagagtagtgaccttgatgatgtcagtacaccaagtggcagtgacctggaaacaacctcgggctctgatctggaaagtgacattgaaagtgataaagagaaatttaaagaaaatggtaaaatgttcaaagacaaagtaagccctcttcagaatctggcttcaataaataataagaaagaatacagcaatcattccattttctcaccatctttagaggagcagactgcggtgtcaggagctgtgaatgattctataaaggctattgcttctattgctgaaaaatactttggttcaacaggactggtggggctgcaagacaaaaaagttggagctttaccttacccttccatgtttcccctcccattttttccagcattctctcaatcaatgtacccatttcctgatagagacttgagatcgttacctttgaaaatggaaccccaatcaccaggtgaagtaaagaaactgcagaagggcagctctgagtccccctttgatctcaccactaagcgaaaggatgagaagcccttgactccagtcccctccaagcctccagtgacacctgccacaagccaagaccagcccctggatctaagtatgggcagtaggagtagagccagtgggacaaagctgactgagcctcgaaaaaaccacgtgtttgggggaaaaaaaggaagcaacgtcgaatcaagacctgcttcagatggttccttgcagcatgcaagacccactcctttctttatggaccctatttacagagtagagaaaagaaaactaactgacccacttgaagctttaaaagagaaatacttgaggccttctccaggattcttgtttcacccacaattccaactgcctgatcagagaacttggatgtcagctattgaaaacatggcagaaaagctagagagcttcagtgccctgaaacctgaggccagtgagctcttacagtcagtgccctctatgttcaacttcagggcgcctcccaatgccctgccagagaaccttctgcggaagggaaaggagcgctatacctgcagatactgtggcaagatttttccaaggtctgcaaacctaacacggcacttgagaacccacacaggagagcagccttacagatgcaaatactgtgacagatcatttagcatatcttctaacttgcaaaggcatgttcgcaacatccacaataaagagaagccatttaagtgtcacttatgtgataggtgttttggtcaacaaaccaatttagacagacacctaaagaaacatgagaatgggaacatgtccggtacagcaacatcgtcgcctcattctgaactggaaagtacaggtgcgattctggatgacaaagaagatgcttacttcacagaaattcgaaatttcattgggaacagcaaccatggcagccaatctcccaggaatgtggaggagagaatgaatggcagtcattttaaagatgaaaaggctttggtgaccagtcaaaattcagacttgctggatgatgaagaagttgaagatgaggtgttgttagatgaggaggatgaagacaatgatattactggaaaaacaggaaaggaaccagtgacaagtaatttacatgaaggaaaccctgaggatgactatgaagaaaccagtgccctggagatgagttgcaagacatccccagtgaggtataaagaggaagaatataaaagtggactttctgctctagatcatataaggcacttcacagatagcctcaaaatgaggaaaatggaagataatcaatattctgaagctgagctgtcttcttttagtacttcccatgtgccagaggaacttaagcagccgttacacagaaagtccaaatcgcaggcatatgctatgatgctgtcactgtctgacaaggagtccctccattctacatcccacagttcttccaacgtgtggcacagtatggccagggctgcggcggaatccagtgctatccagtccataagccacgta

SEQ ID NO: 3979 - DNA, 3126 bp, Homo sapiens
  source 1..3126: mol_type = genomic DNA
atgaagagcgaagactatccccatgaaactatggcgccggatatccacgaagaacggcaatatcgctgcgaagactgtgaccagctctttgaatctaaggctgaactagcagatcaccaaaagtttccatgcagtactcctcactcagcattttcaatggttgaagaggactttcagcaaaaactcgaaagcgagaatgatctccaagagatacacacgatccaggagtgtaaggaatgtgaccaagtttttcctgatttgcaaagcctggagaaacacatgctgtcacatactgaagagagggaatacaagtgtgatcagtgtcccaaggcatttaactggaagtccaatttaattcgccaccagatgtcacatgacagtggaaagcactatgaatgtgaaaactgtgccaaggttttcacggaccctagcaaccttcagcggcacattcgctctcagcatgtcggtgcccgggcccatgcatgcccggagtgtggcaaaacgtttgccacttcgtcgggcctcaaacaacacaagcacatccacagcagtgtgaagccctttatctgtgaggtctgccataaatcctatactcagttttcaaacctttgccgtcataagcgcatgcatgctgattgcagaacccaaatcaagtgcaaagactgtggacaaatgttcagcactacgtcttccttaaataaacacaggaggttttgtgagggcaagaaccattttgcggcaggtggattttttggccaaggcatttcacttcctggaaccccagctatggataaaacgtccatggttaatatgagtcatgccaacccgggccttgctgactattttggcgccaataggcatcctgctggtcttacctttccaacagctcctggattttcttttagcttccctggtctgtttccttccggcttgtaccacaggcctcctttgatacctgctagttctcctgttaaaggactatcaagtactgaacagacaaacaaaagtcaaagtcccctcatgacacatcctcagatactgccagctacacaggatattttgaaggcactatctaaacacccatctgtaggggacaataagccagtggagctccagcccgagaggtcctctgaagagaggccctttgagaaaatcagtgaccagtcagagagtagtgaccttgatgatgtcagtacaccaagtggcagtgacctggaaacaacctcgggctctgatctggaaagtgacattgaaagtgataaagagaaatttaaagaaaatggtaaaatgttcaaagacaaagtaagccctcttcagaatctggcttcaataaataataagaaagaatacagcaatcattccattttctcaccatctttagaggagcagactgcggtgtcaggagctgtgaatgattctataaaggctattgcttctattgctgaaaaatactttggttcaacaggactggtggggctgcaagacaaaaaagttggagctttaccttacccttccatgtttcccctcccattttttccagcattctctcaatcaatgtacccatttcctgatagagacttgagatcgttacctttgaaaatggaaccccaatcaccaggtgaagtaaagaaactgcagaagggcagctctgagtccccctttgatctcaccactaagcgaaaggatgagaagcccttgactccagtcccctccaagcctccagtgacacctgccacaagccaagaccagcccctggatctaagtatgggcagtaggagtagagccagtgggacaaagctgactgagcctcgaaaaaaccacgtgtttgggggaaaaaaaggaagcaacgtcgaatcaagacctgcttcagatggttccttgcagcatgcaagacccactcctttctttatggaccctatttacagagtagagaaaagaaaactaactgacccacttgaagctttaaaagagaaatacttgaggccttctccaggattcttgtttcacccacaaatgtcagctattgaaaacatggcagaaaagctagagagcttcagtgccctgaaacctgaggccagtgagctcttacagtcagtgccctctatgttcaacttcagggcgcctcccaatgccctgccagagaaccttctgcggaagggaaaggagcgctatacctgcagatactgtggcaagatttttccaaggtctgcaaacctaacacggcacttgagaacccacacaggagagcagccttacagatgcaaatactgtgacagatcatttagcatatcttctaacttgcaaaggcatgttcgcaacatccacaataaagagaagccatttaagtgtcacttatgtgataggtgttttggtcaacaaaccaatttagacagacacctaaagaaacatgagaatgggaacatgtccggtacagcaacatcgtcgcctcattctgaactggaaagtacaggtgcgattctggatgacaaagaagatgcttacttcacagaaattcgaaatttcattgggaacagcaaccatggcagccaatctcccaggaatgtggaggagagaatgaatggcagtcattttaaagatgaaaaggctttggtgaccagtcaaaattcagacttgctggatgatgaagaagttgaagatgaggtgttgttagatgaggaggatgaagacaatgatattactggaaaaacaggaaaggaaccagtgacaagtaatttacatgaaggaaaccctgaggatgactatgaagaaaccagtgccctggagatgagttgcaagacatccccagtgaggtataaagaggaagaatataaaagtggactttctgctctagatcatataaggcacttcacagatagcctcaaaatgaggaaaatggaagataatcaatattctgaagctgagctgtcttcttttagtacttcccatgtgccagaggaacttaagcagccgttacacagaaagtccaaatcgcaggcatatgctatgatgctgtcactgtctgacaaggagtccctccattctacatcccacagttcttccaacgtgtggcacagtatggccagggctgcggcggaatccagtgctatccagtccataagccacgta

SEQ ID NO: 3980 - DNA, 3156 bp, Homo sapiens
  source 1..3156: mol_type = genomic DNA
atgaagagcgaagactatccccatgaaactatggcgccggatatccacgaagaacggcaatatcgctgcgaagactgtgaccagctctttgaatctaaggctgaactagcagatcaccaaaagtttccatgcagtactcctcactcagcattttcaatggttgaagaggactttcagcaaaaactcgaaagcgagaatgatctccaagagatacacacgatccaggagtgtaaggaatgtgaccaagtttttcctgatttgcaaagcctggagaaacacatgctgtcacatactgaagagagggaatacaagtgtgatcagtgtcccaaggcatttaactggaagtccaatttaattcgccaccagatgtcacatgacagtggaaagcactatgaatgtgaaaactgtgccaagcaggttttcacggaccctagcaaccttcagcggcacattcgctctcagcatgtcggtgcccgggcccatgcatgcccggagtgtggcaaaacgtttgccacttcgtcgggcctcaaacaacacaagcacatccacagcagtgtgaagccctttatctgtgaggtctgccataaatcctatactcagttttcaaacctttgccgtcataagcgcatgcatgctgattgcagaacccaaatcaagtgcaaagactgtggacaaatgttcagcactacgtcttccttaaataaacacaggaggttttgtgagggcaagaaccattttgcggcaggtggattttttggccaaggcatttcacttcctggaaccccagctatggataaaacgtccatggttaatatgagtcatgccaacccgggccttgctgactattttggcgccaataggcatcctgctggtcttacctttccaacagctcctggattttcttttagcttccctggtctgtttccttccggcttgtaccacaggcctcctttgatacctgctagttctcctgttaaaggactatcaagtactgaacagacaaacaaaagtcaaagtcccctcatgacacatcctcagatactgccagctacacaggatattttgaaggcactatctaaacacccatctgtaggggacaataagccagtggagctccagcccgagaggtcctctgaagagaggccctttgagaaaatcagtgaccagtcagagagtagtgaccttgatgatgtcagtacaccaagtggcagtgacctggaaacaacctcgggctctgatctggaaagtgacattgaaagtgataaagagaaatttaaagaaaatggtaaaatgttcaaagacaaagtaagccctcttcagaatctggcttcaataaataataagaaagaatacagcaatcattccattttctcaccatctttagaggagcagactgcggtgtcaggagctgtgaatgattctataaaggctattgcttctattgctgaaaaatactttggttcaacaggactggtggggctgcaagacaaaaaagttggagctttaccttacccttccatgtttcccctcccattttttccagcattctctcaatcaatgtacccatttcctgatagagacttgagatcgttacctttgaaaatggaaccccaatcaccaggtgaagtaaagaaactgcagaagggcagctctgagtccccctttgatctcaccactaagcgaaaggatgagaagcccttgactccagtcccctccaagcctccagtgacacctgccacaagccaagaccagcccctggatctaagtatgggcagtaggagtagagccagtgggacaaagctgactgagcctcgaaaaaaccacgtgtttgggggaaaaaaaggaagcaacgtcgaatcaagacctgcttcagatggttccttgcagcatgcaagacccactcctttctttatggaccctatttacagagtagagaaaagaaaactaactgacccacttgaagctttaaaagagaaatacttgaggccttctccaggattcttgtttcacccacaattccaactgcctgatcagagaacttggatgtcagctattgaaaacatggcagaaaagctagagagcttcagtgccctgaaacctgaggccagtgagctcttacagtcagtgccctctatgttcaacttcagggcgcctcccaatgccctgccagagaaccttctgcggaagggaaaggagcgctatacctgcagatactgtggcaagatttttccaaggtctgcaaacctaacacggcacttgagaacccacacaggagagcagccttacagatgcaaatactgtgacagatcatttagcatatcttctaacttgcaaaggcatgttcgcaacatccacaataaagagaagccatttaagtgtcacttatgtgataggtgttttggtcaacaaaccaatttagacagacacctaaagaaacatgagaatgggaacatgtccggtacagcaacatcgtcgcctcattctgaactggaaagtacaggtgcgattctggatgacaaagaagatgcttacttcacagaaattcgaaatttcattgggaacagcaaccatggcagccaatctcccaggaatgtggaggagagaatgaatggcagtcattttaaagatgaaaaggctttggtgaccagtcaaaattcagacttgctggatgatgaagaagttgaagatgaggtgttgttagatgaggaggatgaagacaatgatattactggaaaaacaggaaaggaaccagtgacaagtaatttacatgaaggaaaccctgaggatgactatgaagaaaccagtgccctggagatgagttgcaagacatccccagtgaggtataaagaggaagaatataaaagtggactttctgctctagatcatataaggcacttcacagatagcctcaaaatgaggaaaatggaagataatcaatattctgaagctgagctgtcttcttttagtacttcccatgtgccagaggaacttaagcagccgttacacagaaagtccaaatcgcaggcatatgctatgatgctgtcactgtctgacaaggagtccctccattctacatcccacagttcttccaacgtgtggcacagtatggccagggctgcggcggaatccagtgctatccagtccataagccacgta

SEQ ID NO: 3981 - DNA, 3690 bp, Homo sapiens
  source 1..3690: mol_type = genomic DNA
atgagatccaaaggcagggcaaggaaactggccacaaataatgagtgtgtatatggcaactaccctgaaatacctttggaagaaatgccagatgcagatggagtagccagcactccctccctcaatattcaagagccatgctctcctgccacatccagtgaagcattcactccaaaggagggttctccttacaaagcccccatctacatccctgatgatatccccattcctgctgagtttgaacttcgagagtcaaatatgcctggggcaggactaggaatatggaccaaaaggaagatcgaagtaggtgaaaagtttgggccttatgtgggagagcagaggtcaaacctgaaagaccccagttatggatgggagatcttagacgaattttacaatgtgaagttctgcatagatgccagtcaaccagatgttggaagctggctcaagtacattagattcgctggctgttatgatcagcacaaccttgttgcatgccagataaatgatcagatattctatagagtagttgcagacattgcgccgggagaggagcttctgctgttcatgaagagcgaagactatccccatgaaactatggcgccggatatccacgaagaacggcaatatcgctgcgaagactgtgaccagctctttgaatctaaggctgaactagcagatcaccaaaagtttccatgcagtactcctcactcagcattttcaatggttgaagaggactttcagcaaaaactcgaaagcgagaatgatctccaagagatacacacgatccaggagtgtaaggaatgtgaccaagtttttcctgatttgcaaagcctggagaaacacatgctgtcacatactgaagagagggaatacaagtgtgatcagtgtcccaaggcatttaactggaagtccaatttaattcgccaccagatgtcacatgacagtggaaagcactatgaatgtgaaaactgtgccaaggttttcacggaccctagcaaccttcagcggcacattcgctctcagcatgtcggtgcccgggcccatgcatgcccggagtgtggcaaaacgtttgccacttcgtcgggcctcaaacaacacaagcacatccacagcagtgtgaagccctttatctgtgaggtctgccataaatcctatactcagttttcaaacctttgccgtcataagcgcatgcatgctgattgcagaacccaaatcaagtgcaaagactgtggacaaatgttcagcactacgtcttccttaaataaacacaggaggttttgtgagggcaagaaccattttgcggcaggtggattttttggccaaggcatttcacttcctggaaccccagctatggataaaacgtccatggttaatatgagtcatgccaacccgggccttgctgactattttggcgccaataggcatcctgctggtcttacctttccaacagctcctggattttcttttagcttccctggtctgtttccttccggcttgtaccacaggcctcctttgatacctgctagttctcctgttaaaggactatcaagtactgaacagacaaacaaaagtcaaagtcccctcatgacacatcctcagatactgccagctacacaggatattttgaaggcactatctaaacacccatctgtaggggacaataagccagtggagctccagcccgagaggtcctctgaagagaggccctttgagaaaatcagtgaccagtcagagagtagtgaccttgatgatgtcagtacaccaagtggcagtgacctggaaacaacctcgggctctgatctggaaagtgacattgaaagtgataaagagaaatttaaagaaaatggtaaaatgttcaaagacaaagtaagccctcttcagaatctggcttcaataaataataagaaagaatacagcaatcattccattttctcaccatctttagaggagcagactgcggtgtcaggagctgtgaatgattctataaaggctattgcttctattgctgaaaaatactttggttcaacaggactggtggggctgcaagacaaaaaagttggagctttaccttacccttccatgtttcccctcccattttttccagcattctctcaatcaatgtacccatttcctgatagagacttgagatcgttacctttgaaaatggaaccccaatcaccaggtgaagtaaagaaactgcagaagggcagctctgagtccccctttgatctcaccactaagcgaaaggatgagaagcccttgactccagtcccctccaagcctccagtgacacctgccacaagccaagaccagcccctggatctaagtatgggcagtaggagtagagccagtgggacaaagctgactgagcctcgaaaaaaccacgtgtttgggggaaaaaaaggaagcaacgtcgaatcaagacctgcttcagatggttccttgcagcatgcaagacccactcctttctttatggaccctatttacagagtagagaaaagaaaactaactgacccacttgaagctttaaaagagaaatacttgaggccttctccaggattcttgtttcacccacaaatgtcagctattgaaaacatggcagaaaagctagagagcttcagtgccctgaaacctgaggccagtgagctcttacagtcagtgccctctatgttcaacttcagggcgcctcccaatgccctgccagagaaccttctgcggaagggaaaggagcgctatacctgcagatactgtggcaagatttttccaaggtctgcaaacctaacacggcacttgagaacccacacaggagagcagccttacagatgcaaatactgtgacagatcatttagcatatcttctaacttgcaaaggcatgttcgcaacatccacaataaagagaagccatttaagtgtcacttatgtgataggtgttttggtcaacaaaccaatttagacagacacctaaagaaacatgagaatgggaacatgtccggtacagcaacatcgtcgcctcattctgaactggaaagtacaggtgcgattctggatgacaaagaagatgcttacttcacagaaattcgaaatttcattgggaacagcaaccatggcagccaatctcccaggaatgtggaggagagaatgaatggcagtcattttaaagatgaaaaggctttggtgaccagtcaaaattcagacttgctggatgatgaagaagttgaagatgaggtgttgttagatgaggaggatgaagacaatgatattactggaaaaacaggaaaggaaccagtgacaagtaatttacatgaaggaaaccctgaggatgactatgaagaaaccagtgccctggagatgagttgcaagacatccccagtgaggtataaagaggaagaatataaaagtggactttctgctctagatcatataaggcacttcacagatagcctcaaaatgaggaaaatggaagataatcaatattctgaagctgagctgtcttcttttagtacttcccatgtgccagaggaacttaagcagccgttacacagaaagtccaaatcgcaggcatatgctatgatgctgtcactgtctgacaaggagtccctccattctacatcccacagttcttccaacgtgtggcacagtatggccagggctgcggcggaatccagtgctatccagtccataagccacgta

SEQ ID NO: 3982 - DNA, 1212 bp, Homo sapiens
  source 1..1212: mol_type = genomic DNA
atgatatcattgatcattcctcccaaagaccagatttcacgagtggcaaaaatgttagcggatgagtttggaactgcatctaacattaagtcacgagtaaaccgcctttcagtcctgggagccattacatctgtacaacaaagactcaaactttataacaaagtacctccaaatggtctggttgtatactgtggaacaattgtaacagaagaaggaaaggaaaagaaagtcaacattgactttgaacctttcaaaccaattaatacgtcattgtatttgtgtgacaacaaattccatacagaggctcttacagcactactttcagatgatagcaagtttggattcattgtaatagatggtagtggtgcactttttggcacactccaaggaaacacaagagaagtcctgcacaaattcactgtggatctcccaaagaaacacggtagaggaggtcagtcagccttgcgttttgcccgtttaagaatggaaaagcgacataactatgttcggaaagtagcagagactgctgtgcagctgtttatttctggggacaaagtgaatgtggctggtctagttttagctggatccgctgactttaaaactgaactaagtcaatctgatatgtttgatcagaggttacaatcaaaagttttaaaattagttgatatatcctatggtggtgaaaatggattcaaccaagctattgagttatctactgaagtcctctccaacgtgaaattcattcaagagaagaaattaataggacgatactttgatgaaatcagccaggacacgggcaagtactgttttggcgttgaagatacactaaaggctttggaaatgggagctgtagaaattctaatagtctatgaaaatctggatataatgagatatgttcttcattgccaaggcacagaagaggagaaaattctctatctaactccagagcaagaaaaggataaatctcatttcacagacaaagagaccggacaggaacatgagcttatcgagagcatgcccctgttggaatggtttgctaacaactataaaaaatttggagctacgttggaaattgtcacagataaatcacaagaagggtctcagtttgtgaaaggatttggtggaattggaggtatcttgcggtaccgagtagatttccagggaatggaataccaaggaggagacgatgaattttttgaccttgatgactac

SEQ ID NO: 3983 - DNA, 1311 bp, Homo sapiens
  source 1..1311: mol_type = genomic DNA
atggcggacgaccccagtgctgccgacaggaacgtggagatctggaagatcaagaagctcattaagagcttggaggcggcccgcggcaatggcaccagcatgatatcattgatcattcctcccaaagaccagatttcacgagtggcaaaaatgttagcggatgagtttggaactgcatctaacattaagtcacgagtaaaccgcctttcagtcctgggagccattacatctgtacaacaaagactcaaactttataacaaagtacctccaaatggtctggttgtatactgtggaacaattgtaacagaagaaggaaaggaaaagaaagtcaacattgactttgaacctttcaaaccaattaatacgtcattgtatttgtgtgacaacaaattccatacagaggctcttacagcactactttcagatgatagcaagtttggattcattgtaatagatggtagtggtgcactttttggcacactccaaggaaacacaagagaagtcctgcacaaattcactgtggatctcccaaagaaacacggtagaggaggtcagtcagccttgcgttttgcccgtttaagaatggaaaagcgacataactatgttcggaaagtagcagagactgctgtgcagctgtttatttctggggacaaagtgaatgtggctggtctagttttagctggatccgctgactttaaaactgaactaagtcaatctgatatgtttgatcagaggttacaatcaaaagttttaaaattagttgatatatcctatggtggtgaaaatggattcaaccaagctattgagttatctactgaagtcctctccaacgtgaaattcattcaagagaagaaattaataggacgatactttgatgaaatcagccaggacacgggcaagtactgttttggcgttgaagatacactaaaggctttggaaatgggagctgtagaaattctaatagtctatgaaaatctggatataatgagatatgttcttcattgccaaggcacagaagaggagaaaattctctatctaactccagagcaagaaaaggataaatctcatttcacagacaaagagaccggacaggaacatgagcttatcgagagcatgcccctgttggaatggtttgctaacaactataaaaaatttggagctacgttggaaattgtcacagataaatcacaagaagggtctcagtttgtgaaaggatttggtggaattggaggtatcttgcggtaccgagtagatttccagggaatggaataccaaggaggagacgatgaattttttgaccttgatgactac

SEQ ID NO: 3984 - DNA, 1269 bp, Homo sapiens
  source 1..1269: mol_type = genomic DNA
atgaaacaggatgtgcttaattgtactgaaggcccaattcacagcaatggcaccagcatgatatcattgatcattcctcccaaagaccagatttcacgagtggcaaaaatgttagcggatgagtttggaactgcatctaacattaagtcacgagtaaaccgcctttcagtcctgggagccattacatctgtacaacaaagactcaaactttataacaaagtacctccaaatggtctggttgtatactgtggaacaattgtaacagaagaaggaaaggaaaagaaagtcaacattgactttgaacctttcaaaccaattaatacgtcattgtatttgtgtgacaacaaattccatacagaggctcttacagcactactttcagatgatagcaagtttggattcattgtaatagatggtagtggtgcactttttggcacactccaaggaaacacaagagaagtcctgcacaaattcactgtggatctcccaaagaaacacggtagaggaggtcagtcagccttgcgttttgcccgtttaagaatggaaaagcgacataactatgttcggaaagtagcagagactgctgtgcagctgtttatttctggggacaaagtgaatgtggctggtctagttttagctggatccgctgactttaaaactgaactaagtcaatctgatatgtttgatcagaggttacaatcaaaagttttaaaattagttgatatatcctatggtggtgaaaatggattcaaccaagctattgagttatctactgaagtcctctccaacgtgaaattcattcaagagaagaaattaataggacgatactttgatgaaatcagccaggacacgggcaagtactgttttggcgttgaagatacactaaaggctttggaaatgggagctgtagaaattctaatagtctatgaaaatctggatataatgagatatgttcttcattgccaaggcacagaagaggagaaaattctctatctaactccagagcaagaaaaggataaatctcatttcacagacaaagagaccggacaggaacatgagcttatcgagagcatgcccctgttggaatggtttgctaacaactataaaaaatttggagctacgttggaaattgtcacagataaatcacaagaagggtctcagtttgtgaaaggatttggtggaattggaggtatcttgcggtaccgagtagatttccagggaatggaataccaaggaggagacgatgaattttttgaccttgatgactac

SEQ ID NO: 3985 - DNA, 3552 bp, Homo sapiens
  source 1..3552: mol_type = genomic DNA
atggaggtggacaccgaggagaagcggcatcgcacgcggtccaaaggggttcgagttcccgtggaaccagccatacaagagctgttcagctgtcccacccctggctgtgacggcagtggtcatgtcagtggcaaatatgcaagacacagaagtgtatatggttgtcccttggcgaaaaaaagaaaaacacaagataaacagccccaggaacctgctcctaaacgaaagccatttgccgtgaaagcagacagctcctcagtggatgagtgtgacgacagtgatgggactgaggacatggatgagaaggaggaggatgagggggaggagtactccgaggacaatgatgagccaggggatgaggacgaggaggacgaggagggggaccgggaggaggaggaggagatcgaggaggaggatgaggacgatgacgaggatggagaagatgtggaggatgaagaagaggaagaggaggaggaggaggaggaggaagaggaagaagaaaacgaagaccatcaaatgaattgtcacaatactcgaataatgcaagacacagaaaaggatgataacaataatgacgaatatgacaattacgatgaactggtggccaagtcattgttaaacctcggcaaaatcgctgaggatgcagcctaccgggccaggactgagtcagaaatgaacagcaatacctccaatagtctggaagacgatagtgacaaaaacgaaaacctgggtcggaaaagtgagttgagtttagacttagacagtgatgttgttagagaaacagtggactcccttaaactattagcccaaggacacggtgttgtgctctcagaaaacatgaatgacagaaattatgcagacagcatgtcgcagcaagacagtagaaatatgaattacgtcatgttggggaagcccatgaacaacggactcatggaaaagatggtggaggagagcgatgaggaggtgtgtctgagcagtctggagtgtttgaggaatcagtgcttcgacctggccaggaagctcagtgagaccaacccgcaggagaggaatccgcagcagaacatgaacatccgtcagcatgtccggccagaagaggacttccccggaaggacgccggacagaaactactcggacatgctgaacctcatgcggctggaggagcagttgagcccccggtcgagagtgtttgccagctgtgcgaaggaggatgggtgtcatgagcgggacgacgataccacctctgtgaactcggacaggtctgaagaggtgttcgacatgaccaaggggaacctgaccctgctggagaaagccatcgctttggaaacggaaagagcaaaggccatgagggagaagatggccatggaagctgggaggagggacaatatgaggtcatatgaggaccagtctccgagacaacttcccggggaggacagaaagcctaaatccagtgacagccatgtcaaaaagccatactatgatccctcaagaacagaaaagaaagagagcaagtgtccaacccccgggtgtgatggaaccggccacgtaactgggctgtacccacatcaccgcagcctgtccggatgcccgcacaaagatagggtccctccagaaatccttgccatgcatgaaagtgtcctcaagtgccccactccgggctgcacggggcgcgggcatgtcaacagcaacaggaactcccaccgaagcctctccggatgcccgatcgctgcagcagagaaactggccaaggcacaggaaaagcaccagagctgcgacgtgtccaagtccagccaggcctcggaccgcgtgctcaggccaatgtgctttgtgaagcagctggagattcctcagtatggctacagaaacaatgtccccacaactacgccgcgttccaacctggccaaggagctcgagaaatattccaagacctcgtttgaatacaacagttacgacaaccatacttatggcaagcgagccatagctcccaaggtgcaaaccagggatatatcccccaaaggatatgatgatgcgaagcggtactgcaaggaccccagccccagcagcagcagcaccagcagctacgcgcccagcagcagcagcaacctgagctgcggcgggggcagcagcgccagcagcacgtgcagcaagagcagcttcgactacacgcacgacatggaggcggcccacatggcggccaccgccatcctcaacctgtccacgcgctgccgcgagatgccgcagaacctgagcaccaagccgcaggacctgtgcgccacgcggaaccctgacatggaggtggatgagaacgggaccctggacctcagcatgaacaagcagaggccgcgggacagctgctgccccatcctgacccctctggagcccatgtccccccagcagcaggcagtgatgaacaaccggtgtttccagctgggcgagggcgactgctgggacttgcccgtagactacaccaaaatgaaaccccggaggatagacgaggacgagtccaaagacattactccagaagacttggacccattccaggaggctctagaagaaagacggtatcccggggaggtgaccatcccaagtcccaaacccaagtaccctcagtgcaaggagagcaaaaaggacttaataactctgtctggctgccccctggcggacaaaagcattcgaagtatgctggccaccagctcccaagaactcaagtgccccacgcctggctgtgatggttctggacatatcaccggcaattatgcttctcatcggagcctttcaggttgcccaagagcaaagaaaagtggtatcaggatagcacagagcaaagaagataaagaagatcaagaacccatcaggtgtccggtccccgggtgcgacggccagggccacatcactgggaagtacgcgtcccatcgcagcgcctccgggtgccccttggcggccaagaggcagaaagacgggtacctgaatggctcccagttctcctggaagtcggtcaagacggaaggcatgtcctgccccacgccaggatgcgacggctcaggccacgtcagcggcagcttcctcacacaccgcagcttgtcaggatgcccgagagccacgtcagcgatgaagaaggcaaagctttctggagagcagatgctgaccatcaaacagcgggccagcaacggtatagaaaatgatgaagaaatcaaacagttagatgaagaaatcaaggagctaaatgaatccaattcccagatggaagccgatatgattaaactcagaactcagattaccacgatggagagcaacctgaagaccatcgaagaggagaacaaagtgattgagcagcagaacgagtctctcctccacgagctggcgaacctgagccagtctctgatccacagcctggctaacatccagctgccgcacatggatccaatcaatgaacaaaattttgatgcttacgtgactactttgacggaaatgtatacaaatcaagatcgttatcagagtccagaaaataaagccctactggaaaatataaagcaggctgtgagaggaattcaggtc

SEQ ID NO: 3986 - DNA, 3558 bp, Homo sapiens
  source 1..3558: mol_type = genomic DNA
atggaggtggacaccgaggagaagcggcatcgcacgcggtccaaaggggttcgagttcccgtggaaccagccatacaagagctgttcagctgtcccacccctggctgtgacggcagtggtcatgtcagtggcaaatatgcaagacacagaagtgtatatggttgtcccttggcgaaaaaaagaaaaacacaagataaacagccccaggaacctgctcctaaacgaaagccatttgccgtgaaagcagacagctcctcagtggatgagtgtgacgacagtgatgggactgaggacatggatgagaaggaggaggatgagggggaggagtactccgaggacaatgatgagccaggggatgaggacgaggaggacgaggagggggaccgggaggaggaggaggagatcgaggaggaggatgaggacgatgacgaggatggagaagatgtggaggatgaagaagaggaagaggaggaggaggaggaggaggaagaggaagaagaaaacgaagaccatcaaatgaattgtcacaatactcgaataatgcaagacacagaaaaggatgataacaataatgacgaatatgacaattacgatgaactggtggccaagtcattgttaaacctcggcaaaatcgctgaggatgcagcctaccgggccaggactgagtcagaaatgaacagcaatacctccaatagtctggaagacgatagtgacaaaaacgaaaacctgggtcggaaaagtgagttgagtttagacttagacagtgatgttgttagagaaacagtggactcccttaaactattagcccaaggacacggtgttgtgctctcagaaaacatgaatgacagaaattatgcagacagcatgtcgcagcaagacagtagaaatatgaattacgtcatgttggggaagcccatgaacaacggactcatggaaaagatggtggaggagagcgatgaggaggtgtgtctgagcagtctggagtgtttgaggaatcagtgcttcgacctggccaggaagctcagtgagaccaacccgcaggagaggaatccgcagcagaacatgaacatccgtcagcatgtccggccagaagaggacttccccggaaggacgccggacagaaactactcggacatgctgaacctcatgcggctggaggagcagttgagcccccggtcgagagtgtttgccagctgtgcgaaggaggatgggtgtcatgagcgggacgacgataccacctctgtgaactcggacaggtctgaagaggtgttcgacatgaccaaggggaacctgaccctgctggagaaagccatcgctttggaaacggaaagagcaaaggccatgagggagaagatggccatggaagctgggaggagggacaatatgaggtcatatgaggaccagtctccgagacaacttcccggggaggacagaaagcctaaatccagtgacagccatgtcaaaaagccatactatggtaaagatccctcaagaacagaaaagaaagagagcaagtgtccaacccccgggtgtgatggaaccggccacgtaactgggctgtacccacatcaccgcagcctgtccggatgcccgcacaaagatagggtccctccagaaatccttgccatgcatgaaagtgtcctcaagtgccccactccgggctgcacggggcgcgggcatgtcaacagcaacaggaactcccaccgaagcctctccggatgcccgatcgctgcagcagagaaactggccaaggcacaggaaaagcaccagagctgcgacgtgtccaagtccagccaggcctcggaccgcgtgctcaggccaatgtgctttgtgaagcagctggagattcctcagtatggctacagaaacaatgtccccacaactacgccgcgttccaacctggccaaggagctcgagaaatattccaagacctcgtttgaatacaacagttacgacaaccatacttatggcaagcgagccatagctcccaaggtgcaaaccagggatatatcccccaaaggatatgatgatgcgaagcggtactgcaaggaccccagccccagcagcagcagcaccagcagctacgcgcccagcagcagcagcaacctgagctgcggcgggggcagcagcgccagcagcacgtgcagcaagagcagcttcgactacacgcacgacatggaggcggcccacatggcggccaccgccatcctcaacctgtccacgcgctgccgcgagatgccgcagaacctgagcaccaagccgcaggacctgtgcgccacgcggaaccctgacatggaggtggatgagaacgggaccctggacctcagcatgaacaagcagaggccgcgggacagctgctgccccatcctgacccctctggagcccatgtccccccagcagcaggcagtgatgaacaaccggtgtttccagctgggcgagggcgactgctgggacttgcccgtagactacaccaaaatgaaaccccggaggatagacgaggacgagtccaaagacattactccagaagacttggacccattccaggaggctctagaagaaagacggtatcccggggaggtgaccatcccaagtcccaaacccaagtaccctcagtgcaaggagagcaaaaaggacttaataactctgtctggctgccccctggcggacaaaagcattcgaagtatgctggccaccagctcccaagaactcaagtgccccacgcctggctgtgatggttctggacatatcaccggcaattatgcttctcatcggagcctttcaggttgcccaagagcaaagaaaagtggtatcaggatagcacagagcaaagaagataaagaagatcaagaacccatcaggtgtccggtccccgggtgcgacggccagggccacatcactgggaagtacgcgtcccatcgcagcgcctccgggtgccccttggcggccaagaggcagaaagacgggtacctgaatggctcccagttctcctggaagtcggtcaagacggaaggcatgtcctgccccacgccaggatgcgacggctcaggccacgtcagcggcagcttcctcacacaccgcagcttgtcaggatgcccgagagccacgtcagcgatgaagaaggcaaagctttctggagagcagatgctgaccatcaaacagcgggccagcaacggtatagaaaatgatgaagaaatcaaacagttagatgaagaaatcaaggagctaaatgaatccaattcccagatggaagccgatatgattaaactcagaactcagattaccacgatggagagcaacctgaagaccatcgaagaggagaacaaagtgattgagcagcagaacgagtctctcctccacgagctggcgaacctgagccagtctctgatccacagcctggctaacatccagctgccgcacatggatccaatcaatgaacaaaattttgatgcttacgtgactactttgacggaaatgtatacaaatcaagatcgttatcagagtccagaaaataaagccctactggaaaatataaagcaggctgtgagaggaattcaggtc

SEQ ID NO: 3987 - DNA, 975 bp, Homo sapiens
  source 1..975: mol_type = genomic DNA
atgcctcggcccggccgcaacacgtacagcgaccagaagccgccctactcgtacatctcgctgaccgctatggccatccagagctctcccgagaagatgctgccgctgagcgagatctacaagttcatcatggaccgcttcccctactacagggagaacacgcagcgctggcagaacagtctgcgccacaacctctccttcaacgactgcttcatcaagatcccgcggcggccggaccagccaggcaagggcagcttctgggcgctgcacccaagctgcggggacatgttcgagaacggcagcttcctgcggcgccgcaagcgcttcaaggtgcttaagtccgaccacctggcgcccagcaagccagccgacgcggcgcagtacctgcagcagcaggccaagctgcggctcagcgcgctggcggcctcgggcacgcacctgccacagatgcccgccgccgcctacaacttgggcggcgtggcgcagccctcgggcttcaagcaccccttcgccatcgagaacatcatcgcgcgggaatacaagatgcctggggggctggccttctccgccatgcagccggtgcccgctgcctacccgctccccaaccagttgactaccatgggcagctcgctgggcaccggctggccacacgtgtatggctccgccggcatgatcgactcggccacccccatctccatggcgagtggcgactacagcgcctacggcgtgccgttgaagccgctgtgccacgcggcgggccaaacgctgcccgccatccccgtgcccattaagcccacgccggccgccgtgcccgcgctgcctgcgctgccagcgcccatccccaccttgctctcgaactcgccgccctcgctcagccccacgtcctcgcaaacagccaccagccaaagcagccccgccacccccagcgaaacgctcaccagcccggcctccgccttgcactcggtggcggtgcac

SEQ ID NO: 3988 - DNA, 1296 bp, Homo sapiens
  source 1..1296: mol_type = genomic DNA
atgccgcggccggggaagagctcgtacagcgaccaaaaaccgccctactcttacatctcgctgaccgccatggcaatccagcactcggccgagaagatgctgccgctgagcgacatctacaagttcatcatggagcgcttcccctactaccgcgagcacacacagcgctggcagaacagcctgcgccacaacctctccttcaacgactgcttcatcaagattccgcggaggcccgaccagcctggcaagggtagcttctgggcgctgcaccccgactgcggggacatgttcgagaacggcagcttcctgcggcgtcgcaagcgcttcaaggtgctgcgcgccgaccatactcacttgcacgcgggaagcaccaagagcgcgccgggcgccggtccgggagggcaccttcacccccatcaccaccaccacccccaccaccaccatcatcaccacgctgccgcacaccaccaccatcaccaccacccaccccagccgccgccgccgccgcccccgccgccgccgcacatggtacactatttccatcagcaaccgcctactgctccgcagccgcctccgcacctcccgtcacagcccccgcagcaaccgccccagcagtcgcagcctcagcagccgtctcaccccggcaagatgcaggaggcggcggccgtggcggcggcggcggcggcggccgcggcagccgcggtgggcagcgtgggacgcctgtctcagttcccaccctacgggctgggctcggccgccgccgctgccgccgcggccgcggcgtccacgtcaggcttcaagcacccctttgccattgagaacattattggccgggactacaagggcgtgctgcaggctggagggctgcccttggcgtccgtcatgcaccacctgggctaccccgtgcccggccagcttggcaacgtcgtcagctccgtgtggccgcacgttggcgtcatggattcggtggccgccgccgcggccgccgcagccgcagccggagtccctgtaggcccggagtatggggccttcggggtcccggtcaagtccctgtgccactcggcaagccagagcctgcctgccatgccggtgcccatcaagcccacgcctgcgctgccgcccgtgtccgcgctgcagccggggctcactgtccccgcggcttcgcagcagcctccggcgccatccaccgtgtgctccgcggccgcggcctcgcccgttgcctctctgctggagcccacagcccctacctcggccgaaagcaagggcggctccttgcactcggtgctagtgcactcc

SEQ ID NO: 3989 - DNA, 1485 bp, Homo sapiens
  source 1..1485: mol_type = genomic DNA
atgtcagatctggtgaaacaccagcggacccacacaggggagaaaccctacaagtgtggggtctgtggcaagggctttggggatagctctgcccggatcaaacaccagcggactcatagtggggagaagccctatagagcccggccaccagcccagggtcccccaaagattcctcggtcccggatccctgctggtgagcgccccactatctgtggtgaatgtggcaagagcttccggcagagttctgacctggtgaaacaccagcggacacacactggtgagaagccctacaagtgtggcatatgtggcaagggctttggcgacagttccgcccgcatcaagcaccagcggacacaccggggggagcagcccccccgaccagtggtgccccgacggcagccatctcgggcagccacggcagctacccagggaccgaaggcccaggacaagccatatatctgcactgattgcggcaagaggtttgtgctcagctgcagcctcctgagtcaccagcgtagtcacttggggcccaagccctttggctgtgatgtgtgtggaaaggagtttgcccggggatccgacctggtgaagcacctgcgggtgcacacgggtgagaagccctacctctgcccagagtgcggcaaaggtttcgcggacagctccgcccgagtcaaacacctccgcacccacagtggcgagaggccccatgcctgcccggaatgcgaccgtaccttcagcctcagctccacccttcttcgccaccgcctcactcacatggagccccaggacttcagcttcccaggctatcccctacccgctctgatccccagcccacccccacctcctctgggcaccagccccccgctgacacctcgaagtccctcacactcgggtgagccttttggcctgcctggcttggagccagagcctgggggcccacaggctggggagccacccccaccactggcgggcgacaagccccacaagtgccctgagtgtggcaagggcttccgccgaagctctgacctggtgaaacaccatcgtgtgcacacaggggagaaaccctacctctgtcctgaatgcggcaagggttttgctgacagctcagcccgagtcaagcacctccgcacccaccgtggtgaacgggcccggccaccaccaccatccactctgctgcggccacataacccacctggcccagtacccatggcccctcgaccccgagttcgggcccagccttctggacccagccagccccacgtgtgtggcttctgtgggaaggagttcccccggagctcagatctggtcaaacacaggcgtacacacacgggggagaagccatacaagtgtgcagagtgtggcaagggttttggtgacagttctgcccgcatcaagcaccagcgtgggcacctggtcctgacgccctttgggataggggatggtagggcaaggcccctcaagcaggaggcagcaacaggactggaa

SEQ ID NO: 3990 - DNA, 1854 bp, Homo sapiens
  source 1..1854: mol_type = genomic DNA
atggagcgcgcggtagagccttggggcccagatctccaccgcccggaggagagggagccacagagaggcgcccgcacaggtctagggagtgagaacgtgatttctcagccgaatgagtttgaacataccccacaggaagatgacttggggttcaaggaagaagatttggctccagatcatgaagtaggaaatgcctctctcaaacctgaaggcatccagaactgggatgacttatgggtccagagagagggtctaggaaagcctcagcctcgggacagaggcccccggctcctgggtgaaccacgctggggccaggctagtagtgatcgggccgctgtgtgtggtgagtgtggcaaaagcttcaggcagatgtcagatctggtgaaacaccagcggacccacacaggggagaaaccctacaagtgtggggtctgtggcaagggctttggggatagctctgcccggatcaaacaccagcggactcatagtggggagaagccctatagagcccggccaccagcccagggtcccccaaagattcctcggtcccggatccctgctggtgagcgccccactatctgtggtgaatgtggcaagagcttccggcagagttctgacctggtgaaacaccagcggacacacactggtgagaagccctacaagtgtggcatatgtggcaagggctttggcgacagttccgcccgcatcaagcaccagcggacacaccggggggagcagcccccccgaccagtggtgccccgacggcagccatctcgggcagccacggcagctacccagggaccgaaggcccaggacaagccatatatctgcactgattgcggcaagaggtttgtgctcagctgcagcctcctgagtcaccagcgtagtcacttggggcccaagccctttggctgtgatgtgtgtggaaaggagtttgcccggggatccgacctggtgaagcacctgcgggtgcacacgggtgagaagccctacctctgcccagagtgcggcaaaggtttcgcggacagctccgcccgagtcaaacacctccgcacccacagtggcgagaggccccatgcctgcccggaatgcgaccgtaccttcagcctcagctccacccttcttcgccaccgcctcactcacatggagccccaggacttcagcttcccaggctatcccctacccgctctgatccccagcccacccccacctcctctgggcaccagccccccgctgacacctcgaagtccctcacactcgggtgagccttttggcctgcctggcttggagccagagcctgggggcccacaggctggggagccacccccaccactggcgggcgacaagccccacaagtgccctgagtgtggcaagggcttccgccgaagctctgacctggtgaaacaccatcgtgtgcacacaggggagaaaccctacctctgtcctgaatgcggcaagggttttgctgacagctcagcccgagtcaagcacctccgcacccaccgtggtgaacgggcccggccaccaccaccatccactctgctgcggccacataacccacctggcccagtacccatggcccctcgaccccgagttcgggcccagccttctggacccagccagccccacgtgtgtggcttctgtgggaaggagttcccccggagctcagatctggtcaaacacaggcgtacacacacgggggagaagccatacaagtgtgcagagtgtggcaagggttttggtgacagttctgcccgcatcaagcaccagcgtgggcacctggtcctgacgccctttgggataggggatggtagggcaaggcccctcaagcaggaggcagcaacaggactggaa

SEQ ID NO: 3991 - DNA, 1128 bp, Homo sapiens
  source 1..1128: mol_type = genomic DNA
atgatggccagctaccccgagcccgaggacgcggcgggggccctgctggccccagagaccggtcgcacagtcaaggagccagaagggccgccgccgagcccaggcaagggcggtgggggtggcggcgggacagccccggagaagccggacccggcgcagaagcccccgtactcgtacgtggcgctcatcgccatggcgatccgcgagagcgcggagaagaggctcacgctgtccggcatctaccagtacatcatcgcgaagttcccgttctacgagaagaataagaagggctggcaaaatagcatccgccacaacctcagcctcaacgagtgcttcatcaaggtgccgcgcgagggcggcggcgagcgcaagggcaactactggacgctggacccggcctgcgaagacatgttcgagaagggcaactaccggcgccgccgccgcatgaagaggcccttccggccgccgcccgcgcacttccagcccggcaaggggctcttcggggccggaggcgccgcaggcgggtgcggcgtggcgggcgccggggccgacggctacggctacctggcgccccccaagtacctgcagtctggcttcctcaacaactcgtggccgctaccgcagcctccctcacccatgccctatgcctcctgccagatggcggcagccgcagcggctgcagcagctgcggctgcagccgcgggccccggtagccctggcgcggccgctgtggtcaaggggctggcgggcccggccgcctcgtacgggccgtacacacgcgtgcagagcatggcgctgccccccggcgtagtgaactcgtacaatggcctgggaggcccgccggccgcacccccgcctccgccgcacccccacccgcatccgcacgcacaccatctgcacgcggccgccgcaccgccgcctgccccaccgcaccacggggccgccgcgccgccgccgggccagctcagccctgccagcccagccaccgccgcgcccccggcgcccgcgcccaccagtgcgccgggcctgcagttcgcttgtgcccggcagcccgagctcgccatgatgcattgctcttactgggaccacgacagcaagaccggcgcgctgcattcgcgcctcgatctc

SEQ ID NO: 3992 - DNA, 1035 bp, Homo sapiens
  source 1..1035: mol_type = genomic DNA
atgagtcacctcttcgatccccggctgcctgccctggccgcctcgcccatgctgtatctgtacggtcccgagagacccggcctccctctggccttcgcccccgcggctgctctagctgcctcgggccgggccgagaccccgcagaagcctccctacagctacatcgcgctcatcgccatggcgatccaggacgcgcccgagcagagggtcacgctcaacggcatctaccagttcatcatggaccgcttccccttctaccacgacaaccggcagggctggcagaacagcatccgccacaacctctcgctcaacgactgcttcgtcaaggtgccccgcgagaaagggcggccgggcaagggcagctactggacgctggacccccgctgcctggacatgtttgagaacggcaactaccggcgccggaagaggaagcccaagccgggccccggggccccggaggccaagaggccccgcgccgagacgcaccagcgcagcgcggaggcgcagccggaggcggggagcggggcagggggctcgggccccgcaatctcccgcctgcaggcagcgcccgcgggcccctcgcccctcctggacggcccctctccgccggcgcccctccactggccggggaccgcgtccccgaacgaggacgctggtgacgctgcccagggcgcagcggccgtggcggtcggccaggcagcgcgcacaggggacggcccggggtcccctctgcgccccgcctcccgcagctctccgaagagctccgacaagtccaagagcttcagcatagacagcatcctggcgggaaagcagggccagaagccgccttcaggggacgaactcctagggggtgccaagcctgggcccggcggccgtctgggtgcctcgctcctggccgcctcctccagcctccgtccgcctttcaacgcttccctgatgctcgacccgcatgtccagggcggcttttaccagctcgggatccccttcctctcttatttccccctgcaggttcccgacacggtactccacttccag

SEQ ID NO: 3993 - DNA, 2334 bp, Homo sapiens
  source 1..2334: mol_type = genomic DNA
atgaacaaggtagatcagaagttccaggggtcagtatcatttaaagatgtgactgtgggcttcacccaggaggagtggcagcacctggaccctagtcagagggctctgtatagagatgtgatgctggagaactacagcaaccttgtctcagtggggtattgtgctcacaaaccagaggtgatcttcaggctggaacaaggagaagaaccatggagactggaggaagaattcccaagccagagctttccagaagtctggacagctgatcacctgaaagagaggagccaagaaaatcaatctaaacatttgtgggaagttgtattcatcaataatgaaatgctgactaaggaacaaggtaatgtaataggaataccatttaacatggacgtaagttcttttccttccagaaaaatgttctgtcagtatgactcacgtggaatgagtttcaacactgtttcagaattggttatcagtaagataaactatttaggaaaaaagtctgacgaatttaatgcatgtgggaaattgttactcaatattaagcatgatgaaactcatactcgagagaaaaatgaagttttgaaaaataggaacactctgagtcatcgtgagaacactttgcagcatgagaagattcaaactttagaccacaattttgaatacagtatatgtcaggaaaccctccttgaaaaggcagtattcaatacacggaagagagagaatgcagaagagaataactgtgactataatgaatttgggagaactttctgtgatagttcatccctcttgttccatcagatacctccatcaaaggacagtcactatgaatttagtgattgtgagaagttcttatgtgtgaagtccaccctttctaaacatgatggggtacctgtgaaacactatgattgtggtgaaagtgggaataatttcaggaggaaattgtgtctgtcacagcttcagaaaggtgataaaggagagaaacactttgaatgtaatgaatgtgggaaagctttctgggagaagtcacatctcactcgacatcagagggtgcacacaggagagaaacactttcaatgtaatcaatgtggaaaaactttctgggagaagtcaaacctcactaaacatcagagatcacacacaggggagaaaccttttgaatgcaatgaatgtgggaaagcctttagccataagtcagccctcacattacaccagagaacacatacaggggagaaaccctatcagtgtaatgcatgtgggaaaactttttaccagaaatctgacctcactaaacatcagagaacacacacagggcagaaaccctatgaatgttatgaatgtggaaaatccttctgtatgaattcacaccttacagtacaccagagaactcacacaggtgagaaaccttttgaatgtcttgagtgtgggaaatccttttgtcaaaagtcacatcttacacagcatcagagaactcacataggagataaaccttatgaatgtaatgcatgtgggaaaactttctaccacaagtcagtactcaccaggcatcagataattcatacagggttgaaaccttatgaatgttatgaatgtgggaaaaccttctgcttgaagtcagacctcacaatacatcagagaacgcacacaggggagaaaccctttgcatgtcctgaatgtgggaaattctttagccataagtcaaccctctctcaacattatagaacacacacgggggagaaaccctatgaatgtcatgaatgtggaaaaatcttttacaataaatcatacctaacaaaacataatagaacacatacaggggagaaaccctatgaatgtaatgaatgtggaaaaaccttctgccagaagtcacaactcactcagcatcagagaattcacataggggagaaaccctatgaatgtaatgagtgtggaaaagctttctgccataagtcagctctaattgtacatcagagaacccatacacaagaaaagccttataaatgtaacgaatgtggaaaatctttctgtgtgaagtcaggacttattttacatgagagaaagcacacgggggagaaaccctatgaatgcaatgaatgtgggaaatccttcagtcacaaatcatcactcacagtacatcacagggctcacacaggagagaaatcttgtcagtgtaatgaatgtggaaaaatcttttaccgtaaatcagaccttgctaaacatcagagatcacatacaggggaaaagccctatgaatgtaacacatgcaggaaaaccttctctcaaaagtcaaatctcattgtacatcagagaacacacataggagaaaaaccttatgaa

SEQ ID NO: 3994 - DNA, 2451 bp, Homo sapiens
  source 1..2451: mol_type = genomic DNA
atggcgaatgcaacccgacgagggagtggggtagaacagaagtcccaggagtcagtatcatttaaagatgtgactgtgggcttcacccaggaggagtggcagcacctggaccctagtcagagggctctgtatagagatgtgatgctggagaactacagcaaccttgtctcagtggggtattgtgttcacaaaccagaggtgatcttcaggctgcaacaaggagaagagccatggaaacaggaggaagaattcccaagccaaagctttccagtctggacagctgatcacctgaaagagaggagccaagaaaaccaatctaaacatttgtgggaagttgtattcatcaataatgaaatgctgactaaggaacaaggtgatgtaataggaataccatttaatgtggatgtaagttcttttccttccagaaaaatgttctgtcagtgtgattcatgtggaatgagtttcaacactgtttcagaattggttatcagtaagataaactatttaggaaaaaagtctgatgaatttaatgcctgtgggaaattgttactcaatattaagcatgatgaaactcatactcaagagaaaaatgaagttttgaaaaataggaacacactgagtcatcatgaggagactttgcagcatgagaagattcaaactttagagcacaattttgaatacagtatatgtcaggaaaccctccttgaaaaggcagtattcaatacacagaagagagagaacgcagaagagaataactgtgattataatgaatttgggagaactttgtgtgatagttcatccctcttgttccatcagatatctccgtcaagggacaatcactatgaatttagtgattgtgagaagttcttatgtgtgaagtccaccctttctaaacctcatggggtatctatgaaacactatgattgtggtgaaagtgggaataatttcaggaggaaattgtgtctgtcacaccttcagaaaggtgataaaggagagaaacactttgaatgtaatgaatgtgggaaagctttctgggagaagtcacatctcactcgacatcagagggtgcacacaggacagaaaccctttcaatgtaatgaatgtgaaaaagctttctgggataagtcaaacctcactaaacatcaaagatcacacacaggggagaaaccttttgaatgcaatgaatgtgggaaagcctttagccataagtcagccctcacattacaccagagaacacatacaggggagaaaccctatcaatgtaatgcgtgtgggaaaactttttgccagaaatctgacctcactaaacatcagagaacacacacagggctgaaaccctatgaatgttatgaatgtggaaaatccttccgtgtgacttcgcaccttaaagtacaccagagaactcacacaggtgagaaaccttttgaatgtcttgagtgtgggaaatcctttagtgaaaagtcaaatcttacacagcatcagagaattcacataggagataaatcttatgaatgtaatgcatgtgggaaaactttctaccacaagtcattactcaccaggcatcagataattcatacagggtggaaaccttatgaatgttatgaatgtgggaaaaccttctgcttgaagtcagacctcacagtacatcagagaacacacacagggcagaaaccctttgcatgtcccgaatgtgggaaattctttagccataagtcaaccctctctcaacattatagaacacacacaggggagaaaccctacgaatgtcatgaatgtggaaaaatcttttacaataaatcatacctaactaaacataatagaacacatacaggggagaaaccctatgaatgtaatgaatgtggaaaagccttctaccagaagtcacaactcactcagcatcagagaattcacataggggagaaaccctataaatgtaatgagtgtggaaaagctttctgccataagtcagctctaattgtacatcagagaacccatacacaagaaaagccctataaatgtaatgaatgtggaaaatctttctgtgtaaaatcaggacttattttccatgagagaaagcacacgggggagaaaccctatgaatgcaatgaatgtgggaaattcttcaggcacaaatcatcactcacagtacatcacagggctcacacaggagagaaatcttgtcaatgtaatgaatgtggaaaaatcttttaccgtaaatcggaacttgctcaacatcagagatcacatacaggggaaaagccctatgaatgtaacacatgcaggaaaactttctctcaaaagtcaaatctcattgtacatcagagaagacatataggagaaaaccttatgaatgaaatggatattagaaatttccagccacaagtcagcctccataatgcctcagagtattcacactgtggagaaagccctgatgacatcctgaatgttcag

SEQ ID NO: 3995 - DNA, 2433 bp, Homo sapiens
  source 1..2433: mol_type = genomic DNA
atgaacaaggtagaacagaagtcccaggagtcagtatcatttaaagatgtgactgtgggcttcacccaggaggagtggcagcacctggaccctagtcagagggctctgtatagagatgtgatgctggagaactacagcaaccttgtctcagtggggtattgtgttcacaaaccagaggtgatcttcaggctgcaacaaggagaagagccatggaaacaggaggaagaattcccaagccaaagctttccagaagtctggacagctgatcacctgaaagagaggagccaagaaaaccaatctaaacatttgtgggaagttgtattcatcaataatgaaatgctgactaaggaacaaggtgatgtaataggaataccatttaatgtggatgtaagttcttttccttccagaaaaatgttctgtcagtgtgattcatgtggaatgagtttcaacactgtttcagaattggttatcagtaagataaactatttaggaaaaaagtctgatgaatttaatgcctgtgggaaattgttactcaatattaagcatgatgaaactcatactcaagagaaaaatgaagttttgaaaaataggaacacactgagtcatcatgaggagactttgcagcatgagaagattcaaactttagagcacaattttgaatacagtatatgtcaggaaaccctccttgaaaaggcagtattcaatacacagaagagagagaacgcagaagagaataactgtgattataatgaatttgggagaactttgtgtgatagttcatccctcttgttccatcagatatctccgtcaagggacaatcactatgaatttagtgattgtgagaagttcttatgtgtgaagtccaccctttctaaacctcatggggtatctatgaaacactatgattgtggtgaaagtgggaataatttcaggaggaaattgtgtctgtcacaccttcagaaaggtgataaaggagagaaacactttgaatgtaatgaatgtgggaaagctttctgggagaagtcacatctcactcgacatcagagggtgcacacaggacagaaaccctttcaatgtaatgaatgtgaaaaagctttctgggataagtcaaacctcactaaacatcaaagatcacacacaggggagaaaccttttgaatgcaatgaatgtgggaaagcctttagccataagtcagccctcacattacaccagagaacacatacaggggagaaaccctatcaatgtaatgcgtgtgggaaaactttttgccagaaatctgacctcactaaacatcagagaacacacacagggctgaaaccctatgaatgttatgaatgtggaaaatccttccgtgtgacttcgcaccttaaagtacaccagagaactcacacaggtgagaaaccttttgaatgtcttgagtgtgggaaatcctttagtgaaaagtcaaatcttacacagcatcagagaattcacataggagataaatcttatgaatgtaatgcatgtgggaaaactttctaccacaagtcattactcaccaggcatcagataattcatacagggtggaaaccttatgaatgttatgaatgtgggaaaaccttctgcttgaagtcagacctcacagtacatcagagaacacacacagggcagaaaccctttgcatgtcccgaatgtgggaaattctttagccataagtcaaccctctctcaacattatagaacacacacaggggagaaaccctacgaatgtcatgaatgtggaaaaatcttttacaataaatcatacctaactaaacataatagaacacatacaggggagaaaccctatgaatgtaatgaatgtggaaaagccttctaccagaagtcacaactcactcagcatcagagaattcacataggggagaaaccctataaatgtaatgagtgtggaaaagctttctgccataagtcagctctaattgtacatcagagaacccatacacaagaaaagccctataaatgtaatgaatgtggaaaatctttctgtgtaaaatcaggacttattttccatgagagaaagcacacgggggagaaaccctatgaatgcaatgaatgtgggaaattcttcaggcacaaatcatcactcacagtacatcacagggctcacacaggagagaaatcttgtcaatgtaatgaatgtggaaaaatcttttaccgtaaatcggaacttgctcaacatcagagatcacatacaggggaaaagccctatgaatgtaacacatgcaggaaaactttctctcaaaagtcaaatctcattgtacatcagagaagacatataggagaaaaccttatgaatgaaatggatattagaaatttccagccacaagtcagcctccataatgcctcagagtattcacactgtggagaaagccctgatgacatcctgaatgttcag

SEQ ID NO: 3996 - DNA, 2430 bp, Homo sapiens
  source 1..2430: mol_type = genomic DNA
atgaacaaggtagaacagaagtcccaggagtcagtatcatttaaagatgtgactgtgggcttcacccaggaggagtggcagcacctggaccctagtcagagggctctgtatagagatgtgatgctggagaactacagcaaccttgtctcagtggggtattgtgttcacaaaccagaggtgatcttcaggctgcaacaaggagaagagccatggaaacaggaggaagaattcccaagccaaagctttccagtctggacagctgatcacctgaaagagaggagccaagaaaaccaatctaaacatttgtgggaagttgtattcatcaataatgaaatgctgactaaggaacaaggtgatgtaataggaataccatttaatgtggatgtaagttcttttccttccagaaaaatgttctgtcagtgtgattcatgtggaatgagtttcaacactgtttcagaattggttatcagtaagataaactatttaggaaaaaagtctgatgaatttaatgcctgtgggaaattgttactcaatattaagcatgatgaaactcatactcaagagaaaaatgaagttttgaaaaataggaacacactgagtcatcatgaggagactttgcagcatgagaagattcaaactttagagcacaattttgaatacagtatatgtcaggaaaccctccttgaaaaggcagtattcaatacacagaagagagagaacgcagaagagaataactgtgattataatgaatttgggagaactttgtgtgatagttcatccctcttgttccatcagatatctccgtcaagggacaatcactatgaatttagtgattgtgagaagttcttatgtgtgaagtccaccctttctaaacctcatggggtatctatgaaacactatgattgtggtgaaagtgggaataatttcaggaggaaattgtgtctgtcacaccttcagaaaggtgataaaggagagaaacactttgaatgtaatgaatgtgggaaagctttctgggagaagtcacatctcactcgacatcagagggtgcacacaggacagaaaccctttcaatgtaatgaatgtgaaaaagctttctgggataagtcaaacctcactaaacatcaaagatcacacacaggggagaaaccttttgaatgcaatgaatgtgggaaagcctttagccataagtcagccctcacattacaccagagaacacatacaggggagaaaccctatcaatgtaatgcgtgtgggaaaactttttgccagaaatctgacctcactaaacatcagagaacacacacagggctgaaaccctatgaatgttatgaatgtggaaaatccttccgtgtgacttcgcaccttaaagtacaccagagaactcacacaggtgagaaaccttttgaatgtcttgagtgtgggaaatcctttagtgaaaagtcaaatcttacacagcatcagagaattcacataggagataaatcttatgaatgtaatgcatgtgggaaaactttctaccacaagtcattactcaccaggcatcagataattcatacagggtggaaaccttatgaatgttatgaatgtgggaaaaccttctgcttgaagtcagacctcacagtacatcagagaacacacacagggcagaaaccctttgcatgtcccgaatgtgggaaattctttagccataagtcaaccctctctcaacattatagaacacacacaggggagaaaccctacgaatgtcatgaatgtggaaaaatcttttacaataaatcatacctaactaaacataatagaacacatacaggggagaaaccctatgaatgtaatgaatgtggaaaagccttctaccagaagtcacaactcactcagcatcagagaattcacataggggagaaaccctataaatgtaatgagtgtggaaaagctttctgccataagtcagctctaattgtacatcagagaacccatacacaagaaaagccctataaatgtaatgaatgtggaaaatctttctgtgtaaaatcaggacttattttccatgagagaaagcacacgggggagaaaccctatgaatgcaatgaatgtgggaaattcttcaggcacaaatcatcactcacagtacatcacagggctcacacaggagagaaatcttgtcaatgtaatgaatgtggaaaaatcttttaccgtaaatcggaacttgctcaacatcagagatcacatacaggggaaaagccctatgaatgtaacacatgcaggaaaactttctctcaaaagtcaaatctcattgtacatcagagaagacatataggagaaaaccttatgaatgaaatggatattagaaatttccagccacaagtcagcctccataatgcctcagagtattcacactgtggagaaagccctgatgacatcctgaatgttcag

SEQ ID NO: 3997 - DNA, 2487 bp, Homo sapiens
  source 1..2487: mol_type = genomic DNA
atgtgccctagaggatatccagaacaatccaattggatgtcttctccgctgtactccacagaggtagaacagaagtcccaggagtcagtatcatttaaagatgtgactgtgggcttcacccaggaggagtggcagcacctggaccctagtcagagggctctgtatagagatgtgatgctggagaactacagcaaccttgtctcagtggggtattgtgttcacaaaccagaggtgatcttcaggctgcaacaaggagaagagccatggaaacaggaggaagaattcccaagccaaagctttccagaagtctggacagctgatcacctgaaagagaggagccaagaaaaccaatctaaacatttgtgggaagttgtattcatcaataatgaaatgctgactaaggaacaaggtgatgtaataggaataccatttaatgtggatgtaagttcttttccttccagaaaaatgttctgtcagtgtgattcatgtggaatgagtttcaacactgtttcagaattggttatcagtaagataaactatttaggaaaaaagtctgatgaatttaatgcctgtgggaaattgttactcaatattaagcatgatgaaactcatactcaagagaaaaatgaagttttgaaaaataggaacacactgagtcatcatgaggagactttgcagcatgagaagattcaaactttagagcacaattttgaatacagtatatgtcaggaaaccctccttgaaaaggcagtattcaatacacagaagagagagaacgcagaagagaataactgtgattataatgaatttgggagaactttgtgtgatagttcatccctcttgttccatcagatatctccgtcaagggacaatcactatgaatttagtgattgtgagaagttcttatgtgtgaagtccaccctttctaaacctcatggggtatctatgaaacactatgattgtggtgaaagtgggaataatttcaggaggaaattgtgtctgtcacaccttcagaaaggtgataaaggagagaaacactttgaatgtaatgaatgtgggaaagctttctgggagaagtcacatctcactcgacatcagagggtgcacacaggacagaaaccctttcaatgtaatgaatgtgaaaaagctttctgggataagtcaaacctcactaaacatcaaagatcacacacaggggagaaaccttttgaatgcaatgaatgtgggaaagcctttagccataagtcagccctcacattacaccagagaacacatacaggggagaaaccctatcaatgtaatgcgtgtgggaaaactttttgccagaaatctgacctcactaaacatcagagaacacacacagggctgaaaccctatgaatgttatgaatgtggaaaatccttccgtgtgacttcgcaccttaaagtacaccagagaactcacacaggtgagaaaccttttgaatgtcttgagtgtgggaaatcctttagtgaaaagtcaaatcttacacagcatcagagaattcacataggagataaatcttatgaatgtaatgcatgtgggaaaactttctaccacaagtcattactcaccaggcatcagataattcatacagggtggaaaccttatgaatgttatgaatgtgggaaaaccttctgcttgaagtcagacctcacagtacatcagagaacacacacagggcagaaaccctttgcatgtcccgaatgtgggaaattctttagccataagtcaaccctctctcaacattatagaacacacacaggggagaaaccctacgaatgtcatgaatgtggaaaaatcttttacaataaatcatacctaactaaacataatagaacacatacaggggagaaaccctatgaatgtaatgaatgtggaaaagccttctaccagaagtcacaactcactcagcatcagagaattcacataggggagaaaccctataaatgtaatgagtgtggaaaagctttctgccataagtcagctctaattgtacatcagagaacccatacacaagaaaagccctataaatgtaatgaatgtggaaaatctttctgtgtaaaatcaggacttattttccatgagagaaagcacacgggggagaaaccctatgaatgcaatgaatgtgggaaattcttcaggcacaaatcatcactcacagtacatcacagggctcacacaggagagaaatcttgtcaatgtaatgaatgtggaaaaatcttttaccgtaaatcggaacttgctcaacatcagagatcacatacaggggaaaagccctatgaatgtaacacatgcaggaaaactttctctcaaaagtcaaatctcattgtacatcagagaagacatataggagaaaaccttatgaatgaaatggatattagaaatttccagccacaagtcagcctccataatgcctcagagtattcacactgtggagaaagccctgatgacatcctgaatgttcag

SEQ ID NO: 3998 - DNA, 2097 bp, Homo sapiens
  source 1..2097: mol_type = genomic DNA
atgctgactaaggaacaaggtgatgtaataggaataccatttaatgtggatgtaagttcttttccttccagaaaaatgttctgtcagtgtgattcatgtggaatgagtttcaacactgtttcagaattggttatcagtaagataaactatttaggaaaaaagtctgatgaatttaatgcctgtgggaaattgttactcaatattaagcatgatgaaactcatactcaagagaaaaatgaagttttgaaaaataggaacacactgagtcatcatgaggagactttgcagcatgagaagattcaaactttagagcacaattttgaatacagtatatgtcaggaaaccctccttgaaaaggcagtattcaatacacagaagagagagaacgcagaagagaataactgtgattataatgaatttgggagaactttgtgtgatagttcatccctcttgttccatcagatatctccgtcaagggacaatcactatgaatttagtgattgtgagaagttcttatgtgtgaagtccaccctttctaaacctcatggggtatctatgaaacactatgattgtggtgaaagtgggaataatttcaggaggaaattgtgtctgtcacaccttcagaaaggtgataaaggagagaaacactttgaatgtaatgaatgtgggaaagctttctgggagaagtcacatctcactcgacatcagagggtgcacacaggacagaaaccctttcaatgtaatgaatgtgaaaaagctttctgggataagtcaaacctcactaaacatcaaagatcacacacaggggagaaaccttttgaatgcaatgaatgtgggaaagcctttagccataagtcagccctcacattacaccagagaacacatacaggggagaaaccctatcaatgtaatgcgtgtgggaaaactttttgccagaaatctgacctcactaaacatcagagaacacacacagggctgaaaccctatgaatgttatgaatgtggaaaatccttccgtgtgacttcgcaccttaaagtacaccagagaactcacacaggtgagaaaccttttgaatgtcttgagtgtgggaaatcctttagtgaaaagtcaaatcttacacagcatcagagaattcacataggagataaatcttatgaatgtaatgcatgtgggaaaactttctaccacaagtcattactcaccaggcatcagataattcatacagggtggaaaccttatgaatgttatgaatgtgggaaaaccttctgcttgaagtcagacctcacagtacatcagagaacacacacagggcagaaaccctttgcatgtcccgaatgtgggaaattctttagccataagtcaaccctctctcaacattatagaacacacacaggggagaaaccctacgaatgtcatgaatgtggaaaaatcttttacaataaatcatacctaactaaacataatagaacacatacaggggagaaaccctatgaatgtaatgaatgtggaaaagccttctaccagaagtcacaactcactcagcatcagagaattcacataggggagaaaccctataaatgtaatgagtgtggaaaagctttctgccataagtcagctctaattgtacatcagagaacccatacacaagaaaagccctataaatgtaatgaatgtggaaaatctttctgtgtaaaatcaggacttattttccatgagagaaagcacacgggggagaaaccctatgaatgcaatgaatgtgggaaattcttcaggcacaaatcatcactcacagtacatcacagggctcacacaggagagaaatcttgtcaatgtaatgaatgtggaaaaatcttttaccgtaaatcggaacttgctcaacatcagagatcacatacaggggaaaagccctatgaatgtaacacatgcaggaaaactttctctcaaaagtcaaatctcattgtacatcagagaagacatataggagaaaaccttatgaatgaaatggatattagaaatttccagccacaagtcagcctccataatgcctcagagtattcacactgtggagaaagccctgatgacatcctgaatgttcag

SEQ ID NO: 3999 - DNA, 1683 bp, Homo sapiens
  source 1..1683: mol_type = genomic DNA
atgggggccaggacacctttgccttctttctgggtttctttctttgccgagacagggattttgttcccaggaggcactccctggcccatgggatctcagcattcaaagcagcacaggaaacctgggcccctgaaacggggccaccgaagagatcggagaacaaccaggaggaagtactggaaggaaggaagggagatcgctcgtgtcttagatgatgagggcagaaacctgaggcagcagaagcttgatcggcagcgggccctgctggagcagaagcagaagaagaagcgccaggagcccctgatggtgcaggccaatgcagatgggcggccccggagccggcgggcccggcagtcagaggaacaagcccccctggtggagtcctacctcagcagcagtggcagcaccagctaccaagttcaagaggccgactcactcgccagtgtgcagctgggagccacgcgcccaacagcaccagcttcagccaagagaaccaaggcggcagctacagcagggggccagggtggcgccgctaggaaggagaagaagggaaagcacaaaggcaccagcgggccagcagcactggcagaagacaagtctgaggcccaaggcccagtgcagattctgactgtgggccagtcagaccacgcccaggacgcaggggagacggcagctggtgggggcgaacggcccagcgggcaggatctccgtgccacgatgcagaggaagggcatctccagcagcatgagctttgacgaggatgaggaggatgaggaggagaatagctccagctcctcccagctaaatagtaacacccgccccagctctgctactagcaggaagtccgtcagggaggcagcctcagcccctagcccaacagctccagagcaaccagtggacgttgaggtccaggatcttgaggagtttgcactgaggccggccccccagggtatcaccatcaaatgccgcatcactcgggacaagaaagggatggaccggggcatgtaccccacctactttctgcacctggaccgtgaggatgggaagaaggtgttcctcctggcgggaaggaagagaaagaagagtaaaacttccaattacctcatctctgtggacccaacagacttgtctcgaggaggggacagctatatcgggaaactgcggtccaacttgatgggcaccaagttcactgtttatgacaatggagtcaaccctcagaaggcctcatcctccactttggaaagtggaaccttacgtcaggagctggcagctgtgtgctacgagacaaacgtcttaggcttcaaggggcctcggaagatgagcgtgattgtcccaggcatgaacatggttcatgagagagtctctatccgcccccgcaacgagcatgagacactgctagcacgctggcagaataagaacacggagagtatcatcgagctgcaaaacaagacacctgtctggaatgatgacacacagtcctatgtactcaacttccatgggcgcgtcacacaggcctccgtgaagaacttccagatcatccatggcaatgacccggactacatcgtgatgcagtttggccgggtagcagaggatgtgttcaccatggattacaactacccgctgtgtgcactgcaggcctttgccattgccctgtccagcttcgacagcaagctggcgtgcgag

SEQ ID NO: 4000 - DNA, 1518 bp, Homo sapiens
  source 1..1518: mol_type = genomic DNA
atgacttccaagccgcattccgactggattccctacagtgtcttagatgatgagggcagaaacctgaggcagcagaagcttgatcggcagcgggccctgctggagcagaagcagaagaagaagcgccaggagcccctgatggtgcaggccaatgcagatgggcggccccggagccggcgggcccggcagtcagaggaacaagcccccctggtggagtcctacctcagcagcagtggcagcaccagctaccaagttcaagaggccgactcactcgccagtgtgcagctgggagccacgcgcccaacagcaccagcttcagccaagagaaccaaggcggcagctacagcagggggccagggtggcgccgctaggaaggagaagaagggaaagcacaaaggcaccagcgggccagcagcactggcagaagacaagtctgaggcccaaggcccagtgcagattctgactgtgggccagtcagaccacgcccaggacgcaggggagacggcagctggtgggggcgaacggcccagcgggcaggatctccgtgccacgatgcagaggaagggcatctccagcagcatgagctttgacgaggatgaggaggatgaggaggagaatagctccagctcctcccagctaaatagtaacacccgccccagctctgctactagcaggaagtccgtcagggaggcagcctcagcccctagcccaacagctccagagcaaccagtggacgttgaggtccaggatcttgaggagtttgcactgaggccggccccccagggtatcaccatcaaatgccgcatcactcgggacaagaaagggatggaccggggcatgtaccccacctactttctgcacctggaccgtgaggatgggaagaaggtgttcctcctggcgggaaggaagagaaagaagagtaaaacttccaattacctcatctctgtggacccaacagacttgtctcgaggaggggacagctatatcgggaaactgcggtccaacttgatgggcaccaagttcactgtttatgacaatggagtcaaccctcagaaggcctcatcctccactttggaaagtggaaccttacgtcaggagctggcagctgtgtgctacgagacaaacgtcttaggcttcaaggggcctcggaagatgagcgtgattgtcccaggcatgaacatggttcatgagagagtctctatccgcccccgcaacgagcatgagacactgctagcacgctggcagaataagaacacggagagtatcatcgagctgcaaaacaagacacctgtctggaatgatgacacacagtcctatgtactcaacttccatgggcgcgtcacacaggcctccgtgaagaacttccagatcatccatggcaatgacccggactacatcgtgatgcagtttggccgggtagcagaggatgtgttcaccatggattacaactacccgctgtgtgcactgcaggcctttgccattgccctgtccagcttcgacagcaagctggcgtgcgag

SEQ ID NO: 4001 - DNA, 2394 bp, Homo sapiens
  source 1..2394: mol_type = genomic DNA
atgcacggagggcggagctgcggcccgaggacgcgacgcgagcccagttccggcgaggaggccgcgccagtgacagcgatggcggcggagtcggcgctccaagttgtggagaagctgcaggcgcgcctggccgcgaacccggaccctaagaagctattgaaatatttgaagaaactctccaccctgcctattacagtagacattcttgcggagactggggttgggaaaacagtaaatagcttgcgaaaacacgagcatgttggaagctttgccagggacctagtggcccagtggaagaagctggttcctgtggaacgaaatgctgagcctgatgaacaggactttgagaagagcaattcccgaaagcgccctcgggatgccctgcagaaggaggaggagatggagggggactaccaagaaacctggaaagccacggggagccgatcctatagccctgaccacaggcagaagaaacataggaaactctcggagctcgagagacctcacaaagtgtctcacggtcatgagaggagagatgagagaaagaggtgtcacagaatgtcaccaacttactcttcagaccctgagtcttctgattatggccatgttcaatcccctccatcttgtaccagtcctcatcagatgtacgtcgaccactacagatccctggaggaggaccaggagcccattgtttcacaccagaagcctgggaaaggccacagcaatgcctttcaggacagactcggggccagccaagaacgacacctgggtgaaccccatgggaaaggggttgtgagtcaaaacaaggagcacaaatcttcccacaaggacaaacgccccgtggatgccaagagtgatgagaaggcctctgtggtgagcagagagaaatcacacaaggccctctccaaagaggagaaccgaaggccaccctcaggggacaatgcaagggagaaaccgccctctagtggcgtaaagaaagagaaggacagagagggcagcagcctgaagaagaagtgtttgcctccctcagaggccgcttcagacaaccacctgaaaaagccaaagcacagagacccagagaaagccaaattggacaaaagcaagcaaggtctggacagctttgacacaggaaaaggagcaggagacctgttgcccaaggtaaaagagaagggttctaacaacctaaagactccagaagggaaagtcaaaactaatttggatagaaagtcactgggctccctccctaaagttgaggagacagatatggaggatgaattcgagcagccaaccatgtcttttgaatcctacctcagctatgaccagccccggaagaaaaagaaaaagattgtgaaaacttcagccacggcacttggagataaaggacttaaaaaaaatgactctaaaagcactggtaaaaacttggactcagttcagaaattacccaaggtgaacaaaaccaagtcagagaagccggctggagctgatttagccaagctgagaaaggtgcctgatgtgttgccagtgttgccagacctcccgttacccgcgatacaggccaattaccgtccactgccttccctcgagctgatatcctccttccagccaaagcgaaaagcgttctcttcaccccaggaagaagaagaagctggatttactgggcgcagaatgaattccaagatgcaggtgtattctggttccaagtgtgcctatctccctaaaatgatgaccttgcaccagcaatgcatccgagtacttaaaaacaacatcgattcaatctttgaagtgggaggagtcccatactctgttcttgaacccgttttggagaggtgtacacctgatcagctgtatcgcatagaggaatacaatcatgtattaattgaagaaacagatcaattatggaaagttcattgtcaccgagactttaaggaagaaagacccgaagagtatgagtcgtggcgagagatgtacctgcggcttcaggacgcccgagagcagcggctacgagtactaacaaagaatatccagttcgcacatgccaataagcccaaaggccgacaagcaaagatggcctttgtcaactctgtggccaagccacctcgtgacgtccggaggaggcaggaaaagtttggaacgggaggagcagctgtccctgagaaaatcaagatcaagccagccccgtaccccatgggaagcagccatgcttccgccagtagcatcagctttaaccccagccctgaggagccggcctatgatggcccaagcaccagcagtgcccacttggcaccagtggtcagcagcactgtttcctatgatcctaggaaacccactgtgaagaaaattgccccaatgatggccaagacaattaaagctttcaagaacagattctcccgacga

SEQ ID NO: 4002 - DNA, 483 bp, Homo sapiens
  source 1..483: mol_type = genomic DNA
atggacgtgttcctcatgatccggcgccacaagaccaccatcttcacggacgccaaggagtccagcacggtgttcgaactgaagcgcatcgtcgagggcatcctcaagcggcctcctgacgagcagcggctgtacaaggatgaccaactcttggatgatggcaagacactgggcgagtgtggcttcaccagtcaaacagcacggccacaggccccagccacagtggggctggccttccgggcagatgacacctttgaggccctgtgcatcgagccgttttccagcccgccagagctgcccgatgtgatgaagccccaggactcgggaagcagtgccaatgaacaagccgtgcacctgcatgtccactcccagacgatggccaagagcagaaacacaagctggagccagtgtcctggtttgacagcatgttcaacgagggaaccccaagacggacccacacaggtccacccacgctgggggctg

SEQ ID NO: 4003 - DNA, 354 bp, Homo sapiens
  source 1..354: mol_type = genomic DNA
atggacgtgttcctcatgatccggcgccacaagaccaccatcttcacggacgccaaggagtccagcacggtgttcgaactgaagcgcatcgtcgagggcatcctcaagcggcctcctgacgagcagcggctgtacaaggatgaccaactcttggatgatggcaagacactgggcgagtgtggcttcaccagtcaaacagcacggccacaggccccagccacagtggggctggccttccgggcagatgacacctttgaggccctgtgcatcgagccgttttccagcccgccagagctgcccgatgtgatgaagccccaggactcgggaagcagtgccaatgaacaagccgtgcag

SEQ ID NO: 4004 - DNA, 336 bp, Homo sapiens
  source 1..336: mol_type = genomic DNA
atggatggagaggagaaaacctatggtggctgtgaaggacctgatgccatgtatgtcaaattgatatcatctgatggccatgaatttattgtaaaaagagaacatgcattaacatcaggcacgataaaagccatgttgagtggcccaggtcagtttgctgagaacgaaaccaatgaggtcaattttagagagataccttcacatgtgctatcgaaagtatgcatgtattttacgtacaaggttcgctacactaacagctccaccgagattcctgaattcccaattgcacctgaaattgcactggaactgctgatggctgcgaacttcttagattgt

SEQ ID NO: 4005 - DNA, 288 bp, Homo sapiens
  source 1..288: mol_type = genomic DNA
atgtatgtcaaattgatatcatctgatggccatgaatttattgtaaaaagagaacatgcattaacatcaggcacgataaaagccatgttgagtggcccaggtcagtttgctgagaacgaaaccaatgaggtcaattttagagagataccttcacatgtgctatcgaaagtatgcatgtattttacgtacaaggttcgctacactaacagctccaccgagattcctgaattcccaattgcacctgaaattgcactggaactgctgatggctgcgaacttcttagattgt

SEQ ID NO: 4006 - DNA, 1374 bp, Homo sapiens
  source 1..1374: mol_type = genomic DNA
atgtccacagaaggaggatttggtggtactagcagcagtgatgcccagcaaagcctacagtcgttctggcctcgggtcatggaagaaatccggaatttaacagtgaaagacttccgagtgcaggaactcccactggctcgtattaagaagattatgaaactggatgaagatgtgaagatgatcagtgcagaagcgcctgtactctttgccaaggcagcccagatttttatcacagagttgactcttcgagcctggattcacacagaagataacaagcgccggactctacagagaaatgatatcgccatggcaattacaaaatttgatcagtttgattttctcatcgatattgttccaagagatgaactgaaacctccaaagcgtcaggaggaggtgcgccagtctgtaactcctgccgagccagtccagtactatttcacgctggctcagcaacccaccgctgtccaagtccagggccagcagcaaggccagcagaccaccagctccacgaccaccatccagcctgggcagatcatcatcgcacagcctcagcagggccagaccacacctgtgacaatgcaggttggagaaggtcagcaggtgcagattgtccaggctcagccacagggtcaagcccaacaggcccagagtggcactggacagaccatgcaggtgatgcagcagatcatcactaacacaggagagatccagcagatcccggtgcagctgaatgccggccagctgcagtatatccgcttagcccagcctgtatcaggcactcaagttgtgcagggacagatccagacacttgccaccaatgctcaacaggggcaaagaaatgcaagtcaggggaagcctcgaaggtgcctgaaagaaaccttacagattacacagacagaggtccagcaaggacagcagcagttcagccagttcacagatggacagaggaacagcgtgcagcaagctcgagtctctgagctaacgggagaggcagagcccagagaagtgaaagccacaggaaattcaactccctgcacctcttccctgcccaccacacaccccccctcacaccgggctggtgcctcctgtgtctgctgctcccaaccccagcagagctccacttcccctcctccttctgacgccttgcagtgggtggtggttgaggtatctgggacccccaaccagctcgagacccatagggagctgcatgcccctctcccagggatgacctcactctctcctctccacccctcgcagcagctctaccagatccagcaagtcaccatgcctgcgggccaggacctcgcccagcccatgttcatccagtcagccaaccagccctccgacgggcaggccccccaggtgaccggcgac

SEQ ID NO: 4007 - DNA, 1317 bp, Homo sapiens
  source 1..1317: mol_type = genomic DNA
atgtccacagaaggaggatttggtggtactagcagcagtgatgcccagcaaagcctacagtcgttctggcctcgggtcatggaagaaatccggaatttaacagtgaaagacttccgagtgcaggaactcccactggctcgtattaagaagattatgaaactggatgaagatgtgaagatgatcagtgcagaagcgcctgtactctttgccaaggcagcccagatttttatcacagagttgactcttcgagcctggattcacacagaagataacaagcgccggactctacagagaaatgatatcgccatggcaattacaaaatttgatcagtttgattttctcatcgatattgttccaagagatgaactgaaacctccaaagcgtcaggaggaggtgcgccagtctgtaactcctgccgagccagtccagtactatttcacgctggctcagcaacccaccgctgtccaagtccagggccagcagcaaggccagcagaccaccagctccacgaccaccatccagcctgggcagatcatcatcgcacagcctcagcagggccagaccacacctgtgacaatgcaggttggagaaggtcagcaggtgcagattgtccaggctcagccacagggtcaagcccaacaggcccagagtggcactggacagaccatgcaggtgatgcagcagatcatcactaacacaggagagatccagcagatcccggtgcagctgaatgccggccagctgcagtatatccgcttagcccagcctgtatcaggcactcaagttgtgcagggacagatccagacacttgccaccaatgctcaacagattacacagacagaggtccagcaaggacagcagcagttcagccagttcacagatggacagaggaacagcgtgcagcaagctcgagtctctgagctaacgggagaggcagagcccagagaagtgaaagccacaggaaattcaactccctgcacctcttccctgcccaccacacaccccccctcacaccgggctggtgcctcctgtgtctgctgctcccaaccccagcagagctccacttcccctcctccttctgacgccttgcagtgggtggtggttgaggtatctgggacccccaaccagctcgagacccatagggagctgcatgcccctctcccagggatgacctcactctctcctctccacccctcgcagcagctctaccagatccagcaagtcaccatgcctgcgggccaggacctcgcccagcccatgttcatccagtcagccaaccagccctccgacgggcaggccccccaggtgaccggcgac

SEQ ID NO: 4008 - DNA, 891 bp, Homo sapiens
  source 1..891: mol_type = genomic DNA
atgtccacagaaggaggatttggtggtactagcagcagtgatgcccagcaaagcctacagtcgttctggcctcgggtcatggaagaaatccggaatttaacagtgaaagacttccgagtgcaggaactcccactggctcgtattaagaagattatgaaactggatgaagatgtgaagagaaatgatatcgccatggcaattacaaaatttgatcagtttgattttctcatcgatattgttccaagagatgaactgaaacctccaaagcgtcaggaggaggtgcgccagtctgtaactcctgccgagccagtccagtactatttcacgctggctcagcaacccaccgctgtccaagtccagggccagcagcaaggccagcagaccaccagctccacgaccaccatccagcctgggcagatcatcatcgcacagcctcagcagggccagaccacacctgtgacaatgcaggttggagaaggtcagcaggtgcagattgtccaggctcagccacagggtcaagcccaacaggcccagagtggcactggacagaccatgcaggtgatgcagcagatcatcactaacacaggagagatccagcagatcccggtgcagctgaatgccggccagctgcagtatatccgcttagcccagcctgtatcaggcactcaagttgtgcagggacagatccagacacttgccaccaatgctcaacagattacacagacagaggtccagcaaggacagcagcagttcagccagttcacagatggacagcagctctaccagatccagcaagtcaccatgcctgcgggccaggacctcgcccagcccatgttcatccagtcagccaaccagccctccgacgggcaggccccccaggtgaccggcgac

SEQ ID NO: 4009 - DNA, 1002 bp, Homo sapiens
  source 1..1002: mol_type = genomic DNA
atgtccacagaaggaggatttggtggtactagcagcagtgatgcccagcaaagcctacagtcgttctggcctcgggtcatggaagaaatccggaatttaacagtgaaagacttccgagtgcaggaactcccactggctcgtattaagaagattatgaaactggatgaagatgtgaagatgatcagtgcagaagcgcctgtactctttgccaaggcagcccagatttttatcacagagttgactcttcgagcctggattcacacagaagataacaagcgccggactctacagagaaatgatatcgccatggcaattacaaaatttgatcagtttgattttctcatcgatattgttccaagagatgaactgaaacctccaaagcgtcaggaggaggtgcgccagtctgtaactcctgccgagccagtccagtactatttcacgctggctcagcaacccaccgctgtccaagtccagggccagcagcaaggccagcagaccaccagctccacgaccaccatccagcctgggcagatcatcatcgcacagcctcagcagggccagaccacacctgtgacaatgcaggttggagaaggtcagcaggtgcagattgtccaggctcagccacagggtcaagcccaacaggcccagagtggcactggacagaccatgcaggtgatgcagcagatcatcactaacacaggagagatccagcagatcccggtgcagctgaatgccggccagctgcagtatatccgcttagcccagcctgtatcaggcactcaagttgtgcagggacagatccagacacttgccaccaatgctcaacagattacacagacagaggtccagcaaggacagcagcagttcagccagttcacagatggacagctctaccagatccagcaagtcaccatgcctgcgggccaggacctcgcccagcccatgttcatccagtcagccaaccagccctccgacgggcaggccccccaggtgaccggcgac

SEQ ID NO: 4010 - DNA, 1062 bp, Homo sapiens
  source 1..1062: mol_type = genomic DNA
atgtccacagaaggaggatttggtggtactagcagcagtgatgcccagcaaagcctacagtcgttctggcctcgggtcatggaagaaatccggaatttaacagtgaaagacttccgagtgcaggaactcccactggctcgtattaagaagattatgaaactggatgaagatgtgaagatgatcagtgcagaagcgcctgtactctttgccaaggcagcccagatttttatcacagagttgactcttcgagcctggattcacacagaagataacaagcgccggactctacagagaaatgatatcgccatggcaattacaaaatttgatcagtttgattttctcatcgatattgttccaagagatgaactgaaacctccaaagcgtcaggaggaggtgcgccagtctgtaactcctgccgagccagtccagtactatttcacgctggctcagcaacccaccgctgtccaagtccagggccagcagcaaggccagcagaccaccagctccacgaccaccatccagcctgggcagatcatcatcgcacagcctcagcagggccagaccacacctgtgacaatgcaggttggagaaggtcagcaggtgcagattgtccaggctcagccacagggtcaagcccaacaggcccagagtggcactggacagaccatgcaggtgatgcagcagatcatcactaacacaggagagatccagcagatcccggtgcagctgaatgccggccagctgcagtatatccgcttagcccagcctgtatcaggcactcaagttgtgcagggacagatccagacacttgccaccaatgctcaacaggggcaaagaaatgcaagtcaggggaagcctcgaaggtgcctgaaagaaaccttacagattacacagacagaggtccagcaaggacagcagcagttcagccagttcacagatggacagcagctctaccagatccagcaagtcaccatgcctgcgggccaggacctcgcccagcccatgttcatccagtcagccaaccagccctccgacgggcaggccccccaggtgaccggcgac

SEQ ID NO: 4011 - DNA, 903 bp, Homo sapiens
  source 1..903: mol_type = genomic DNA
atgtccacagaaggaggatttggtggtactagcagcagtgatgcccagcaaagcctacagtcgttctggcctcgggtcatggaagaaatccggaatttaacagtgaaagacttccgagtgcaggaactcccactggctcgtattaagaagattatgaaactggatgaagatgtgaagatgatcagtgcagaagcgcctgtactctttgccaaggcagcccagatttttatcacagagttgactcttcgagcctggattcacacagaagataacaagcgccggactctacagagaaatgatatcgccatggcaattacaaaatttgatcagtttgattttctcatcgatattgttccaagagatgaactgaaacctccaaagcgtcaggaggaggtgcgccagtctgtaactcctgccgagccagtccagtactatttcacgctggctcagcaacccaccgctgtccaagtccagggccagcagcaaggccagcagaccaccagctccacgaccaccatccagcctgggcagatcatcatcgcacagcctcagcagggccagaccatgcaggtgatgcagcagatcatcactaacacaggagagatccagcagatcccggtgcagctgaatgccggccagctgcagtatatccgcttagcccagcctgtatcaggcactcaagttgtgcagggacagatccagacacttgccaccaatgctcaacagattacacagacagaggtccagcaaggacagcagcagttcagccagttcacagatggacagcagctctaccagatccagcaagtcaccatgcctgcgggccaggacctcgcccagcccatgttcatccagtcagccaaccagccctccgacgggcaggccccccaggtgaccggcgac

SEQ ID NO: 4012 - DNA, 621 bp, Homo sapiens
  source 1..621: mol_type = genomic DNA
atgacaatggatggtgacagttctacaacagatgcttctcaactaggaatctctgcagactatattggaggaagtcattatgttatacagcctcatgatgatactgaggacagcatgaatgatcatgaagacacaaatggttcaaaagaaagtttcagagaacaagatatatatcttccaatagcaaacgtggctaggataatgaaaaatgccatacctcaaacgggaaagattgcaaaagatgccaaagaatgtgttcaagaatgtgtaagtgagttcatcagttttataacatctgaagcaagtgaaaggtgccatcaagagaaacggaaaacaatcaatggagaagatattctctttgctatgtctactttaggctttgacagttatgtggaacctctgaaattataccttcagaaattcagagaggctatgaaaggagaaaagggaattggtggagcagtcacagctacagatggactaagtgaagagcttacagaggaggcatttactaaccagttaccagctggcttaataaccacagacggtcaacaacaaaatgttatggtttacacaacatcatatcaacagatttctggtgttcagcaaattcagttttca

SEQ ID NO: 4013 - DNA, 1041 bp, Homo sapiens
  source 1..1041: mol_type = genomic DNA
atggagcagtatacagcaaacagcaatagttcgacagagcagattgttgtccaggcaggacagattcagcagcagcagcagggtggtgtcactgctgtgcagttgcagactgaggcccaggtggcatccgcctcaggccagcaagtccagaccctccaggtagtccaagggcagccattaatggtgcaggtcagtggaggccagctaatcacatcaactggccaacccatcatggtccaggctgtccctggtggacaaggtcaaaccatcatgcaagtacctgtttctggaacacagggtttgcagcaaatacagttggtcccacctggacagatccagatccagggtggacaggctgtgcaggtgcagggccagcagggccagacccagcagatcatcatccagcagccccagacggctgtcactgctggccagactcagacacagcagcagattgctgtccagggacagcaagtggcacagactgctgaagggcagaccatcgtctatcaaccagttaatgcagatggcaccattctccagcaagttacagtccctgtttcaggcatgatcactatcccagcagccagtttggcaggagcacagattgttcaaacaggagccaataccaacacaaccagcagtgggcaagggactgtcactgtgacactaccagtggcaggcaatgtggtcaattcaggagggatggtcatgatggttcctggggctggctctgtgcctgctatccaaagaatccctctacctggagcagagatgcttgaagaagagcctctctacgtgaatgccaaacaataccaccgtattcttaagaggaggcaagcccgagctaaactagaggcagaagggaaaattccaaaggagagaaggaaatacctgcatgagtctcggcaccgtcatgccatggcacggaagcgtggtgaaggtggacgatttttctctccaaaggaaaaggatagtccccatatgcaggatccaaaccaagccgatgaagaagcaatgacacagatcatccgagtgtcc

SEQ ID NO: 4014 - DNA, 954 bp, Homo sapiens
  source 1..954: mol_type = genomic DNA
atggagcagtatacagcaaacagcaatagttcgacagagcagattgttgtccaggcaggacagattcagcagcaggtccaagggcagccattaatggtgcaggtcagtggaggccagctaatcacatcaactggccaacccatcatggtccaggctgtccctggtggacaaggtcaaaccatcatgcaagtacctgtttctggaacacagggtttgcagcaaatacagttggtcccacctggacagatccagatccagggtggacaggctgtgcaggtgcagggccagcagggccagacccagcagatcatcatccagcagccccagacggctgtcactgctggccagactcagacacagcagcagattgctgtccagggacagcaagtggcacagactgctgaagggcagaccatcgtctatcaaccagttaatgcagatggcaccattctccagcaagttacagtccctgtttcaggcatgatcactatcccagcagccagtttggcaggagcacagattgttcaaacaggagccaataccaacacaaccagcagtgggcaagggactgtcactgtgacactaccagtggcaggcaatgtggtcaattcaggagggatggtcatgatggttcctggggctggctctgtgcctgctatccaaagaatccctctacctggagcagagatgcttgaagaagagcctctctacgtgaatgccaaacaataccaccgtattcttaagaggaggcaagcccgagctaaactagaggcagaagggaaaattccaaaggagagaaggaaatacctgcatgagtctcggcaccgtcatgccatggcacggaagcgtggtgaaggtggacgatttttctctccaaaggaaaaggatagtccccatatgcaggatccaaaccaagccgatgaagaagcaatgacacagatcatccgagtgtcc

SEQ ID NO: 4015 - DNA, 2256 bp, Homo sapiens
  source 1..2256: mol_type = genomic DNA
atggcgaagaggtcgcgcagtgaggatgaggatgatgaccttcagtatgccgatcatgattatgaagtaccacaacaaaaaggactgaagaaactctggaacagagtaaaatggacaagggacgaggatgataaattaaagaagttggttgaacaacatggaactgatgattggactctaattgctagtcatcttcaaaatcgctctgattttcagtgccagcatcgatggcagaaagttttaaatcctgaattgataaagggtccttggactaaagaagaagatcagagggttattgaattagttcagaaatatgggccaaaaagatggtctttaattgcaaaacatttaaaaggaagaataggcaagcagtgtagagaaagatggcataatcatctgaatcctgaggtaaagaaatcttcctggacagaagaggaggacaggatcatctatgaagcacataagcggttgggaaatcgttgggcagaaattgccaaactacttccaggaaggactgataattctatcaaaaatcattggaattctactatgcgaagaaaagtggaacaggagggctatttacaagatggaataaaatcagaacgatcttcatctaaacttcaacacaaaccttgtgcagctatggatcatatgcaaacccagaatcagttttacatacctgttcagatccctgggtatcagtatgtgtcacctgaaggcaattgtatagaacatgttcagcctacttctgcctttattcagcaacccttcattgatgaagatcctgataaggaaaagaaaataaaggaacttgagatgcttcttatgtcagctgagaatgaagttagaagaaagcgaattccatcacagcctggaagtttttctagctggtctggtagtttcctcatggatgataacatgtctaatactctaaatagccttgacgagcacactagtgagttttacagtatggatgaaaatcagcctgtgtctgctcagcagaattcacccacaaagttcctggccgtggaggcaaacgctgtgttatcctctttgcagaccatcccagaatttgcagagactctagaacttattgaatctgatcctgtagcatggagtgacgttaccagttttgatatttctgatgctgctgcttctcctatcaaatccaccccagttaaattaatgagaattcagcacaatgaaggagccatggaatgccaatttaacgtcagtcttgtacttgaagggaaaaaaaacacttgtaatggtggcaacagtgaagctgttcctttaacatccccaaatatagccaagtttagcactccaccagccatcctcagaaagaagagaaaaatgcgagtgggtcattccccaggcagcgaacttagggatggctcattgaacgatggtggtaatatggcgctaaaacatacaccactgaaaacactaccattttctccttcacagtttttcaacacatgtcctggtaatgaacaacttaatatagaaaatccttcatttacatcaacccctatttgtgggcagaaagctctcattacaactcctcttcataaggaaacaactcccaaagatcaaaaggaaaatgtagggtttagaacacctactattagaagatctatactgggtaccacaccaagaactcctactccttttaagaatgcgcttgctgctcaggagaaaaaatatggacctcttaaaattgtgtcccagccacttgctttcttggaagaagatattcgggaagttttaaaagaagaaactggaacagacctattcctcaaagaggaagatgaacctgcttacaaaagctgcaaacaagagaataccgcttctgggaagaaagtcagaaaatcactagtcttagataattgggaaaaagaagaatcaggcactcaactgttgactgaagacatttcagacatgcagtcagaaaatagatttactacatccttattaatgataccattattggaaatacatgacaataggtgcaacttgattcctgaaaaacaagatataaattcaaccaacaaaacatatacacttactaaaaagaaaccaaaccctaacacttccaaagttgtcaaattggaaaagaatcttcagtcaaattgtgaatgggaaacagtggtttatgggaagacagaagaccaacttattatgactgaacaagcaagaagatatctgagtacttacacagctaccagtagtacttcaagagctctcatactg

SEQ ID NO: 4016 - DNA, 3174 bp, Homo sapiens
  source 1..3174: mol_type = genomic DNA
atggagcaggacactgccgcagtggcagccaccgtggcagccgcggatgcgaccgccactatcgtggtcatagaggacgagcagcccgggccgtccacctctcaggaggagggagcggccgccgcggccaccgaagccaccgcggccacggagaagggcgagaagaagaaggagaaaaacgtttcttcatttcaactcaaacttgctgctaaagcgcctaaatctgaaaaggaaatggacccagaatatgaagagaaaatgaaagccgaccgagcaaagagatttgaatttttactgaagcagacagaactttttgcacatttcattcagccttcagcacagaaatctccaacatctccactgaacatgaaattgggacgtccccgaataaagaaagatgaaaagcagagcttaatttctgctggagactaccgccataggcgcacagagcaagaagaagatgaagagctactgtctgagagtcggaaaacatctaatgtgtgtattagatttgaggtgtcaccttcatatgtgaaaggggggccactgagagattatcagattcgaggactgaattggttgatctctttatatgaaaatggagtcaatggcattttggctgatgaaatgggccttgggaaaactttacaaacaattgctttgcttggttacctgaaacactaccgaaatattcctggacctcacatggttttagttccaaagtctactttacacaactggatgaatgaatttaaacgatgggtcccatctctccgtgtcatttgttttgtcggagacaaggatgccagagctgcttttattcgtgatgaaatgatgccaggagagtgggatgtttgcgttacttcttatgagatggtaattaaagaaaaatctgtattcaaaaagtttcactggcgatacctggtcattgatgaagctcacagaataaagaatgaaaaatctaagctttcagagattgttcgtgagttcaagtcgactaaccgcttgctcctaactggaacacctttgcagaataacctgcatgaactgtgggccttactcaactttttattgcctgatgtctttaattctgcagatgactttgattcttggtttgacactaaaaattgtcttggtgatcaaaaactcgtggaaagacttcatgcagttttaaaaccatttttgttacgccgtataaaaactgatgtagagaagagtctgccacctaaaaaggaaataaagatttacttggggctgagtaagatgcaacgagaatggtatacaaaaatcctgatgaaagatattgatgttttaaactcttctggcaagatggacaagatgcgactcttaaacattctgatgcagcttcgaaagtgttgtaatcatccatatctgtttgatggtgctgaacctggtccaccttataccactgatgagcatattgtcagcaacagtggtaaaatggtagttctggataaactattggccaaactcaaagaacagggttcaagggttctcattttcagccagatgactcgcttgctggatattttggaagattattgcatgtggcgtggttatgagtattgtcgactggatggacaaaccccgcatgaagaaagagaggaagcaatagaggcttttaatgctcctaatagtagcaaattcatctttatgctaagtaccagggctggaggtctcggaattaacctggcaagtgctgatgtggttatactatatgattcagactggaacccacaggttgatctacaagctatggatcgagcacatcgtattggtcagaagaaaccagtacgtgtattccgtctcatcactgacaacactgttgaagagaggattgtagaaagagctgagataaaactgagactcgattcaattgttatacaacaaggaagactcattgaccaacagtctaacaagctggcaaaagaggaaatgttacaaatgatacggcatggagccacccatgtttttgcttctaaagagagtgagttgacagatgaagacattacaactattctggaaagaggggaaaagaagactgcagagatgaatgaacgcctgcaaaaaatgggagagtcttctctaagaaattttagaatggacattgaacaaagtttatacaaatttgagggagaagattatagagaaaaacagaagcttggcatggtggaatggattgaacctcctaaacgagaacgcaaagcaaactacgcagtggatgcctactttagagaggctttgcgtgtcagcgagccaaagattccaaaggctccacggcctccaaaacagccaaatgttcaggattttcaatttttcccaccacgcttatttgagctcctggaaaaggaaattctttattatcggaagacaataggctataaggttccaaggaatcctgatatcccaaatccagctctggctcaaagagaagagcaaaaaaagattgatggagctgaacctcttacaccagaagagactgaagaaaaggaaaaacttctcacacaaggtttcacaaactggactaaacgagattttaaccagtttattaaagctaatgagaaatatggaagagatgacattgataacatagctcgagaggtagagggcaaatcccctgaggaggtcatggagtattcagctgtattttgggaacgttgcaatgaattacaggacattgagaaaattatggctcaaattgaacgtggagaagcaagaattcaacgaaggatcagtatcaagaaagccctggatgccaaaattgcaagatacaaggctccatttcatcagttgcgcattcagtatggaaccagcaaaggaaagaactatactgaggaagaagatagattcttgatttgtatgttacacaaaatgggctttgatagagaaaatgtatatgaagaattaagacagtgtgtacgaaatgctccccagtttagatttgactggtttatcaagtctaggactgccatggaattccagagacgctgtaacactctgatttcattgattgagaaagaaaatatggaaattgaggaaagagagagagcagaaaagaagaaacgggcaactaaaactccaatgtcacagaaaagaaaagcagagtcagctactgagagctctggaaagaaggatgtcaagaaggtgaaatcc

SEQ ID NO: 4017 - DNA, 3210 bp, Homo sapiens
  source 1..3210: mol_type = genomic DNA
atggagcaggacactgccgcagtggcagccaccgtggcagccgcggatgcgaccgccactatcgtggtcatagaggacgagcagcccgggccgtccacctctcaggaggagggagcggccgccgcggccaccgaagccaccgcggccacggagaagggcgagaagaagaaggagaaaaacgtttcttcatttcaactcaaacttgctgctaaagcgcctaaatctgaaaaggaaatggacccagaatatgaagagaaaatgaaagccgaccgagcaaagagatttgaatttttactgaagcagacagaactttttgcacatttcattcagccttcagcacagaaatctccaacatctccactgaacatgaaattgggacgtccccgaataaagaaagatgaaaagcagagcttaatttctgctggagactaccgccataggcgcacagagcaagaagaagatgaagagctactgtctgagagtcggaaaacatctaatgtgtgtattagatttgaggtgtcaccttcatatgtgaaaggggggccactgagagattatcagattcgaggactgaattggttgatctctttatatgaaaatggagtcaatggcattttggctgatgaaatgggccttgggaaaactttacaaacaattgctttgcttggttacctgaaacactaccgaaatattcctggacctcacatggttttagttccaaagtctactttacacaactggatgaatgaatttaaacgatgggtcccatctctccgtgtcatttgttttgtcggagacaaggatgccagagctgcttttattcgtgatgaaatgatgccaggagagtgggatgtttgcgttacttcttatgagatggtaattaaagaaaaatctgtattcaaaaagtttcactggcgatacctggtcattgatgaagctcacagaataaagaatgaaaaatctaagctttcagagattgttcgtgagttcaagtcgactaaccgcttgctcctaactggaacacctttgcagaataacctgcatgaactgtgggccttactcaactttttattgcctgatgtctttaattctgcagatgactttgattcttggtttgacactaaaaattgtcttggtgatcaaaaactcgtggaaagacttcatgcagttttaaaaccatttttgttacgccgtataaaaactgatgtagagaagagtctgccacctaaaaaggaaataaagatttacttggggctgagtaagatgcaacgagaatggtatacaaaaatcctgatgaaagatattgatgttttaaactcttctggcaagatggacaagatgcgactcttaaacattctgatgcagcttcgaaagtgttgtaatcatccatatctgtttgatggtgctgaacctggtccaccttataccactgatgagcatattgtcagcaacagtggtaaaatggtagttctggataaactattggccaaactcaaagaacagggttcaagggttctcattttcagccagatgactcgcttgctggatattttggaagattattgcatgtggcgtggttatgagtattgtcgactggatggacaaaccccgcatgaagaaagagaggataaattcctagaagtggaatttctgggtcaaagggaagcaatagaggcttttaatgctcctaatagtagcaaattcatctttatgctaagtaccagggctggaggtctcggaattaacctggcaagtgctgatgtggttatactatatgattcagactggaacccacaggttgatctacaagctatggatcgagcacatcgtattggtcagaagaaaccagtacgtgtattccgtctcatcactgacaacactgttgaagagaggattgtagaaagagctgagataaaactgagactcgattcaattgttatacaacaaggaagactcattgaccaacagtctaacaagctggcaaaagaggaaatgttacaaatgatacggcatggagccacccatgtttttgcttctaaagagagtgagttgacagatgaagacattacaactattctggaaagaggggaaaagaagactgcagagatgaatgaacgcctgcaaaaaatgggagagtcttctctaagaaattttagaatggacattgaacaaagtttatacaaatttgagggagaagattatagagaaaaacagaagcttggcatggtggaatggattgaacctcctaaacgagaacgcaaagcaaactacgcagtggatgcctactttagagaggctttgcgtgtcagcgagccaaagattccaaaggctccacggcctccaaaacagccaaatgttcaggattttcaatttttcccaccacgcttatttgagctcctggaaaaggaaattctttattatcggaagacaataggctataaggttccaaggaatcctgatatcccaaatccagctctggctcaaagagaagagcaaaaaaagattgatggagctgaacctcttacaccagaagagactgaagaaaaggaaaaacttctcacacaaggtttcacaaactggactaaacgagattttaaccagtttattaaagctaatgagaaatatggaagagatgacattgataacatagctcgagaggtagagggcaaatcccctgaggaggtcatggagtattcagctgtattttgggaacgttgcaatgaattacaggacattgagaaaattatggctcaaattgaacgtggagaagcaagaattcaacgaaggatcagtatcaagaaagccctggatgccaaaattgcaagatacaaggctccatttcatcagttgcgcattcagtatggaaccagcaaaggaaagaactatactgaggaagaagatagattcttgatttgtatgttacacaaaatgggctttgatagagaaaatgtatatgaagaattaagacagtgtgtacgaaatgctccccagtttagatttgactggtttatcaagtctaggactgccatggaattccagagacgctgtaacactctgatttcattgattgagaaagaaaatatggaaattgaggaaagagagagagcagaaaagaagaaacgggcaactaaaactccaatgtcacagaaaagaaaagcagagtcagctactgagagctctggaaagaaggatgtcaagaaggtgaaatcc

SEQ ID NO: 4018 - DNA, 3162 bp, Homo sapiens
  source 1..3162: mol_type = genomic DNA
atggagcaggacactgccgcagtggcagccaccgtggcagccgcggatgcgaccgccactatcgtggtcatagaggacgagcagcccgggccgtccacctctcaggaggagggagcggccgccgcggccaccgaagccaccgcggccacggagaagggcgagaagaagaaggagaaaaacgtttcttcatttcaactcaaacttgctgctaaagcgcctaaatctgaaaaggaaatggacccagaatatgaagagaaaatgaaagccgaccgagcaaagagatttgaatttttactgaagcagacagaactttttgcacatttcattcagccttcagcacagaaatctccaacatctccactgaacatgaaattgggacgtccccgaataaagaaagatgaaaagcagagcttaatttctgctggagactaccgccataggcgcacagagcaagaagaagatgaagagctactgtctgagagtcggaaaacatctaatgtgtgtattagatttgaggtgtcaccttcatatgtgaaaggggggccactgagagattatcagattcgaggactgaattggttgatctctttatatgaaaatggagtcaatggcattttggctgatgaaatgggccttgggaaaactttacaaacaattgctttgcttggttacctgaaacactaccgaaatattcctggacctcacatggttttagttccaaagtctactttacacaactggatgaatgaatttaaacgatgggtcccatctctccgtgtcatttgttttgtcggagacaaggatgccagagctgcttttattcgtgatgaaatgatgccaggagagtgggatgtttgcgttacttcttatgagatggtaattaaagaaaaatctgtattcaaaaagtttcactggcgatacctggtcattgatgaagctcacagaataaagaatgaaaaatctaagctttcagagattgttcgtgagttcaagtcgactaaccgcttgctcctaactggaacacctttgcagaataacctgcatgaactgtgggccttactcaactttttattgcctgatgtctttaattctgcagatgactttgattcttggtttgacactaaaaattgtcttggtgatcaaaaactcgtggaaagacttcatgcagttttaaaaccatttttgttacgccgtataaaaactgatgtagagaagagtctgccacctaaaaaggaaataaagatttacttggggctgagtaagatgcaacgagaatggtatacaaaaatcctgatgaaagatattgatgttttaaactcttctggcaagatggacaagatgcgactcttaaacattctgatgcagcttcgaaagtgttgtaatcatccatatctgtttgatggtgctgaacctggtccaccttataccactgatgagcatattgtcagcaacagtggtaaaatggtagttctggataaactattggccaaactcaaagaacagggttcaagggttctcattttcagccagatgactcgcttgctggatattttggaagattattgcatgtggcgtggttatgagtattgtcgactggatggacaaaccccgcatgaagaaagagaggataaattcctagaagtggaatttctgggtcaaagggaagcaatagaggcttttaatgctcctaatagtagcaaattcatctttatgctaagtaccagggctggaggtctcggaattaacctggcaagtgctgatgtggttatactatatgattcagactggaacccacaggttgatctacaagctatggatcgagcacatcgtattggtcagaagaaaccagtacgtgtattccgtctcatcactgacaacactgttgaagagaggattgtagaaagagctgagataaaactgagactcgattcaattgttatacaacaaggaagactcattgaccaacagtctaacaagctggcaaaagaggaaatgttacaaatgatacggcatggagccacccatgtttttgcttctaaagagagtgagttgacagatgaagacattacaactattctggaaagaggggaaaagaagactgcagagatgaatgaacgcctgcaaaaaatgggagagtcttctctaagaaattttagaatggacattgaacaaagtttatacaaatttgagggagaagattatagagaaaaacagaagcttggcatggtggaatggattgaacctcctaaacgagaacgcaaagcaaactacgcagtggatgcctactttagagaggctttgcgtgtcagcgagccaaagattccaaaggctccacggcctccaaaacagccaaatgttcaggattttcaatttttcccaccacgcttatttgagctcctggaaaaggaaattctttattatcggaagacaataggctataaggttccaaggaatcctgatatcccaaatccagctctggctcaaagagaagagcaaaaaaagattgatggagctgaacctcttacaccagaagagactgaagaaaaggaaaaacttctcacacaaggtttcacaaactggactaaacgagattttaaccagtttattaaagctaatgagaaatatggaagagatgacattgataacatagctcgagaggtagagggcaaatcccctgaggaggtcatggagtattcagctgtattttgggaacgttgcaatgaattacaggacattgagaaaattatggctcaaattgaacgtggagaagcaagaattcaacgaaggatcagtatcaagaaagccctggatgccaaaattgcaagatacaaggctccatttcatcagttgcgcattcagtatggaaccagcaaaggaaagaactatactgaggaagaagatagattcttgatttgtatgttacacaaaatgggctttgatagagaaaatgtatatgaagaattaagacagtgtgtacgaaatgctccccagtttagatttgactggtttatcaagtctaggactgccatggaattccagagacgctgtaacactctgatttcattgattgagaaagaaaatatggaaattgaggaaagagagagagcagaaaagaagaaacgggcaactaaaactccaatggtaaaattttcagcattttcc

SEQ ID NO: 4019 - DNA, 834 bp, Homo sapiens
  source 1..834: mol_type = genomic DNA
atgctgatgaagagactagcagctcgctgctttgctggcttgttaattttatccccactaactgtgatttctgatagccggcctgctgatagtggtaaggccatcgaagacggcaatttggaggaaatggaagaggaagtacggcttaagaagcgaaaaagacgaagaaatgtggataaagatcctgcaaaagaagatgtggaaaaagctaagaagagaagaggccgccctcccgctgagaaactgtcaccaaatccccccaaactgacaaagcagatgaacgctatcatcgatactgtgataaactacaaagatagttcagggcgacagctcagtgaagtcttcattcagttaccttcaaggaaagaattaccagaatactatgaattaattaggaagccagtggatttcaaaaaaataaaggaaaggattcgtaatcataagtaccggagcctaggcgacctggagaaggatgtcatgcttctctgtcacaacgctcagacgttcaacctggagggatcccagatctatgaagactccatcgtcttacagtcagtgtttaagagtgcccggcagaaaattgccaaagaggaagagagtgaggatgaaagcaatgaagaggaggaagaggaagatgaagaagagtcagagtccgaggcaaaatcagtcaaggtgaaaattaagctcaataaaaaagatgacaaaggccgggacaaagggaaaggcaagaaaaggccaaatcgaggaaaagccaaacctgtagtgagcgattttgacagcgatgaggagcaggatgaacgtgaacagtcagaaggaagtgggacggatgatgag

SEQ ID NO: 4020 - DNA, 828 bp, Homo sapiens
  source 1..828: mol_type = genomic DNA
atgaagagactagcagctcgctgctttgctggcttgttaattttatccccactaactgtgatttctgatagccggcctgctgatagtggtaaggccatcgaagacggcaatttggaggaaatggaagaggaagtacggcttaagaagcgaaaaagacgaagaaatgtggataaagatcctgcaaaagaagatgtggaaaaagctaagaagagaagaggccgccctcccgctgagaaactgtcaccaaatccccccaaactgacaaagcagatgaacgctatcatcgatactgtgataaactacaaagatagttcagggcgacagctcagtgaagtcttcattcagttaccttcaaggaaagaattaccagaatactatgaattaattaggaagccagtggatttcaaaaaaataaaggaaaggattcgtaatcataagtaccggagcctaggcgacctggagaaggatgtcatgcttctctgtcacaacgctcagacgttcaacctggagggatcccagatctatgaagactccatcgtcttacagtcagtgtttaagagtgcccggcagaaaattgccaaagaggaagagagtgaggatgaaagcaatgaagaggaggaagaggaagatgaagaagagtcagagtccgaggcaaaatcagtcaaggtgaaaattaagctcaataaaaaagatgacaaaggccgggacaaagggaaaggcaagaaaaggccaaatcgaggaaaagccaaacctgtagtgagcgattttgacagcgatgaggagcaggatgaacgtgaacagtcagaaggaagtgggacggatgatgag

SEQ ID NO: 4021 - DNA, 4716 bp, Homo sapiens
  source 1..4716: mol_type = genomic DNA
atgtccacgcccacagaccctggtgcgatgccccacccagggccttcgccggggcctgggccttcccctgggccaattcttgggcctagtccaggaccaggaccatccccaggttccgtccacagcatgatggggccaagtcctggacctccaagtgtctcccatcctatgccgacgatggggtccacagacttcccacaggaaggcatgcatcaaatgcataagcccatcgatggtatacatgacaaggggattgtagaagacatccattgtggatccatgaagggcactggtatgcgaccacctcacccaggcatgggccctccccagagtccaatggatcaacacagccaaggttatatgtcaccacacccatctccattaggagccccagagcacgtctccagccctatgtctggaggaggcccaactccacctcagatgccaccaagccagccgggggccctcatcccaggtgatccgcaggccatgagccagcccaacagaggtccctcacctttcagtcctgtccagctgcatcagcttcgagctcagattttagcttataaaatgctggcccgaggccagcccctccccgaaacgctgcagcttgcagtccaggggaaaaggacgttgcctggcttgcagcaacaacagcagcagcaacagcagcagcagcagcagcagcagcagcagcagcagcagcaacagcagccgcagcagcagccgccgcaaccacagacgcagcaacaacagcagccggcccttgttaactacaacagaccatctggcccggggccggagctgagcggcccgagcaccccgcagaagctgccggtgcccgcgcccggcggccggccctcgcccgcgccccccgcagccgcgcagccgcccgcggccgcagtgcccgggccctcagtgccgcagccggccccggggcagccctcgcccgtcctccagctgcagcagaagcagagccgcatcagccccatccagaaaccgcaaggcctggaccccgtggaaattctgcaagagcgggaatacagacttcaggcccgcatagctcataggatacaagaactggaaaatctgcctggctctttgccaccagatttaagaaccaaagcaaccgtggaactaaaagcacttcggttactcaatttccagcgtcagctgagacaggaggtggtggcctgcatgcgcagggacacgaccctggagacggctctcaactccaaagcatacaaacggagcaagcgccagactctgagagaagctcgcatgaccgagaagctggagaagcagcagaagattgagcaggagaggaaacgccgtcagaaacaccaggaatacctgaacagtattttgcaacatgcaaaagattttaaggaatatcatcggtctgtggccggaaagatccagaagctctccaaagcagtggcaacttggcatgccaacactgaaagagagcagaagaaggagacagagcggattgaaaaggagagaatgcggcgactgatggctgaagatgaggagggttatagaaaactgattgatcaaaagaaagacaggcgtttagcttaccttttgcagcagaccgatgagtatgtagccaatctgaccaatctggtttgggagcacaagcaagcccaggcagccaaagagaagaagaagaggaggaggaggaagaagaaggctgaggagaatgcagagggtggggagtctgccctgggaccggatggagagcccatagatgagagcagccagatgagtgacctccctgtcaaagtgactcacacagaaaccggcaaggttctgttcggaccagaagcacccaaagcaagtcagctggacgcctggctggaaatgaatcctggttatgaagttgcccctagatctgacagtgaagagagtgattctgattatgaggaagaggatgaggaagaagagtccagtaggcaggaaaccgaagagaaaatactcctggatccaaatagcgaagaagtttctgagaaggatgctaagcagatcattgagacagctaagcaagacgtggatgatgaatacagcatgcagtacagtgccaggggctcccagtcctactacaccgtggctcatgccatctcggagagggtggagaaacagtctgccctcctaattaatgggaccctaaagcattaccagctccagggcctggaatggatggtttccctgtataataacaacttgaacggaatcttagccgatgaaatggggcttggaaagaccatacagaccattgcactcatcacttatctgatggagcacaaaagactcaatggcccctatctcatcattgttcccctttcgactctatctaactggacatatgaatttgacaaatgggctccttctgtggtgaagatttcttacaagggtactcctgccatgcgtcgctcccttgtcccccagctacggagtggcaaattcaatgtcctcttgactacttatgagtatattataaaagacaagcacattcttgcaaagattcggtggaaatacatgatagtggacgaaggccaccgaatgaagaatcaccactgcaagctgactcaggtcttgaacactcactatgtggcccccagaaggatcctcttgactgggaccccgctgcagaataagctccctgaactctgggccctcctcaacttcctcctcccaacaatttttaagagctgcagcacatttgaacaatggttcaatgctccatttgccatgactggtgaaagggtggacttaaatgaagaagaaactatattgatcatcaggcgtctacataaggtgttaagaccatttttactaaggagactgaagaaagaagttgaatcccagcttcccgaaaaagtggaatatgtgatcaagtgtgacatgtcagctctgcagaagattctgtatcgccatatgcaagccaaggggatccttctcacagatggttctgagaaagataagaaggggaaaggaggtgctaagacacttatgaacactattatgcagttgagaaaaatctgcaaccacccatatatgtttcagcacattgaggaatcctttgctgaacacctaggctattcaaatggggtcatcaatggggctgaactgtatcgggcctcagggaagtttgagctgcttgatcgtattctgccaaaattgagagcgactaatcaccgagtgctgcttttctgccagatgacatctctcatgaccatcatggaggattattttgcttttcggaacttcctttacctacgccttgatggcaccaccaagtctgaagatcgtgctgctttgctgaagaaattcaatgaacctggatcccagtatttcattttcttgctgagcacaagagctggtggcctgggcttaaatcttcaggcagctgatacagtggtcatctttgacagcgactggaatcctcatcaggatctgcaggcccaagaccgagctcaccgcatcgggcagcagaacgaggtccgggtactgaggctctgtaccgtgaacagcgtggaggaaaagatcctcgcggccgcaaaatacaagctgaacgtggatcagaaagtgatccaggcgggcatgtttgaccaaaagtcttcaagccacgagcggagggcattcctgcaggccatcttggagcatgaggaggaaaatgaggaagaagatgaagtaccggacgatgagactctgaaccaaatgattgctcgacgagaagaagaatttgacctttttatgcggatggacatggaccggcggagggaagatgcccggaacccgaaacggaagccccgtttaatggaggaggatgagctgccctcctggatcattaaggatgacgctgaagtagaaaggctcacctgtgaagaagaggaggagaaaatatttgggagggggtcccgccagcgccgtgacgtggactacagtgacgccctcacggagaagcagtggctaagggccatcgaagacggcaatttggaggaaatggaagaggaagtacggcttaagaagcgaaaaagacgaagaaatgtggataaagatcctgcaaaagaagatgtggaaaaagctaagaagagaagaggccgccctcccgctgagaaactgtcaccaaatccccccaaactgacaaagcagatgaacgctatcatcgatactgtgataaactacaaagatagttcagggcgacagctcagtgaagtcttcattcagttaccttcaaggaaagaattaccagaatactatgaattaattaggaagccagtggatttcaaaaaaataaaggaaaggattcgtaatcataagtaccggagcctaggcgacctggagaaggatgtcatgcttctctgtcacaacgctcagacgttcaacctggagggatcccagatctatgaagactccatcgtcttacagtcagtgtttaagagtgcccggcagaaaattgccaaagaggaagagagtgaggatgaaagcaatgaagaggaggaagaggaagatgaagaagagtcagagtccgaggcaaaatcagtcaaggtgaaaattaagctcaataaaaaagatgacaaaggccgggacaaagggaaaggcaagaaaaggccaaatcgaggaaaagccaaacctgtagtgagcgattttgacagcgatgaggagcaggatgaacgtgaacagtcagaaggaagtgggacggatgatgag

SEQ ID NO: 4022 - DNA, 4542 bp, Homo sapiens
  source 1..4542: mol_type = genomic DNA
atgtccacgcccacagaccctggtgcgatgccccacccagggccttcgccggggcctgggccttcccctgggccaattcttgggcctagtccaggaccaggaccatccccaggttccgtccacagcatgatggggccaagtcctggacctccaagtgtctcccatcctatgccgacgatggggtccacagacttcccacaggaaggcatgcatcaaatgcataagcccatcgatggtatacatgacaaggggattgtagaagacatccattgtggatccatgaagggcactggtatgcgaccacctcacccaggcatgggccctccccagagtccaatggatcaacacagccaaggttatatgtcaccacacccatctccattaggagccccagagcacgtctccagccctatgtctggaggaggcccaactccacctcagatgccaccaagccagccgggggccctcatcccaggtgatccgcaggccatgagccagcccaacagaggtccctcacctttcagtcctgtccagctgcatcagcttcgagctcagattttagcttataaaatgctggcccgaggccagcccctccccgaaacgctgcagcttgcagtccaggggaaaaggacgttgcctggcttgcagcaacaacagcagcagcaacagcagcagcagcagcagcagcagcagcagcagcagcagcaacagcagccgcagcagcagccgccgcaaccacagacgcagcaacaacagcagccggcccttgttaactacaacagaccatctggcccggggccggagctgagcggcccgagcaccccgcagaagctgccggtgcccgcgcccggcggccggccctcgcccgcgccccccgcagccgcgcagccgcccgcggccgcagtgcccgggccctcagtgccgcagccggccccggggcagccctcgcccgtcctccagctgcagcagaagcagagccgcatcagccccatccagaaaccgcaaggcctggaccccgtggaaattctgcaagagcgggaatacagacttcaggcccgcatagctcataggatacaagaactggaaaatctgcctggctctttgccaccagatttaagaaccaaagcaaccgtggaactaaaagcacttcggttactcaatttccagcgtcagctgagacaggaggtggtggcctgcatgcgcagggacacgaccctggagacggctctcaactccaaagcatacaaacggagcaagcgccagactctgagagaagctcgcatgaccgagaagctggagaagcagcagaagattgagcaggagaggaaacgccgtcagaaacaccaggaatacctgaacagtattttgcaacatgcaaaagattttaaggaatatcatcggtctgtggccggaaagatccagaagctctccaaagcagtggcaacttggcatgccaacactgaaagagagcagaagaaggagacagagcggattgaaaaggagagaatgcggcgactgatggctgaagatgaggagggttatagaaaactgattgatcaaaagaaagacaggcgtttagcttaccttttgcagcagaccgatgagtatgtagccaatctgaccaatctggtttgggagcacaagcaagcccaggcagccaaagagaagaagaagaggaggaggaggaagaagaaggctgaggagaatgcagagggtggggagtctgccctgggaccggatggagagcccatagatgagagcagccagatgagtgacctccctgtcaaagtgactcacacagaaaccggcaaggttctgttcggaccagaagcacccaaagcaagtcagctggacgcctggctggaaatgaatcctggttatgaagttgcccctagatctgacagtgaagagagtgattctgattatgaggaagaggatgaggaagaagagtccagtaggcaggaaaccgaagagaaaatactcctggatccaaatagcgaagaagtttctgagaaggatgctaagcagatcattgagacagctaagcaagacgtggatgatgaatacagcatgcagtacagtgccaggggctcccagtcctactacaccgtggctcatgccatctcggagagggtggagaaacagtctgccctcctaattaatgggaccctaaagcattaccagctccagggcctggaatggatggtttccctgtataataacaacttgaacggaatcttagccgatgaaatggggcttggaaagaccatacagaccattgcactcatcacttatctgatggagcacaaaagactcaatggcccctatctcatcattgttcccctttcgactctatctaactggacatatgaatttgacaaatgggctccttctgtggtgaagatttcttacaagggtactcctgccatgcgtcgctcccttgtcccccagctacggagtggcaaattcaatgtcctcttgactacttatgagtatattataaaagacaagcacattcttgcaaagattcggtggaaatacatgatagtggacgaaggccaccgaatgaagaatcaccactgcaagctgactcaggtggacttaaatgaagaagaaactatattgatcatcaggcgtctacataaggtgttaagaccatttttactaaggagactgaagaaagaagttgaatcccagcttcccgaaaaagtggaatatgtgatcaagtgtgacatgtcagctctgcagaagattctgtatcgccatatgcaagccaaggggatccttctcacagatggttctgagaaagataagaaggggaaaggaggtgctaagacacttatgaacactattatgcagttgagaaaaatctgcaaccacccatatatgtttcagcacattgaggaatcctttgctgaacacctaggctattcaaatggggtcatcaatggggctgaactgtatcgggcctcagggaagtttgagctgcttgatcgtattctgccaaaattgagagcgactaatcaccgagtgctgcttttctgccagatgacatctctcatgaccatcatggaggattattttgcttttcggaacttcctttacctacgccttgatggcaccaccaagtctgaagatcgtgctgctttgctgaagaaattcaatgaacctggatcccagtatttcattttcttgctgagcacaagagctggtggcctgggcttaaatcttcaggcagctgatacagtggtcatctttgacagcgactggaatcctcatcaggatctgcaggcccaagaccgagctcaccgcatcgggcagcagaacgaggtccgggtactgaggctctgtaccgtgaacagcgtggaggaaaagatcctcgcggccgcaaaatacaagctgaacgtggatcagaaagtgatccaggcgggcatgtttgaccaaaagtcttcaagccacgagcggagggcattcctgcaggccatcttggagcatgaggaggaaaatgaggaagaagatgaagtaccggacgatgagactctgaaccaaatgattgctcgacgagaagaagaatttgacctttttatgcggatggacatggaccggcggagggaagatgcccggaacccgaaacggaagccccgtttaatggaggaggatgagctgccctcctggatcattaaggatgacgctgaagtagaaaggctcacctgtgaagaagaggaggagaaaatatttgggagggggtcccgccagcgccgtgacgtggactacagtgacgccctcacggagaagcagtggctaagggccatcgaagacggcaatttggaggaaatggaagaggaagtacggcttaagaagcgaaaaagacgaagaaatgtggataaagatcctgcaaaagaagatgtggaaaaagctaagaagagaagaggccgccctcccgctgagaaactgtcaccaaatccccccaaactgacaaagcagatgaacgctatcatcgatactgtgataaactacaaagatagttcagggcgacagctcagtgaagtcttcattcagttaccttcaaggaaagaattaccagaatactatgaattaattaggaagccagtggatttcaaaaaaataaaggaaaggattcgtaatcataagtaccggagcctaggcgacctggagaaggatgtcatgcttctctgtcacaacgctcagacgttcaacctggagggatcccagatctatgaagactccatcgtcttacagtcagtgtttaagagtgcccggcagaaaattgccaaagaggaagagagtgaggatgaaagcaatgaagaggaggaagaggaagatgaagaagagtcagagtccgaggcaaaatcagtcaaggtgaaaattaagctcaataaaaaagatgacaaaggccgggacaaagggaaaggcaagaaaaggccaaatcgaggaaaagccaaacctgtagtgagcgattttgacagcgatgaggagcaggatgaacgtgaacagtcagaaggaagtgggacggatgatgag

SEQ ID NO: 4023 - DNA, 744 bp, Homo sapiens
  source 1..744: mol_type = genomic DNA
atgtggttggccatcgaagacggcaatttggaggaaatggaagaggaagtacggcttaagaagcgaaaaagacgaagaaatgtggataaagatcctgcaaaagaagatgtggaaaaagctaagaagagaagaggccgccctcccgctgagaaactgtcaccaaatccccccaaactgacaaagcagatgaacgctatcatcgatactgtgataaactacaaagatagttcagggcgacagctcagtgaagtcttcattcagttaccttcaaggaaagaattaccagaatactatgaattaattaggaagccagtggatttcaaaaaaataaaggaaaggattcgtaatcataagtaccggagcctaggcgacctggagaaggatgtcatgcttctctgtcacaacgctcagacgttcaacctggagggatcccagatctatgaagactccatcgtcttacagtcagtgtttaagagtgcccggcagaaaattgccaaagaggaagagagtgaggatgaaagcaatgaagaggaggaagaggaagatgaagaagagtcagagtccgaggcaaaatcagtcaaggtgaaaattaagctcaataaaaaagatgacaaaggccgggacaaagggaaaggcaagaaaaggccaaatcgaggaaaagccaaacctgtagtgagcgattttgacagcgatgaggagcaggatgaacgtgaacagtcagaaggaagtgggacggatgatgag

SEQ ID NO: 4024 - DNA, 4770 bp, Homo sapiens
  source 1..4770: mol_type = genomic DNA
atgtccacgcccacagaccctggtgcgatgccccacccagggccttcgccggggcctgggccttcccctgggccaattcttgggcctagtccaggaccaggaccatccccaggttccgtccacagcatgatggggccaagtcctggacctccaagtgtctcccatcctatgccgacgatggggtccacagacttcccacaggaaggcatgcatcaaatgcataagcccatcgatggtatacatgacaaggggattgtagaagacatccattgtggatccatgaagggcactggtatgcgaccacctcacccaggcatgggccctccccagagtccaatggatcaacacagccaaggttatatgtcaccacacccatctccattaggagccccagagcacgtctccagccctatgtctggaggaggcccaactccacctcagatgccaccaagccagccgggggccctcatcccaggtgatccgcaggccatgagccagcccaacagaggtccctcacctttcagtcctgtccagctgcatcagcttcgagctcagattttagcttataaaatgctggcccgaggccagcccctccccgaaacgctgcagcttgcagtccaggggaaaaggacgttgcctggcttgcagcaacaacagcagcagcaacagcagcagcagcagcagcagcagcagcagcagcagcagcaacagcagccgcagcagcagccgccgcaaccacagacgcagcaacaacagcagccggcccttgttaactacaacagaccatctggcccggggccggagctgagcggcccgagcaccccgcagaagctgccggtgcccgcgcccggcggccggccctcgcccgcgccccccgcagccgcgcagccgcccgcggccgcagtgcccgggccctcagtgccgcagccggccccggggcagccctcgcccgtcctccagctgcagcagaagcagagccgcatcagccccatccagaaaccgcaaggcctggaccccgtggaaattctgcaagagcgggaatacagacttcaggcccgcatagctcataggatacaagaactggaaaatctgcctggctctttgccaccagatttaagaaccaaagcaaccgtggaactaaaagcacttcggttactcaatttccagcgtcagctgagacaggaggtggtggcctgcatgcgcagggacacgaccctggagacggctctcaactccaaagcatacaaacggagcaagcgccagactctgagagaagctcgcatgaccgagaagctggagaagcagcagaagattgagcaggagaggaaacgccgtcagaaacaccaggaatacctgaacagtattttgcaacatgcaaaagattttaaggaatatcatcggtctgtggccggaaagatccagaagctctccaaagcagtggcaacttggcatgccaacactgaaagagagcagaagaaggagacagagcggattgaaaaggagagaatgcggcgactgatggctgaagatgaggagggttatagaaaactgattgatcaaaagaaagacaggcgtttagcttaccttttgcagcagaccgatgagtatgtagccaatctgaccaatctggtttgggagcacaagcaagcccaggcagccaaagagaagaagaagaggaggaggaggaagaagaaggctgaggagaatgcagagggtggggagtctgccctgggaccggatggagagcccatagatgagagcagccagatgagtgacctccctgtcaaagtgactcacacagaaaccggcaaggttctgttcggaccagaagcacccaaagcaagtcagctggacgcctggctggaaatgaatcctggttatgaagttgcccctagatctgacagtgaagagagtgattctgattatgaggaagaggatgaggaagaagagtccagtaggcaggaaaccgaagagaaaatactcctggatccaaatagcgaagaagtttctgagaaggatgctaagcagatcattgagacagctaagcaagacgtggatgatgaatacagcatgcagtacagtgccaggggctcccagtcctactacaccgtggctcatgccatctcggagagggtggagaaacagtctgccctcctaattaatgggaccctaaagcattaccagctccagggcctggaatggatggtttccctgtataataacaacttgaacggaatcttagccgatgaaatggggcttggaaagaccatacagaccattgcactcatcacttatctgatggagcacaaaagactcaatggcccctatctcatcattgttcccctttcgactctatctaactggacatatgaatttgacaaatgggctccttctgtggtgaagatttcttacaagggtactcctgccatgcgtcgctcccttgtcccccagctacggagtggcaaattcaatgtcctcttgactacttatgagtatattataaaagacaagcacattcttgcaaagattcggtggaaatacatgatagtggacgaaggccaccgaatgaagaatcaccactgcaagctgactcaggtcttgaacactcactatgtggcccccagaaggatcctcttgactgggaccccgctgcagaataagctccctgaactctgggccctcctcaacttcctcctcccaacaatttttaagagctgcagcacatttgaacaatggttcaatgctccatttgccatgactggtgaaagggtggacttaaatgaagaagaaactatattgatcatcaggcgtctacataaggtgttaagaccatttttactaaggagactgaagaaagaagttgaatcccagcttcccgaaaaagtggaatatgtgatcaagtgtgacatgtcagctctgcagaagattctgtatcgccatatgcaagccaaggggatccttctcacagatggttctgagaaagataagaaggggaaaggaggtgctaagacacttatgaacactattatgcagttgagaaaaatctgcaaccacccatatatgtttcagcacattgaggaatcctttgctgaacacctaggctattcaaatggggtcatcaatggggctgaactgtatcgggcctcagggaagtttgagctgcttgatcgtattctgccaaaattgagagcgactaatcaccgagtgctgcttttctgccagatgacatctctcatgaccatcatggaggattattttgcttttcggaacttcctttacctacgccttgatggcaccaccaagtctgaagatcgtgctgctttgctgaagaaattcaatgaacctggatcccagtatttcattttcttgctgagcacaagagctggtggcctgggcttaaatcttcaggcagctgatacagtggtcatctttgacagcgactggaatcctcatcaggatctgcaggcccaagaccgagctcaccgcatcgggcagcagaacgaggtccgggtactgaggctctgtaccgtgaacagcgtggaggaaaagatcctcgcggccgcaaaatacaagctgaacgtggatcagaaagtgatccaggcgggcatgtttgaccaaaagtcttcaagccacgagcggagggcattcctgcaggccatcttggagcatgaggaggaaaatgaggaagaagatgaagtaccggacgatgagactctgaaccaaatgattgctcgacgagaagaagaatttgacctttttatgcggatggacatggaccggcggagggaagatgcccggaacccgaaacggaagccccgtttaatggaggaggatgagctgccctcctggatcattaaggatgacgctgaagtagaaaggctcacctgtgaagaagaggaggagaaaatatttgggagggggtcccgccagcgccgtgacgtggactacagtgacgccctcacggagaagcagtggctaagggccatcgaagacggcaatttggaggaaatggaagaggaagtacggcttaagaagcgaaaaagacgaagaaatgtggataaagatcctgcaaaagaagatgtggaaaaagctaagaagagaagaggccgccctcccgctgagaaactgtcaccaaatccccccaaactgacaaagcagatgaacgctatcatcgatactgtgataaactacaaagataggtgtaacgtggagaaggtgcccagtaattctcagttggaaatagaaggaaacagttcagggcgacagctcagtgaagtcttcattcagttaccttcaaggaaagaattaccagaatactatgaattaattaggaagccagtggatttcaaaaaaataaaggaaaggattcgtaatcataagtaccggagcctaggcgacctggagaaggatgtcatgcttctctgtcacaacgctcagacgttcaacctggagggatcccagatctatgaagactccatcgtcttacagtcagtgtttaagagtgcccggcagaaaattgccaaagaggaagagagtgaggatgaaagcaatgaagaggaggaagaggaagatgaagaagagtcagagtccgaggcaaaatcagtcaaggtgaaaattaagctcaataaaaaagatgacaaaggccgggacaaagggaaaggcaagaaaaggccaaatcgaggaaaagccaaacctgtagtgagcgattttgacagcgatgaggagcaggatgaacgtgaacagtcagaaggaagtgggacggatgatgag

SEQ ID NO: 4025 - DNA, 4842 bp, Homo sapiens
  source 1..4842: mol_type = genomic DNA
atgtccactccagacccacccctgggcggaactcctcggccaggtccttccccgggccctggcccttcccctggagccatgctgggccctagcccgggtccctcgccgggctccgcccacagcatgatggggcccagcccagggccgccctcagcaggacaccccatccccacccaggggcctggagggtaccctcaggacaacatgcaccagatgcacaagcccatggagtccatgcatgagaagggcatgtcggacgacccgcgctacaaccagatgaaaggaatggggatgcggtcagggggccatgctgggatggggcccccgcccagccccatggaccagcactcccaaggttacccctcgcccctgggtggctctgagcatgcctctagtccagttccagccagtggcccgtcttcggggccccagatgtcttccgggccaggaggtgccccgctggatggtgctgacccccaggccttggggcagcagaaccggggcccaaccccatttaaccagaaccagctgcaccagctcagagctcagatcatggcctacaagatgctggccagggggcagcccctccccgaccacctgcagatggcggtgcagggcaagcggccgatgcccgggatgcagcagcagatgccaacgctacctccaccctcggtgtccgcaacaggacccggccctggccctggccctggccccggcccgggtcccggcccggcacctccaaattacagcaggcctcatggtatgggagggcccaacatgcctcccccaggaccctcgggcgtgccccccgggatgccaggccagcctcctggagggcctcccaagccctggcctgaaggacccatggcgaatgctgctgcccccacgagcacccctcagaagctgattcccccgcagccaacgggccgcccttcccccgcgccccctgccgtcccacccgccgcctcgcccgtgatgccaccgcagacccagtcccccgggcagccggcccagcccgcgcccatggtgccactgcaccagaagcagagccgcatcacccccatccagaagccgcggggcctcgaccctgtggagatcctgcaggagcgcgagtacaggctgcaggctcgcatcgcacaccgaattcaggaacttgaaaaccttcccgggtccctggccggggatttgcgaaccaaagcgaccattgagctcaaggccctcaggctgctgaacttccagaggcagctgcgccaggaggtggtggtgtgcatgcggagggacacagcgctggagacagccctcaatgctaaggcctacaagcgcagcaagcgccagtccctgcgcgaggcccgcatcactgagaagctggagaagcagcagaagatcgagcaggagcgcaagcgccggcagaagcaccaggaatacctcaatagcattctccagcatgccaaggatttcaaggaatatcacagatccgtcacaggcaaaatccagaagctgaccaaggcagtggccacgtaccatgccaacacggagcgggagcagaagaaagagaacgagcggatcgagaaggagcgcatgcggaggctcatggctgaagatgaggaggggtaccgcaagctcatcgaccagaagaaggacaagcgcctggcctacctcttgcagcagacagacgagtacgtggctaacctcacggagctggtgcggcagcacaaggctgcccaggtcgccaaggagaaaaagaagaaaaagaaaaagaagaaggcagaaaatgcagaaggacagacgcctgccattgggccggatggcgagcctctggacgagaccagccagatgagcgacctcccggtgaaggtgatccacgtggagagtgggaagatcctcacaggcacagatgcccccaaagccgggcagctggaggcctggctcgagatgaacccggggtatgaagtagctccgaggtctgatagtgaagaaagtggctcagaagaagaggaagaggaggaggaggaagagcagccgcaggcagcacagcctcccaccctgcccgtggaggagaagaagaagattccagatccagacagcgatgacgtctctgaggtggacgcgcggcacatcattgagaatgccaagcaagatgtcgatgatgaatatggcgtgtcccaggcccttgcacgtggcctgcagtcctactatgccgtggcccatgctgtcactgagagagtggacaagcagtcagcgcttatggtcaatggtgtcctcaaacagtaccagatcaaaggtttggagtggctggtgtccctgtacaacaacaacctgaacggcatcctggccgacgagatgggcctggggaagaccatccagaccatcgcgctcatcacgtacctcatggagcacaaacgcatcaatgggcccttcctcatcatcgtgcctctctcaacgctgtccaactgggcgtacgagtttgacaagtgggccccctccgtggtgaaggtgtcttacaagggatccccagcagcaagacgggcctttgtcccccagctccggagtgggaagttcaacgtcttgctgacgacgtacgagtacatcatcaaagacaagcacatcctcgccaagatccgttggaagtacatgattgtggacgaaggtcaccgcatgaagaaccaccactgcaagctgacgcaggtgctcaacacgcactatgtggcaccccgccgcctgctgctgacgggcacaccgctgcagaacaagcttcccgagctctgggcgctgctcaacttcctgctgcccaccatcttcaagagctgcagcaccttcgagcagtggtttaacgcaccctttgccatgaccggggaaaaggtggacctgaatgaggaggaaaccattctcatcatccggcgtctccacaaagtgctgcggcccttcttgctccgacgactcaagaaggaagtcgaggcccagttgcccgaaaaggtggagtacgtcatcaagtgcgacatgtctgcgctgcagcgagtgctctaccgccacatgcaggccaagggcgtgctgctgactgatggctccgagaaggacaagaagggcaaaggcggcaccaagaccctgatgaacaccatcatgcagctgcggaagatctgcaaccacccctacatgttccagcacatcgaggagtccttttccgagcacttggggttcactggcggcattgtccaagggctggacctgtaccgagcctcgggtaaatttgagcttcttgatagaattcttcccaaactccgagcaaccaaccacaaagtgctgctgttctgccaaatgacctccctcatgaccatcatggaagattactttgcgtatcgcggctttaaatacctcaggcttgatggaaccacgaaggcggaggaccggggcatgctgctgaaaaccttcaacgagcccggctctgagtacttcatcttcctgctcagcacccgggctggggggctcggcctgaacctccagtcggcagacactgtgatcatttttgacagcgactggaatcctcaccaggacctgcaagcgcaggaccgagcccaccgcatcgggcagcagaacgaggtgcgtgtgctccgcctctgcaccgtcaacagcgtggaggagaagatcctagctgcagccaagtacaagctcaacgtggaccagaaggtgatccaggccggcatgttcgaccagaagtcctccagccatgagcggcgcgccttcctgcaggccatcctggagcacgaggagcaggatgaggaggaagacgaggtgcccgacgacgagaccgtcaaccagatgatcgcccggcacgaggaggagtttgatctgttcatgcgcatggacctggaccgcaggcgcgaggaggcccgcaaccccaagcggaagccgcgcctcatggaggaggacgagctcccctcgtggatcatcaaggacgacgcggaggtggagcggctgacctgtgaggaggaggaggagaagatgttcggccgtggctcccgccaccgcaaggaggtggactacagcgactcactgacggagaagcagtggctcaaggccatcgaggagggcacgctggaggagatcgaagaggaggtccggcagaagaaatcatcacggaagcgcaagcgagacagcgacgccggctcctccaccccgaccaccagcacccgcagccgcgacaaggacgacgagagcaagaagcagaagaagcgcgggcggccgcctgccgagaaactctcccctaacccacccaacctcaccaagaagatgaagaagattgtggatgccgtgatcaagtacaaggacagcagcagtggacgtcagctcagcgaggtcttcatccagctgccctcgcgaaaggagctgcccgagtactacgagctcatccgcaagcccgtggacttcaagaagataaaggagcgcattcgcaaccacaagtaccgcagcctcaacgacctagagaaggacgtcatgctcctgtgccagaacgcacagaccttcaacctggagggctccctgatctatgaagactccatcgtcttgcagtcggtcttcaccagcgtgcggcagaaaatcgagaaggaggatgacagtgaaggcgaggagagtgaggaggaggaagagggcgaggaggaaggctccgaatccgaatctcggtccgtcaaagtgaagatcaagcttggccggaaggagaaggcacaggaccggctgaagggcggccggcggcggccgagccgagggtcccgagccaagccggtcgtgagtgacgatgacagtgaggaggaacaagaggaggaccgctcaggaagtggcagcgaagaagac

SEQ ID NO: 4026 - DNA, 4839 bp, Homo sapiens
  source 1..4839: mol_type = genomic DNA
atgtccactccagacccacccctgggcggaactcctcggccaggtccttccccgggccctggcccttcccctggagccatgctgggccctagcccgggtccctcgccgggctccgcccacagcatgatggggcccagcccagggccgccctcagcaggacaccccatccccacccaggggcctggagggtaccctcaggacaacatgcaccagatgcacaagcccatggagtccatgcatgagaagggcatgtcggacgacccgcgctacaaccagatgaaaggaatggggatgcggtcagggggccatgctgggatggggcccccgcccagccccatggaccagcactcccaaggttacccctcgcccctgggtggctctgagcatgcctctagtccagttccagccagtggcccgtcttcggggccccagatgtcttccgggccaggaggtgccccgctggatggtgctgacccccaggccttggggcagcagaaccggggcccaaccccatttaaccagaaccagctgcaccagctcagagctcagatcatggcctacaagatgctggccagggggcagcccctccccgaccacctgcagatggcggtgcagggcaagcggccgatgcccgggatgcagcagcagatgccaacgctacctccaccctcggtgtccgcaacaggacccggccctggccctggccctggccccggcccgggtcccggcccggcacctccaaattacagcaggcctcatggtatgggagggcccaacatgcctcccccaggaccctcgggcgtgccccccgggatgccaggccagcctcctggagggcctcccaagccctggcctgaaggacccatggcgaatgctgctgcccccacgagcacccctcagaagctgattcccccgcagccaacgggccgcccttcccccgcgccccctgccgtcccacccgccgcctcgcccgtgatgccaccgcagacccagtcccccgggcagccggcccagcccgcgcccatggtgccactgcaccagaagcagagccgcatcacccccatccagaagccgcggggcctcgaccctgtggagatcctgcaggagcgcgagtacaggctgcaggctcgcatcgcacaccgaattcaggaacttgaaaaccttcccgggtccctggccggggatttgcgaaccaaagcgaccattgagctcaaggccctcaggctgctgaacttccagaggcagctgcgccaggaggtggtggtgtgcatgcggagggacacagcgctggagacagccctcaatgctaaggcctacaagcgcagcaagcgccagtccctgcgcgaggcccgcatcactgagaagctggagaagcagcagaagatcgagcaggagcgcaagcgccggcagaagcaccaggaatacctcaatagcattctccagcatgccaaggatttcaaggaatatcacagatccgtcacaggcaaaatccagaagctgaccaaggcagtggccacgtaccatgccaacacggagcgggagcagaagaaagagaacgagcggatcgagaaggagcgcatgcggaggctcatggctgaagatgaggaggggtaccgcaagctcatcgaccagaagaaggacaagcgcctggcctacctcttgcagcagacagacgagtacgtggctaacctcacggagctggtgcggcagcacaaggctgcccaggtcgccaaggagaaaaagaagaaaaagaaaaagaagaaggcagaaaatgcagaaggacagacgcctgccattgggccggatggcgagcctctggacgagaccagccagatgagcgacctcccggtgaaggtgatccacgtggagagtgggaagatcctcacaggcacagatgcccccaaagccgggcagctggaggcctggctcgagatgaacccggggtatgaagtagctccgaggtctgatagtgaagaaagtggctcagaagaagaggaagaggaggaggaggaagagcagccgcaggcagcacagcctcccaccctgcccgtggaggagaagaagaagattccagatccagacagcgatgacgtctctgaggtggacgcgcggcacatcattgagaatgccaagcaagatgtcgatgatgaatatggcgtgtcccaggcccttgcacgtggcctgcagtcctactatgccgtggcccatgctgtcactgagagagtggacaagcagtcagcgcttatggtcaatggtgtcctcaaacagtaccagatcaaaggtttggagtggctggtgtccctgtacaacaacaacctgaacggcatcctggccgacgagatgggcctggggaagaccatccagaccatcgcgctcatcacgtacctcatggagcacaaacgcatcaatgggcccttcctcatcatcgtgcctctctcaacgctgtccaactgggcgtacgagtttgacaagtgggccccctccgtggtgaaggtgtcttacaagggatccccagcagcaagacgggcctttgtcccccagctccggagtgggaagttcaacgtcttgctgacgacgtacgagtacatcatcaaagacaagcacatcctcgccaagatccgttggaagtacatgattgtggacgaaggtcaccgcatgaagaaccaccactgcaagctgacgcaggtgctcaacacgcactatgtggcaccccgccgcctgctgctgacgggcacaccgctgcagaacaagcttcccgagctctgggcgctgctcaacttcctgctgcccaccatcttcaagagctgcagcaccttcgagcagtggtttaacgcaccctttgccatgaccggggaaaaggtggacctgaatgaggaggaaaccattctcatcatccggcgtctccacaaagtgctgcggcccttcttgctccgacgactcaagaaggaagtcgaggcccagttgcccgaaaaggtggagtacgtcatcaagtgcgacatgtctgcgctgcagcgagtgctctaccgccacatgcaggccaagggcgtgctgctgactgatggctccgagaaggacaagaagggcaaaggcggcaccaagaccctgatgaacaccatcatgcagctgcggaagatctgcaaccacccctacatgttccagcacatcgaggagtccttttccgagcacttggggttcactggcggcattgtccaagggctggacctgtaccgagcctcgggtaaatttgagcttcttgatagaattcttcccaaactccgagcaaccaaccacaaagtgctgctgttctgccaaatgacctccctcatgaccatcatggaagattactttgcgtatcgcggctttaaatacctcaggcttgatggaaccacgaaggcggaggaccggggcatgctgctgaaaaccttcaacgagcccggctctgagtacttcatcttcctgctcagcacccgggctggggggctcggcctgaacctccagtcggcagacactgtgatcatttttgacagcgactggaatcctcaccaggacctgcaagcgcaggaccgagcccaccgcatcgggcagcagaacgaggtgcgtgtgctccgcctctgcaccgtcaacagcgtggaggagaagatcctagctgcagccaagtacaagctcaacgtggaccagaaggtgatccaggccggcatgttcgaccagaagtcctccagccatgagcggcgcgccttcctgcaggccatcctggagcacgaggagcaggatgaggaggaagacgaggtgcccgacgacgagaccgtcaaccagatgatcgcccggcacgaggaggagtttgatctgttcatgcgcatggacctggaccgcaggcgcgaggaggcccgcaaccccaagcggaagccgcgcctcatggaggaggacgagctcccctcgtggatcatcaaggacgacgcggaggtggagcggctgacctgtgaggaggaggaggagaagatgttcggccgtggctcccgccaccgcaaggaggtggactacagcgactcactgacggagaagcagtggctcaaggccatcgaggagggcacgctggaggagatcgaagaggaggtccggcagaagaaatcatcacggaagcgcaagcgagacagcgacgccggctcctccaccccgaccaccagcacccgcagccgcgacaaggacgacgagagcaagaagcagaagaagcgcgggcggccgcctgccgagaaactctcccctaacccacccaacctcaccaagaagatgaagaagattgtggatgccgtgatcaagtacaaggacagcagtggacgtcagctcagcgaggtcttcatccagctgccctcgcgaaaggagctgcccgagtactacgagctcatccgcaagcccgtggacttcaagaagataaaggagcgcattcgcaaccacaagtaccgcagcctcaacgacctagagaaggacgtcatgctcctgtgccagaacgcacagaccttcaacctggagggctccctgatctatgaagactccatcgtcttgcagtcggtcttcaccagcgtgcggcagaaaatcgagaaggaggatgacagtgaaggcgaggagagtgaggaggaggaagagggcgaggaggaaggctccgaatccgaatctcggtccgtcaaagtgaagatcaagcttggccggaaggagaaggcacaggaccggctgaagggcggccggcggcggccgagccgagggtcccgagccaagccggtcgtgagtgacgatgacagtgaggaggaacaagaggaggaccgctcaggaagtggcagcgaagaagac

SEQ ID NO: 4027 - DNA, 4851 bp, Homo sapiens
  source 1..4851: mol_type = genomic DNA
atgtccactccagacccacccctgggcggaactcctcggccaggtccttccccgggccctggcccttcccctggagccatgctgggccctagcccgggtccctcgccgggctccgcccacagcatgatggggcccagcccagggccgccctcagcaggacaccccatccccacccaggggcctggagggtaccctcaggacaacatgcaccagatgcacaagcccatggagtccatgcatgagaagggcatgtcggacgacccgcgctacaaccagatgaaaggaatggggatgcggtcagggggccatgctgggatggggcccccgcccagccccatggaccagcactcccaaggttacccctcgcccctgggtggctctgagcatgcctctagtccagttccagccagtggcccgtcttcggggccccagatgtcttccgggccaggaggtgccccgctggatggtgctgacccccaggccttggggcagcagaaccggggcccaaccccatttaaccagaaccagctgcaccagctcagagctcagatcatggcctacaagatgctggccagggggcagcccctccccgaccacctgcagatggcggtgcagggcaagcggccgatgcccgggatgcagcagcagatgccaacgctacctccaccctcggtgtccgcaacaggacccggccctggccctggccctggccccggcccgggtcccggcccggcacctccaaattacagcaggcctcatggtatgggagggcccaacatgcctcccccaggaccctcgggcgtgccccccgggatgccaggccagcctcctggagggcctcccaagccctggcctgaaggacccatggcgaatgctgctgcccccacgagcacccctcagaagctgattcccccgcagccaacgggccgcccttcccccgcgccccctgccgtcccacccgccgcctcgcccgtgatgccaccgcagacccagtcccccgggcagccggcccagcccgcgcccatggtgccactgcaccagaagcagagccgcatcacccccatccagaagccgcggggcctcgaccctgtggagatcctgcaggagcgcgagtacaggctgcaggctcgcatcgcacaccgaattcaggaacttgaaaaccttcccgggtccctggccggggatttgcgaaccaaagcgaccattgagctcaaggccctcaggctgctgaacttccagaggcagctgcgccaggaggtggtggtgtgcatgcggagggacacagcgctggagacagccctcaatgctaaggcctacaagcgcagcaagcgccagtccctgcgcgaggcccgcatcactgagaagctggagaagcagcagaagatcgagcaggagcgcaagcgccggcagaagcaccaggaatacctcaatagcattctccagcatgccaaggatttcaaggaatatcacagatccgtcacaggcaaaatccagaagctgaccaaggcagtggccacgtaccatgccaacacggagcgggagcagaagaaagagaacgagcggatcgagaaggagcgcatgcggaggctcatggctgaagatgaggaggggtaccgcaagctcatcgaccagaagaaggacaagcgcctggcctacctcttgcagcagacagacgagtacgtggctaacctcacggagctggtgcggcagcacaaggctgcccaggtcgccaaggagaaaaagaagaaaaagaaaaagaagaaggcagaaaatgcagaaggacagacgcctgccattgggccggatggcgagcctctggacgagaccagccagatgagcgacctcccggtgaaggtgatccacgtggagagtgggaagatcctcacaggcacagatgcccccaaagccgggcagctggaggcctggctcgagatgaacccggggtatgaagtagctccgaggtctgatagtgaagaaagtggctcagaagaagaggaagaggaggaggaggaagagcagccgcaggcagcacagcctcccaccctgcccgtggaggagaagaagaagattccagatccagacagcgatgacgtctctgaggtggacgcgcggcacatcattgagaatgccaagcaagatgtcgatgatgaatatggcgtgtcccaggcccttgcacgtggcctgcagtcctactatgccgtggcccatgctgtcactgagagagtggacaagcagtcagcgcttatggtcaatggtgtcctcaaacagtaccagatcaaaggtttggagtggctggtgtccctgtacaacaacaacctgaacggcatcctggccgacgagatgggcctggggaagaccatccagaccatcgcgctcatcacgtacctcatggagcacaaacgcatcaatgggcccttcctcatcatcgtgcctctctcaacgctgtccaactgggcgtacgagtttgacaagtgggccccctccgtggtgaaggtgtcttacaagggatccccagcagcaagacgggcctttgtcccccagctccggagtgggaagttcaacgtcttgctgacgacgtacgagtacatcatcaaagacaagcacatcctcgccaagatccgttggaagtacatgattgtggacgaaggtcaccgcatgaagaaccaccactgcaagctgacgcaggtgctcaacacgcactatgtggcaccccgccgcctgctgctgacgggcacaccgctgcagaacaagcttcccgagctctgggcgctgctcaacttcctgctgcccaccatcttcaagagctgcagcaccttcgagcagtggtttaacgcaccctttgccatgaccggggaaaaggtggacctgaatgaggaggaaaccattctcatcatccggcgtctccacaaagtgctgcggcccttcttgctccgacgactcaagaaggaagtcgaggcccagttgcccgaaaaggtggagtacgtcatcaagtgcgacatgtctgcgctgcagcgagtgctctaccgccacatgcaggccaagggcgtgctgctgactgatggctccgagaaggacaagaagggcaaaggcggcaccaagaccctgatgaacaccatcatgcagctgcggaagatctgcaaccacccctacatgttccagcacatcgaggagtccttttccgagcacttggggttcactggcggcattgtccaagggctggacctgtaccgagcctcgggtaaatttgagcttcttgatagaattcttcccaaactccgagcaaccaaccacaaagtgctgctgttctgccaaatgacctccctcatgaccatcatggaagattactttgcgtatcgcggctttaaatacctcaggcttgatggaaccacgaaggcggaggaccggggcatgctgctgaaaaccttcaacgagcccggctctgagtacttcatcttcctgctcagcacccgggctggggggctcggcctgaacctccagtcggcagacactgtgatcatttttgacagcgactggaatcctcaccaggacctgcaagcgcaggaccgagcccaccgcatcgggcagcagaacgaggtgcgtgtgctccgcctctgcaccgtcaacagcgtggaggagaagatcctagctgcagccaagtacaagctcaacgtggaccagaaggtgatccaggccggcatgttcgaccagaagtcctccagccatgagcggcgcgccttcctgcaggccatcctggagcacgaggagcaggatgaggaggaagacgaggtgcccgacgacgagaccgtcaaccagatgatcgcccggcacgaggaggagtttgatctgttcatgcgcatggacctggaccgcaggcgcgaggaggcccgcaaccccaagcggaagccgcgcctcatggaggaggacgagctcccctcgtggatcatcaaggacgacgcggaggtggagcggctgacctgtgaggaggaggaggagaagatgttcggccgtggctcccgccaccgcaaggaggtggactacagcgactcactgacggagaagcagtggctcaagaccctgaaggccatcgaggagggcacgctggaggagatcgaagaggaggtccggcagaagaaatcatcacggaagcgcaagcgagacagcgacgccggctcctccaccccgaccaccagcacccgcagccgcgacaaggacgacgagagcaagaagcagaagaagcgcgggcggccgcctgccgagaaactctcccctaacccacccaacctcaccaagaagatgaagaagattgtggatgccgtgatcaagtacaaggacagcagcagtggacgtcagctcagcgaggtcttcatccagctgccctcgcgaaaggagctgcccgagtactacgagctcatccgcaagcccgtggacttcaagaagataaaggagcgcattcgcaaccacaagtaccgcagcctcaacgacctagagaaggacgtcatgctcctgtgccagaacgcacagaccttcaacctggagggctccctgatctatgaagactccatcgtcttgcagtcggtcttcaccagcgtgcggcagaaaatcgagaaggaggatgacagtgaaggcgaggagagtgaggaggaggaagagggcgaggaggaaggctccgaatccgaatctcggtccgtcaaagtgaagatcaagcttggccggaaggagaaggcacaggaccggctgaagggcggccggcggcggccgagccgagggtcccgagccaagccggtcgtgagtgacgatgacagtgaggaggaacaagaggaggaccgctcaggaagtggcagcgaagaagac

SEQ ID NO: 4028 - DNA, 5037 bp, Homo sapiens
  source 1..5037: mol_type = genomic DNA
atgtccactccagacccacccctgggcggaactcctcggccaggtccttccccgggccctggcccttcccctggagccatgctgggccctagcccgggtccctcgccgggctccgcccacagcatgatggggcccagcccagggccgccctcagcaggacaccccatccccacccaggggcctggagggtaccctcaggacaacatgcaccagatgcacaagcccatggagtccatgcatgagaagggcatgtcggacgacccgcgctacaaccagatgaaaggaatggggatgcggtcagggggccatgctgggatggggcccccgcccagccccatggaccagcactcccaaggttacccctcgcccctgggtggctctgagcatgcctctagtccagttccagccagtggcccgtcttcggggccccagatgtcttccgggccaggaggtgccccgctggatggtgctgacccccaggccttggggcagcagaaccggggcccaaccccatttaaccagaaccagctgcaccagctcagagctcagatcatggcctacaagatgctggccagggggcagcccctccccgaccacctgcagatggcggtgcagggcaagcggccgatgcccgggatgcagcagcagatgccaacgctacctccaccctcggtgtccgcaacaggacccggccctggccctggccctggccccggcccgggtcccggcccggcacctccaaattacagcaggcctcatggtatgggagggcccaacatgcctcccccaggaccctcgggcgtgccccccgggatgccaggccagcctcctggagggcctcccaagccctggcctgaaggacccatggcgaatgctgctgcccccacgagcacccctcagaagctgattcccccgcagccaacgggccgcccttcccccgcgccccctgccgtcccacccgccgcctcgcccgtgatgccaccgcagacccagtcccccgggcagccggcccagcccgcgcccatggtgccactgcaccagaagcagagccgcatcacccccatccagaagccgcggggcctcgaccctgtggagatcctgcaggagcgcgagtacaggctgcaggctcgcatcgcacaccgaattcaggaacttgaaaaccttcccgggtccctggccggggatttgcgaaccaaagcgaccattgagctcaaggccctcaggctgctgaacttccagaggcagctgcgccaggaggtggtggtgtgcatgcggagggacacagcgctggagacagccctcaatgctaaggcctacaagcgcagcaagcgccagtccctgcgcgaggcccgcatcactgagaagctggagaagcagcagaagatcgagcaggagcgcaagcgccggcagaagcaccaggaatacctcaatagcattctccagcatgccaaggatttcaaggaatatcacagatccgtcacaggcaaaatccagaagctgaccaaggcagtggccacgtaccatgccaacacggagcgggagcagaagaaagagaacgagcggatcgagaaggagcgcatgcggaggctcatggctgaagatgaggaggggtaccgcaagctcatcgaccagaagaaggacaagcgcctggcctacctcttgcagcagacagacgagtacgtggctaacctcacggagctggtgcggcagcacaaggctgcccaggtcgccaaggagaaaaagaagaaaaagaaaaagaagaaggcagaaaatgcagaaggacagacgcctgccattgggccggatggcgagcctctggacgagaccagccagatgagcgacctcccggtgaaggtgatccacgtggagagtgggaagatcctcacaggcacagatgcccccaaagccgggcagctggaggcctggctcgagatgaacccggggtatgaagtagctccgaggtctgatagtgaagaaagtggctcagaagaagaggaagaggaggaggaggaagagcagccgcaggcagcacagcctcccaccctgcccgtggaggagaagaagaagattccagatccagacagcgatgacgtctctgaggtggacgcgcggcacatcattgagaatgccaagcaagatgtcgatgatgaatatggcgtgtcccaggcccttgcacgtggcctgcagtcctactatgccgtggcccatgctgtcactgagagagtggacaagcagtcagcgcttatggtcaatggtgtcctcaaacagtaccagatcaaaggtttggagtggctggtgtccctgtacaacaacaacctgaacggcatcctggccgacgagatgggcctggggaagaccatccagaccatcgcgctcatcacgtacctcatggagcacaaacgcatcaatgggcccttcctcatcatcgtgcctctctcaacgctgtccaactgggcgtacgagtttgacaagtgggccccctccgtggtgaaggtgtcttacaagggatccccagcagcaagacgggcctttgtcccccagctccggagtgggaagttcaacgtcttgctgacgacgtacgagtacatcatcaaagacaagcacatcctcgccaagatccgttggaagtacatgattgtggacgaaggtcaccgcatgaagaaccaccactgcaagctgacgcaggtgctcaacacgcactatgtggcaccccgccgcctgctgctgacgggcacaccgctgcagaacaagcttcccgagctctgggcgctgctcaacttcctgctgcccaccatcttcaagagctgcagcaccttcgagcagtggtttaacgcaccctttgccatgaccggggaaaaggtggacctgaatgaggaggaaaccattctcatcatccggcgtctccacaaagtgctgcggcccttcttgctccgacgactcaagaaggaagtcgaggcccagttgcccgaaaaggtggagtacgtcatcaagtgcgacatgtctgcgctgcagcgagtgctctaccgccacatgcaggccaagggcgtgctgctgactgatggctccgagaaggacaagaagggcaaaggcggcaccaagaccctgatgaacaccatcatgcagctgcggaagatctgcaaccacccctacatgttccagcacatcgaggagtccttttccgagcacttggggttcactggcggcattgtccaagggctggacctgtaccgagcctcgggtaaatttgagcttcttgatagaattcttcccaaactccgagcaaccaaccacaaagtgctgctgttctgccaaatgacctccctcatgaccatcatggaagattactttgcgtatcgcggctttaaatacctcaggcttgatggaaccacgaaggcggaggaccggggcatgctgctgaaaaccttcaacgagcccggctctgagtacttcatcttcctgctcagcacccgggctggggggctcggcctgaacctccagtcggcagacactgtgatcatttttgacagcgactggaatcctcaccaggacctgcaagcgcaggaccgagcccaccgcatcgggcagcagaacgaggtgcgtgtgctccgcctctgcaccgtcaacagcgtggaggagaagatcctagctgcagccaagtacaagctcaacgtggaccagaaggtgatccaggccggcatgttcgaccagaagtcctccagccatgagcggcgcgccttcctgcaggccatcctggagcacgaggagcaggatgagagcagacactgcagcacgggcagcggcagtgccagcttcgcccacactgcccctccgccagcgggcgtcaaccccgacttggaggagccacctctaaaggaggaagacgaggtgcccgacgacgagaccgtcaaccagatgatcgcccggcacgaggaggagtttgatctgttcatgcgcatggacctggaccgcaggcgcgaggaggcccgcaaccccaagcggaagccgcgcctcatggaggaggacgagctcccctcgtggatcatcaaggacgacgcggaggtggagcggctgacctgtgaggaggaggaggagaagatgttcggccgtggctcccgccaccgcaaggaggtggactacagcgactcactgacggagaagcagtggctcaagaaaattacaggaaaagatatccatgacacagccagcagtgtggcacgtgggctacaattccagcgtggccttcagttctgcacacgtgcgtcaaaggccatcgaggagggcacgctggaggagatcgaagaggaggtccggcagaagaaatcatcacggaagcgcaagcgagacagcgacgccggctcctccaccccgaccaccagcacccgcagccgcgacaaggacgacgagagcaagaagcagaagaagcgcgggcggccgcctgccgagaaactctcccctaacccacccaacctcaccaagaagatgaagaagattgtggatgccgtgatcaagtacaaggacagcagcagtggacgtcagctcagcgaggtcttcatccagctgccctcgcgaaaggagctgcccgagtactacgagctcatccgcaagcccgtggacttcaagaagataaaggagcgcattcgcaaccacaagtaccgcagcctcaacgacctagagaaggacgtcatgctcctgtgccagaacgcacagaccttcaacctggagggctccctgatctatgaagactccatcgtcttgcagtcggtcttcaccagcgtgcggcagaaaatcgagaaggaggatgacagtgaaggcgaggagagtgaggaggaggaagagggcgaggaggaaggctccgaatccgaatctcggtccgtcaaagtgaagatcaagcttggccggaaggagaaggcacaggaccggctgaagggcggccggcggcggccgagccgagggtcccgagccaagccggtcgtgagtgacgatgacagtgaggaggaacaagaggaggaccgctcaggaagtggcagcgaagaagac

SEQ ID NO: 4029 - DNA, 4941 bp, Homo sapiens
  source 1..4941: mol_type = genomic DNA
atgtccactccagacccacccctgggcggaactcctcggccaggtccttccccgggccctggcccttcccctggagccatgctgggccctagcccgggtccctcgccgggctccgcccacagcatgatggggcccagcccagggccgccctcagcaggacaccccatccccacccaggggcctggagggtaccctcaggacaacatgcaccagatgcacaagcccatggagtccatgcatgagaagggcatgtcggacgacccgcgctacaaccagatgaaaggaatggggatgcggtcagggggccatgctgggatggggcccccgcccagccccatggaccagcactcccaaggttacccctcgcccctgggtggctctgagcatgcctctagtccagttccagccagtggcccgtcttcggggccccagatgtcttccgggccaggaggtgccccgctggatggtgctgacccccaggccttggggcagcagaaccggggcccaaccccatttaaccagaaccagctgcaccagctcagagctcagatcatggcctacaagatgctggccagggggcagcccctccccgaccacctgcagatggcggtgcagggcaagcggccgatgcccgggatgcagcagcagatgccaacgctacctccaccctcggtgtccgcaacaggacccggccctggccctggccctggccccggcccgggtcccggcccggcacctccaaattacagcaggcctcatggtatgggagggcccaacatgcctcccccaggaccctcgggcgtgccccccgggatgccaggccagcctcctggagggcctcccaagccctggcctgaaggacccatggcgaatgctgctgcccccacgagcacccctcagaagctgattcccccgcagccaacgggccgcccttcccccgcgccccctgccgtcccacccgccgcctcgcccgtgatgccaccgcagacccagtcccccgggcagccggcccagcccgcgcccatggtgccactgcaccagaagcagagccgcatcacccccatccagaagccgcggggcctcgaccctgtggagatcctgcaggagcgcgagtacaggctgcaggctcgcatcgcacaccgaattcaggaacttgaaaaccttcccgggtccctggccggggatttgcgaaccaaagcgaccattgagctcaaggccctcaggctgctgaacttccagaggcagctgcgccaggaggtggtggtgtgcatgcggagggacacagcgctggagacagccctcaatgctaaggcctacaagcgcagcaagcgccagtccctgcgcgaggcccgcatcactgagaagctggagaagcagcagaagatcgagcaggagcgcaagcgccggcagaagcaccaggaatacctcaatagcattctccagcatgccaaggatttcaaggaatatcacagatccgtcacaggcaaaatccagaagctgaccaaggcagtggccacgtaccatgccaacacggagcgggagcagaagaaagagaacgagcggatcgagaaggagcgcatgcggaggctcatggctgaagatgaggaggggtaccgcaagctcatcgaccagaagaaggacaagcgcctggcctacctcttgcagcagacagacgagtacgtggctaacctcacggagctggtgcggcagcacaaggctgcccaggtcgccaaggagaaaaagaagaaaaagaaaaagaagaaggcagaaaatgcagaaggacagacgcctgccattgggccggatggcgagcctctggacgagaccagccagatgagcgacctcccggtgaaggtgatccacgtggagagtgggaagatcctcacaggcacagatgcccccaaagccgggcagctggaggcctggctcgagatgaacccggggtatgaagtagctccgaggtctgatagtgaagaaagtggctcagaagaagaggaagaggaggaggaggaagagcagccgcaggcagcacagcctcccaccctgcccgtggaggagaagaagaagattccagatccagacagcgatgacgtctctgaggtggacgcgcggcacatcattgagaatgccaagcaagatgtcgatgatgaatatggcgtgtcccaggcccttgcacgtggcctgcagtcctactatgccgtggcccatgctgtcactgagagagtggacaagcagtcagcgcttatggtcaatggtgtcctcaaacagtaccagatcaaaggtttggagtggctggtgtccctgtacaacaacaacctgaacggcatcctggccgacgagatgggcctggggaagaccatccagaccatcgcgctcatcacgtacctcatggagcacaaacgcatcaatgggcccttcctcatcatcgtgcctctctcaacgctgtccaactgggcgtacgagtttgacaagtgggccccctccgtggtgaaggtgtcttacaagggatccccagcagcaagacgggcctttgtcccccagctccggagtgggaagttcaacgtcttgctgacgacgtacgagtacatcatcaaagacaagcacatcctcgccaagatccgttggaagtacatgattgtggacgaaggtcaccgcatgaagaaccaccactgcaagctgacgcaggtgctcaacacgcactatgtggcaccccgccgcctgctgctgacgggcacaccgctgcagaacaagcttcccgagctctgggcgctgctcaacttcctgctgcccaccatcttcaagagctgcagcaccttcgagcagtggtttaacgcaccctttgccatgaccggggaaaaggtggacctgaatgaggaggaaaccattctcatcatccggcgtctccacaaagtgctgcggcccttcttgctccgacgactcaagaaggaagtcgaggcccagttgcccgaaaaggtggagtacgtcatcaagtgcgacatgtctgcgctgcagcgagtgctctaccgccacatgcaggccaagggcgtgctgctgactgatggctccgagaaggacaagaagggcaaaggcggcaccaagaccctgatgaacaccatcatgcagctgcggaagatctgcaaccacccctacatgttccagcacatcgaggagtccttttccgagcacttggggttcactggcggcattgtccaagggctggacctgtaccgagcctcgggtaaatttgagcttcttgatagaattcttcccaaactccgagcaaccaaccacaaagtgctgctgttctgccaaatgacctccctcatgaccatcatggaagattactttgcgtatcgcggctttaaatacctcaggcttgatggaaccacgaaggcggaggaccggggcatgctgctgaaaaccttcaacgagcccggctctgagtacttcatcttcctgctcagcacccgggctggggggctcggcctgaacctccagtcggcagacactgtgatcatttttgacagcgactggaatcctcaccaggacctgcaagcgcaggaccgagcccaccgcatcgggcagcagaacgaggtgcgtgtgctccgcctctgcaccgtcaacagcgtggaggagaagatcctagctgcagccaagtacaagctcaacgtggaccagaaggtgatccaggccggcatgttcgaccagaagtcctccagccatgagcggcgcgccttcctgcaggccatcctggagcacgaggagcaggatgagagcagacactgcagcacgggcagcggcagtgccagcttcgcccacactgcccctccgccagcgggcgtcaaccccgacttggaggagccacctctaaaggaggaagacgaggtgcccgacgacgagaccgtcaaccagatgatcgcccggcacgaggaggagtttgatctgttcatgcgcatggacctggaccgcaggcgcgaggaggcccgcaaccccaagcggaagccgcgcctcatggaggaggacgagctcccctcgtggatcatcaaggacgacgcggaggtggagcggctgacctgtgaggaggaggaggagaagatgttcggccgtggctcccgccaccgcaaggaggtggactacagcgactcactgacggagaagcagtggctcaaggccatcgaggagggcacgctggaggagatcgaagaggaggtccggcagaagaaatcatcacggaagcgcaagcgagacagcgacgccggctcctccaccccgaccaccagcacccgcagccgcgacaaggacgacgagagcaagaagcagaagaagcgcgggcggccgcctgccgagaaactctcccctaacccacccaacctcaccaagaagatgaagaagattgtggatgccgtgatcaagtacaaggacagcagcagtggacgtcagctcagcgaggtcttcatccagctgccctcgcgaaaggagctgcccgagtactacgagctcatccgcaagcccgtggacttcaagaagataaaggagcgcattcgcaaccacaagtaccgcagcctcaacgacctagagaaggacgtcatgctcctgtgccagaacgcacagaccttcaacctggagggctccctgatctatgaagactccatcgtcttgcagtcggtcttcaccagcgtgcggcagaaaatcgagaaggaggatgacagtgaaggcgaggagagtgaggaggaggaagagggcgaggaggaaggctccgaatccgaatctcggtccgtcaaagtgaagatcaagcttggccggaaggagaaggcacaggaccggctgaagggcggccggcggcggccgagccgagggtcccgagccaagccggtcgtgagtgacgatgacagtgaggaggaacaagaggaggaccgctcaggaagtggcagcgaagaagac

SEQ ID NO: 4030 - DNA, 4848 bp, Homo sapiens
  source 1..4848: mol_type = genomic DNA
atgtccactccagacccacccctgggcggaactcctcggccaggtccttccccgggccctggcccttcccctggagccatgctgggccctagcccgggtccctcgccgggctccgcccacagcatgatggggcccagcccagggccgccctcagcaggacaccccatccccacccaggggcctggagggtaccctcaggacaacatgcaccagatgcacaagcccatggagtccatgcatgagaagggcatgtcggacgacccgcgctacaaccagatgaaaggaatggggatgcggtcagggggccatgctgggatggggcccccgcccagccccatggaccagcactcccaaggttacccctcgcccctgggtggctctgagcatgcctctagtccagttccagccagtggcccgtcttcggggccccagatgtcttccgggccaggaggtgccccgctggatggtgctgacccccaggccttggggcagcagaaccggggcccaaccccatttaaccagaaccagctgcaccagctcagagctcagatcatggcctacaagatgctggccagggggcagcccctccccgaccacctgcagatggcggtgcagggcaagcggccgatgcccgggatgcagcagcagatgccaacgctacctccaccctcggtgtccgcaacaggacccggccctggccctggccctggccccggcccgggtcccggcccggcacctccaaattacagcaggcctcatggtatgggagggcccaacatgcctcccccaggaccctcgggcgtgccccccgggatgccaggccagcctcctggagggcctcccaagccctggcctgaaggacccatggcgaatgctgctgcccccacgagcacccctcagaagctgattcccccgcagccaacgggccgcccttcccccgcgccccctgccgtcccacccgccgcctcgcccgtgatgccaccgcagacccagtcccccgggcagccggcccagcccgcgcccatggtgccactgcaccagaagcagagccgcatcacccccatccagaagccgcggggcctcgaccctgtggagatcctgcaggagcgcgagtacaggctgcaggctcgcatcgcacaccgaattcaggaacttgaaaaccttcccgggtccctggccggggatttgcgaaccaaagcgaccattgagctcaaggccctcaggctgctgaacttccagaggcagctgcgccaggaggtggtggtgtgcatgcggagggacacagcgctggagacagccctcaatgctaaggcctacaagcgcagcaagcgccagtccctgcgcgaggcccgcatcactgagaagctggagaagcagcagaagatcgagcaggagcgcaagcgccggcagaagcaccaggaatacctcaatagcattctccagcatgccaaggatttcaaggaatatcacagatccgtcacaggcaaaatccagaagctgaccaaggcagtggccacgtaccatgccaacacggagcgggagcagaagaaagagaacgagcggatcgagaaggagcgcatgcggaggctcatggctgaagatgaggaggggtaccgcaagctcatcgaccagaagaaggacaagcgcctggcctacctcttgcagcagacagacgagtacgtggctaacctcacggagctggtgcggcagcacaaggctgcccaggtcgccaaggagaaaaagaagaaaaagaaaaagaagaaggcagaaaatgcagaaggacagacgcctgccattgggccggatggcgagcctctggacgagaccagccagatgagcgacctcccggtgaaggtgatccacgtggagagtgggaagatcctcacaggcacagatgcccccaaagccgggcagctggaggcctggctcgagatgaacccggggtatgaagtagctccgaggtctgatagtgaagaaagtggctcagaagaagaggaagaggaggaggaggaagagcagccgcaggcagcacagcctcccaccctgcccgtggaggagaagaagaagattccagatccagacagcgatgacgtctctgaggtggacgcgcggcacatcattgagaatgccaagcaagatgtcgatgatgaatatggcgtgtcccaggcccttgcacgtggcctgcagtcctactatgccgtggcccatgctgtcactgagagagtggacaagcagtcagcgcttatggtcaatggtgtcctcaaacagtaccagatcaaaggtttggagtggctggtgtccctgtacaacaacaacctgaacggcatcctggccgacgagatgggcctggggaagaccatccagaccatcgcgctcatcacgtacctcatggagcacaaacgcatcaatgggcccttcctcatcatcgtgcctctctcaacgctgtccaactgggcgtacgagtttgacaagtgggccccctccgtggtgaaggtgtcttacaagggatccccagcagcaagacgggcctttgtcccccagctccggagtgggaagttcaacgtcttgctgacgacgtacgagtacatcatcaaagacaagcacatcctcgccaagatccgttggaagtacatgattgtggacgaaggtcaccgcatgaagaaccaccactgcaagctgacgcaggtgctcaacacgcactatgtggcaccccgccgcctgctgctgacgggcacaccgctgcagaacaagcttcccgagctctgggcgctgctcaacttcctgctgcccaccatcttcaagagctgcagcaccttcgagcagtggtttaacgcaccctttgccatgaccggggaaaaggtggacctgaatgaggaggaaaccattctcatcatccggcgtctccacaaagtgctgcggcccttcttgctccgacgactcaagaaggaagtcgaggcccagttgcccgaaaaggtggagtacgtcatcaagtgcgacatgtctgcgctgcagcgagtgctctaccgccacatgcaggccaagggcgtgctgctgactgatggctccgagaaggacaagaagggcaaaggcggcaccaagaccctgatgaacaccatcatgcagctgcggaagatctgcaaccacccctacatgttccagcacatcgaggagtccttttccgagcacttggggttcactggcggcattgtccaagggctggacctgtaccgagcctcgggtaaatttgagcttcttgatagaattcttcccaaactccgagcaaccaaccacaaagtgctgctgttctgccaaatgacctccctcatgaccatcatggaagattactttgcgtatcgcggctttaaatacctcaggcttgatggaaccacgaaggcggaggaccggggcatgctgctgaaaaccttcaacgagcccggctctgagtacttcatcttcctgctcagcacccgggctggggggctcggcctgaacctccagtcggcagacactgtgatcatttttgacagcgactggaatcctcaccaggacctgcaagcgcaggaccgagcccaccgcatcgggcagcagaacgaggtgcgtgtgctccgcctctgcaccgtcaacagcgtggaggagaagatcctagctgcagccaagtacaagctcaacgtggaccagaaggtgatccaggccggcatgttcgaccagaagtcctccagccatgagcggcgcgccttcctgcaggccatcctggagcacgaggagcaggatgaggaggaagacgaggtgcccgacgacgagaccgtcaaccagatgatcgcccggcacgaggaggagtttgatctgttcatgcgcatggacctggaccgcaggcgcgaggaggcccgcaaccccaagcggaagccgcgcctcatggaggaggacgagctcccctcgtggatcatcaaggacgacgcggaggtggagcggctgacctgtgaggaggaggaggagaagatgttcggccgtggctcccgccaccgcaaggaggtggactacagcgactcactgacggagaagcagtggctcaagaccctgaaggccatcgaggagggcacgctggaggagatcgaagaggaggtccggcagaagaaatcatcacggaagcgcaagcgagacagcgacgccggctcctccaccccgaccaccagcacccgcagccgcgacaaggacgacgagagcaagaagcagaagaagcgcgggcggccgcctgccgagaaactctcccctaacccacccaacctcaccaagaagatgaagaagattgtggatgccgtgatcaagtacaaggacagcagtggacgtcagctcagcgaggtcttcatccagctgccctcgcgaaaggagctgcccgagtactacgagctcatccgcaagcccgtggacttcaagaagataaaggagcgcattcgcaaccacaagtaccgcagcctcaacgacctagagaaggacgtcatgctcctgtgccagaacgcacagaccttcaacctggagggctccctgatctatgaagactccatcgtcttgcagtcggtcttcaccagcgtgcggcagaaaatcgagaaggaggatgacagtgaaggcgaggagagtgaggaggaggaagagggcgaggaggaaggctccgaatccgaatctcggtccgtcaaagtgaagatcaagcttggccggaaggagaaggcacaggaccggctgaagggcggccggcggcggccgagccgagggtcccgagccaagccggtcgtgagtgacgatgacagtgaggaggaacaagaggaggaccgctcaggaagtggcagcgaagaagac

SEQ ID NO: 4031 - DNA, 498 bp, Homo sapiens
  source 1..498: mol_type = genomic DNA
atggcggcctatccggagagctgcgtggacactacggtgctggacttcgtcgcagacctgtccctggcctccccgagacgccctctcctctgcgacttcgcacccggggtctccttgggggacccagcccttgcgctccgagagggaagacccaggaggatggcgcggtttgaagagggggacccagaagaagaggagtgcgaagtggaccagggggacggagaagaggaggaggaagaggagcgcggaagaggtgtctccctattaggccgccccaagaggaaaagggtgatcacctacgcccagcgccaggccgccaacatccgcgaaaggaagcggatgttcaacctcaacgaggcctttgaccagctgcggaggaaggtgcccacgtttgcttacgagaaaaggctgtcccggatcgagaccctccgcctggccatcgtctatatctccttcatgaccgagctcttggagagctgtgagaagaaggaaagcggc

SEQ ID NO: 4032 - DNA, 2058 bp, Homo sapiens
  source 1..2058: mol_type = genomic DNA
atggaggtggtaacatttggcgatgtggctgtgcacttctctcgggaggagtggcagtgtctggaccctggccagagggccctctacagggaagtgatgctggagaaccacagcagtgtggctggactagcaggattcctggttttcaagcctgagctgatctctcggctggagcagggagaagagccatgggtcctcgacctgcagggagcagaggggacagaggcaccaaggacctccaagacagattctacgattaggactgaaaatgagcaggcctgtgaggacatggacatcctaaaatcagaatcctatgggacagtggtcagaatctccccacaggactttcctcagaatcctggctttggagacgtttctgattctgaggtctggttagacagtcatctgggcagtcccgggctgaaagtgacaggctttaccttccaaaataactgtttgaatgaggagactgtggttcccaagaccttcaccaaggacgcaccccagggatgtaaggagctgggaagcagcggcctggattgtcagcctcttgaaagtcagggagagagtgcggaagggatgtcccagagatgcgaggagtgtggcaaaggcatcagagccacttcagatatcgctctgcattgggaaattaatacacagaaaattagcagatgtcaagaatgccaaaaaaagttatctgactgcttgcaggggaaacatacaaataactgccatggagagaagccgtacgaatgtgcagagtgtgggaaagtcttcaggctctgctcgcagcttaatcagcatcagagaatccacacgggagagaaaccctttaaatgcactgagtgtggaaaagccttccgcctgagctcaaaacttattcagcatcaaagaatccacactggggagaagccctacagatgtgaggaatgtggaaaagcttttggtcagagctcaagcctcatccaccatcagagaatccacacaggagagaggccctatggttgtcgtgagtgtgggaaagccttcagccagcagtcgcagctggttagacaccagagaactcacactggggagaggccctacccttgcaaggagtgtgggaaggccttcagccagagctccaccctagcccagcatcaaaggatgcatactggggagaaagctcaaattctaaaagcctcagacagtccaagccttgttgcacatcagagaattcacgctgtagagaaaccatttaagtgtgatgagtgtgggaaagcttttaggtggatctctcgcctgagtcagcatcagctgattcacactggagagaagccttataaatgcaacaagtgtacaaaagcctttggttgtagttcacggcttattcgccatcagagaactcacactggagaaaaaccatttaaatgtgatgagtgtggcaaaggctttgttcagggctcacaccttattcagcatcagcgaatccacactggagagaaaccctatgtgtgtaatgactgtggaaaagccttcagtcagagttccagccttatttaccatcagagaatccataaaggagagaagccctacgaatgcctccaatgcggaaaagccttcagtatgagcacacagcttacaatacatcaaagggttcacactggagagaggccctataaatgtaatgaatgtgggaaagccttcagtcaaaactcaacccttttccaacaccagataattcatgcaggggtgaagccctatgagtgcagtgagtgtggaaaagccttcagccggagctcatatcttattgaacaccagagaatacacactagggcccagtggttttacgaatatgggaatgccctggaagggtccacctttgtgagccgtaaaaaggttaatactataaagaaactgcatcagtgtgaagactgtgagaagatatttaggtggcgttcacacctaattatacaccagagaattcacaccggggagaagccttataaatgcaatgactgtggcaaagcttttaatcgtagctcaaggcttacccagcatcaaaaaattcacatggga

SEQ ID NO: 4033 - DNA, 2091 bp, Homo sapiens
  source 1..2091: mol_type = genomic DNA
atgggattcctggggtgctggtgtgtgtcctttcaggaggtggtaacatttggcgatgtggctgtgcacttctctcgggaggagtggcagtgtctggaccctggccagagggccctctacagggaagtgatgctggagaaccacagcagtgtggctggactagcaggattcctggttttcaagcctgagctgatctctcggctggagcagggagaagagccatgggtcctcgacctgcagggagcagaggggacagaggcaccaaggacctccaagacagattctacgattaggactgaaaatgagcaggcctgtgaggacatggacatcctaaaatcagaatcctatgggacagtggtcagaatctccccacaggactttcctcagaatcctggctttggagacgtttctgattctgaggtctggttagacagtcatctgggcagtcccgggctgaaagtgacaggctttaccttccaaaataactgtttgaatgaggagactgtggttcccaagaccttcaccaaggacgcaccccagggatgtaaggagctgggaagcagcggcctggattgtcagcctcttgaaagtcagggagagagtgcggaagggatgtcccagagatgcgaggagtgtggcaaaggcatcagagccacttcagatatcgctctgcattgggaaattaatacacagaaaattagcagatgtcaagaatgccaaaaaaagttatctgactgcttgcaggggaaacatacaaataactgccatggagagaagccgtacgaatgtgcagagtgtgggaaagtcttcaggctctgctcgcagcttaatcagcatcagagaatccacacgggagagaaaccctttaaatgcactgagtgtggaaaagccttccgcctgagctcaaaacttattcagcatcaaagaatccacactggggagaagccctacagatgtgaggaatgtggaaaagcttttggtcagagctcaagcctcatccaccatcagagaatccacacaggagagaggccctatggttgtcgtgagtgtgggaaagccttcagccagcagtcgcagctggttagacaccagagaactcacactggggagaggccctacccttgcaaggagtgtgggaaggccttcagccagagctccaccctagcccagcatcaaaggatgcatactggggagaaagctcaaattctaaaagcctcagacagtccaagccttgttgcacatcagagaattcacgctgtagagaaaccatttaagtgtgatgagtgtgggaaagcttttaggtggatctctcgcctgagtcagcatcagctgattcacactggagagaagccttataaatgcaacaagtgtacaaaagcctttggttgtagttcacggcttattcgccatcagagaactcacactggagaaaaaccatttaaatgtgatgagtgtggcaaaggctttgttcagggctcacaccttattcagcatcagcgaatccacactggagagaaaccctatgtgtgtaatgactgtggaaaagccttcagtcagagttccagccttatttaccatcagagaatccataaaggagagaagccctacgaatgcctccaatgcggaaaagccttcagtatgagcacacagcttacaatacatcaaagggttcacactggagagaggccctataaatgtaatgaatgtgggaaagccttcagtcaaaactcaacccttttccaacaccagataattcatgcaggggtgaagccctatgagtgcagtgagtgtggaaaagccttcagccggagctcatatcttattgaacaccagagaatacacactagggcccagtggttttacgaatatgggaatgccctggaagggtccacctttgtgagccgtaaaaaggttaatactataaagaaactgcatcagtgtgaagactgtgagaagatatttaggtggcgttcacacctaattatacaccagagaattcacaccggggagaagccttataaatgcaatgactgtggcaaagcttttaatcgtagctcaaggcttacccagcatcaaaaaattcacatggga

SEQ ID NO: 4034 - DNA, 477 bp, Homo sapiens
  source 1..477: mol_type = genomic DNA
atgggattcctggggtgctggtgtgtgtcctttcaggaggtggtaacatttggcgatgtggctgtgcacttctctcgggaggagtggcagtgtctggaccctggccagagggccctctacagggaagtgatgctggagaaccacagcagtgtggctggactagcaggattcctggttttcaagcctgagctgatctctcggctggagcagggagaagagccatgggtcctcgacctgcagggagcagaggggacagaggcaccaaggacctccaagacaggctttctgggccgcccaaccatgggacaagagccaaggcacccacatgcaccgcctgcaactcctgttcctggccttccaaaacactgctcacaaagactgaccctgcctcctcctgggctctcgtcatctcctcttggccacttcctggttcatgatcaggacagaaggaggggaacgtcagccatatggatggtc

SEQ ID NO: 4035 - DNA, 444 bp, Homo sapiens
  source 1..444: mol_type = genomic DNA
atggaggtggtaacatttggcgatgtggctgtgcacttctctcgggaggagtggcagtgtctggaccctggccagagggccctctacagggaagtgatgctggagaaccacagcagtgtggctggactagcaggattcctggttttcaagcctgagctgatctctcggctggagcagggagaagagccatgggtcctcgacctgcagggagcagaggggacagaggcaccaaggacctccaagacaggctttctgggccgcccaaccatgggacaagagccaaggcacccacatgcaccgcctgcaactcctgttcctggccttccaaaacactgctcacaaagactgaccctgcctcctcctgggctctcgtcatctcctcttggccacttcctggttcatgatcaggacagaaggaggggaacgtcagccatatggatggtc

SEQ ID NO: 4036 - DNA, 1770 bp, Homo sapiens
  source 1..1770: mol_type = genomic DNA
atggacatcctaaaatcagaatcctatgggacagtggtcagaatctccccacaggactttcctcagaatcctggctttggagacgtttctgattctgaggtctggttagacagtcatctgggcagtcccgggctgaaagtgacaggctttaccttccaaaataactgtttgaatgaggagactgtggttcccaagaccttcaccaaggacgcaccccagggatgtaaggagctgggaagcagcggcctggattgtcagcctcttgaaagtcagggagagagtgcggaagggatgtcccagagatgcgaggagtgtggcaaaggcatcagagccacttcagatatcgctctgcattgggaaattaatacacagaaaattagcagatgtcaagaatgccaaaaaaagttatctgactgcttgcaggggaaacatacaaataactgccatggagagaagccgtacgaatgtgcagagtgtgggaaagtcttcaggctctgctcgcagcttaatcagcatcagagaatccacacgggagagaaaccctttaaatgcactgagtgtggaaaagccttccgcctgagctcaaaacttattcagcatcaaagaatccacactggggagaagccctacagatgtgaggaatgtggaaaagcttttggtcagagctcaagcctcatccaccatcagagaatccacacaggagagaggccctatggttgtcgtgagtgtgggaaagccttcagccagcagtcgcagctggttagacaccagagaactcacactggggagaggccctacccttgcaaggagtgtgggaaggccttcagccagagctccaccctagcccagcatcaaaggatgcatactggggagaaagctcaaattctaaaagcctcagacagtccaagccttgttgcacatcagagaattcacgctgtagagaaaccatttaagtgtgatgagtgtgggaaagcttttaggtggatctctcgcctgagtcagcatcagctgattcacactggagagaagccttataaatgcaacaagtgtacaaaagcctttggttgtagttcacggcttattcgccatcagagaactcacactggagaaaaaccatttaaatgtgatgagtgtggcaaaggctttgttcagggctcacaccttattcagcatcagcgaatccacactggagagaaaccctatgtgtgtaatgactgtggaaaagccttcagtcagagttccagccttatttaccatcagagaatccataaaggagagaagccctacgaatgcctccaatgcggaaaagccttcagtatgagcacacagcttacaatacatcaaagggttcacactggagagaggccctataaatgtaatgaatgtgggaaagccttcagtcaaaactcaacccttttccaacaccagataattcatgcaggggtgaagccctatgagtgcagtgagtgtggaaaagccttcagccggagctcatatcttattgaacaccagagaatacacactagggcccagtggttttacgaatatgggaatgccctggaagggtccacctttgtgagccgtaaaaaggttaatactataaagaaactgcatcagtgtgaagactgtgagaagatatttaggtggcgttcacacctaattatacaccagagaattcacaccggggagaagccttataaatgcaatgactgtggcaaagcttttaatcgtagctcaaggcttacccagcatcaaaaaattcacatggga

SEQ ID NO: 4037 - DNA, 1035 bp, Homo sapiens
  source 1..1035: mol_type = genomic DNA
atgctggagaactataacagcattgtgtcattggactgggaaactaagcctgagattcacgatgcttcagacaaaaaatcagaaggatcattgagggaatgccttggaaggcaaagtcctctgtgtcctaaatttgaagttcatacacccaatggcaggatgggaacagaaaagcaaagcccttcaggggagactcgtaagaaatccctctcccgggacaaaggcttgcggcgacggtcagccctgtccagggaaattctcactaaagagagacaccaggaatgcagtgactgtgggaagaccttttttgaccactcatccctcacccgccatcagaggactcacactggggagaagccctacgactgccgcgagtgtgggaaagccttcagccacaggagcagcctcagcagacatctgatgtcacacactggggagagcccctacgagtgcagtgtgtgctcaaaagccttctttgaccgttcgtccctaactgtccatcagcgaattcacactggagagaaaccctttcagtgcaacgagtgtggaaaagccttttttgaccgttcatcccttactcgacaccagagaattcacactggagaaagtccttatgaatgtcatcagtgtgggaaagcctttagccagaaaagtattcttactcgccatcagctaatccacactggcaggaagccttatgagtgtaacgagtgcgggaaagctttctatggtgtctcgtctctgaatagacatcagaaagctcatgctggggaccctcgctatcagtgtaacgagtgtggcaaagctttctttgaccgctcatcccttacacagcatcagaagatccacactggagacaagccatatgaatgcagcgaatgcgggaaagcctttagccagcggtgccggctcacgcggcatcagcgtgtccacacgggagagaagccctttgaatgcactgtgtgtgggaaagttttcagttcaaaatcttctgttattcaacatcaacggcgttacgccaaacagggaatagac

SEQ ID NO: 4038 - DNA, 1314 bp, Homo sapiens
  source 1..1314: mol_type = genomic DNA
atggctgctgtgtctccgaccaccagatgccaggaatcagtgacattcgaagacgttgccgtggttttcacagatgaagagtggagtcgtctggtccccatacagagggacctctacaaggaggtgatgctggagaactataacagcattgtgtcattgggccttccagttcctcaacctgatgtgattttccaattgaagagaggggacaagccgtggatggtagatcttcatgggtctgaggagagagaatggccagagagtgtctctctagcccaggaaaaaaactgcatctgttttctgtttgttccagactgggaaactaagcctgagattcacgatgcttcagacaaaaaatcagaaggatcattgagggaatgccttggaaggcaaagtcctctgtgtcctaaatttgaagttcatacacccaatggcaggatgggaacagaaaagcaaagcccttcaggggagactcgtaagaaatccctctcccgggacaaaggcttgcggcgacggtcagccctgtccagggaaattctcactaaagagagacaccaggaatgcagtgactgtgggaagaccttttttgaccactcatccctcacccgccatcagaggactcacactggggagaagccctacgactgccgcgagtgtgggaaagccttcagccacaggagcagcctcagcagacatctgatgtcacacactggggagagcccctacgagtgcagtgtgtgctcaaaagccttctttgaccgttcgtccctaactgtccatcagcgaattcacactggagagaaaccctttcagtgcaacgagtgtggaaaagccttttttgaccgttcatcccttactcgacaccagagaattcacactggagaaagtccttatgaatgtcatcagtgtgggaaagcctttagccagaaaagtattcttactcgccatcagctaatccacactggcaggaagccttatgagtgtaacgagtgcgggaaagctttctatggtgtctcgtctctgaatagacatcagaaagctcatgctggggaccctcgctatcagtgtaacgagtgtggcaaagctttctttgaccgctcatcccttacacagcatcagaagatccacactggagacaagccatatgaatgcagcgaatgcgggaaagcctttagccagcggtgccggctcacgcggcatcagcgtgtccacacgggagagaagccctttgaatgcactgtgtgtgggaaagttttcagttcaaaatcttctgttattcaacatcaacggcgttacgccaaacagggaatagac

SEQ ID NO: 4039 - DNA, 1149 bp, Homo sapiens
  source 1..1149: mol_type = genomic DNA
atgctggagaactataacagcattgtgtcattgggccttccagttcctcaacctgatgtgattttccaattgaagagaggggacaagccgtggatggtagatcttcatgggtctgaggagagagaatggccagagagtgtctctctagactgggaaactaagcctgagattcacgatgcttcagacaaaaaatcagaaggatcattgagggaatgccttggaaggcaaagtcctctgtgtcctaaatttgaagttcatacacccaatggcaggatgggaacagaaaagcaaagcccttcaggggagactcgtaagaaatccctctcccgggacaaaggcttgcggcgacggtcagccctgtccagggaaattctcactaaagagagacaccaggaatgcagtgactgtgggaagaccttttttgaccactcatccctcacccgccatcagaggactcacactggggagaagccctacgactgccgcgagtgtgggaaagccttcagccacaggagcagcctcagcagacatctgatgtcacacactggggagagcccctacgagtgcagtgtgtgctcaaaagccttctttgaccgttcgtccctaactgtccatcagcgaattcacactggagagaaaccctttcagtgcaacgagtgtggaaaagccttttttgaccgttcatcccttactcgacaccagagaattcacactggagaaagtccttatgaatgtcatcagtgtgggaaagcctttagccagaaaagtattcttactcgccatcagctaatccacactggcaggaagccttatgagtgtaacgagtgcgggaaagctttctatggtgtctcgtctctgaatagacatcagaaagctcatgctggggaccctcgctatcagtgtaacgagtgtggcaaagctttctttgaccgctcatcccttacacagcatcagaagatccacactggagacaagccatatgaatgcagcgaatgcgggaaagcctttagccagcggtgccggctcacgcggcatcagcgtgtccacacgggagagaagccctttgaatgcactgtgtgtgggaaagttttcagttcaaaatcttctgttattcaacatcaacggcgttacgccaaacagggaatagac

SEQ ID NO: 4040 - DNA, 1161 bp, Homo sapiens
  source 1..1161: mol_type = genomic DNA
atggctgctgtgtctccgaccaccagatgccaggaatcagtgacattcgaagacgttgccgtggttttcacagatgaagagtggagtcgtctggtccccatacagagggacctctacaaggaggtgatgctggagaactataacagcattgtgtcattggactgggaaactaagcctgagattcacgatgcttcagacaaaaaatcagaaggatcattgagggaatgccttggaaggcaaagtcctctgtgtcctaaatttgaagttcatacacccaatggcaggatgggaacagaaaagcaaagcccttcaggggagactcgtaagaaatccctctcccgggacaaaggcttgcggcgacggtcagccctgtccagggaaattctcactaaagagagacaccaggaatgcagtgactgtgggaagaccttttttgaccactcatccctcacccgccatcagaggactcacactggggagaagccctacgactgccgcgagtgtgggaaagccttcagccacaggagcagcctcagcagacatctgatgtcacacactggggagagcccctacgagtgcagtgtgtgctcaaaagccttctttgaccgttcgtccctaactgtccatcagcgaattcacactggagagaaaccctttcagtgcaacgagtgtggaaaagccttttttgaccgttcatcccttactcgacaccagagaattcacactggagaaagtccttatgaatgtcatcagtgtgggaaagcctttagccagaaaagtattcttactcgccatcagctaatccacactggcaggaagccttatgagtgtaacgagtgcgggaaagctttctatggtgtctcgtctctgaatagacatcagaaagctcatgctggggaccctcgctatcagtgtaacgagtgtggcaaagctttctttgaccgctcatcccttacacagcatcagaagatccacactggagacaagccatatgaatgcagcgaatgcgggaaagcctttagccagcggtgccggctcacgcggcatcagcgtgtccacacgggagagaagccctttgaatgcactgtgtgtgggaaagttttcagttcaaaatcttctgttattcaacatcaacggcgttacgccaaacagggaatagac

SEQ ID NO: 4041 - DNA, 1275 bp, Homo sapiens
  source 1..1275: mol_type = genomic DNA
atggctgctgtgtctccgaccaccagatgccaggaatcagtgacattcgaagacgttgccgtggttttcacagatgaagagtggagtcgtctggtccccatacagagggacctctacaaggaggtgatgctggagaactataacagcattgtgtcattgggccttccagttcctcaacctgatgtgattttccaattgaagagaggggacaagccgtggatggtagatcttcatgggtctgaggagagagaatggccagagagtgtctctctagactgggaaactaagcctgagattcacgatgcttcagacaaaaaatcagaaggatcattgagggaatgccttggaaggcaaagtcctctgtgtcctaaatttgaagttcatacacccaatggcaggatgggaacagaaaagcaaagcccttcaggggagactcgtaagaaatccctctcccgggacaaaggcttgcggcgacggtcagccctgtccagggaaattctcactaaagagagacaccaggaatgcagtgactgtgggaagaccttttttgaccactcatccctcacccgccatcagaggactcacactggggagaagccctacgactgccgcgagtgtgggaaagccttcagccacaggagcagcctcagcagacatctgatgtcacacactggggagagcccctacgagtgcagtgtgtgctcaaaagccttctttgaccgttcgtccctaactgtccatcagcgaattcacactggagagaaaccctttcagtgcaacgagtgtggaaaagccttttttgaccgttcatcccttactcgacaccagagaattcacactggagaaagtccttatgaatgtcatcagtgtgggaaagcctttagccagaaaagtattcttactcgccatcagctaatccacactggcaggaagccttatgagtgtaacgagtgcgggaaagctttctatggtgtctcgtctctgaatagacatcagaaagctcatgctggggaccctcgctatcagtgtaacgagtgtggcaaagctttctttgaccgctcatcccttacacagcatcagaagatccacactggagacaagccatatgaatgcagcgaatgcgggaaagcctttagccagcggtgccggctcacgcggcatcagcgtgtccacacgggagagaagccctttgaatgcactgtgtgtgggaaagttttcagttcaaaatcttctgttattcaacatcaacggcgttacgccaaacagggaatagac

SEQ ID NO: 4042 - DNA, 393 bp, Homo sapiens
  source 1..393: mol_type = genomic DNA
atggaaactcaggctgatctcgtatctcaggaacctcaggccctgcttgacagtgctcttccttcaaaagttcctgccttttccgacaaggacagcctgggggatgagatgttggcggctgcgctcctaaaggccaagtcccaggagctggtaacctttgaggatgtagctgtgtacttcatccggaaggagtggaagcgtttggaacctgctcagagggacctctatagagatgtgatgctggagaattacgggaatgtgttctcactggactggatacacgtctgtttaactacgcaaaaggtaatgctggcatggcttactgggaccctaagtgtggcgaagggactctgctccagtgaactggcgagtgtggaacctcctgacaccttc

SEQ ID NO: 4043 - DNA, 1338 bp, Homo sapiens
  source 1..1338: mol_type = genomic DNA
atggaaactcaggctgatctcgtatctcaggaacctcaggccctgcttgacagtgctcttccttcaaaagttcctgccttttccgacaaggacagcctgggggatgagatgttggcggctgcgctcctaaaggccaagtcccaggagctggtaacctttgaggatgtagctgtgtacttcatccggaaggagtggaagcgtttggaacctgctcagagggacctctatagagatgtgatgctggagaattacgggaatgtgttctcactggatcgtgagaccaggactgaaaatgatcaagaaatttctgaagacacaagatcacatggggtcctactgggaagatttcaaaaggatatttctcagggtctcaagtttaaagaagcctatgaacgagaagtcagtctgaaaaggccgctggggaactcccctggagaaagactgaacaggaaaatgccagattttggtcaagtgacagttgaggagaagctaacccccaggggagagagaagcgagaaatataatgattttgggaacagcttcactgtgaattccaaccttatctcacatcagagactccccgtgggagacagaccccataagtgtgatgaatgtagcaagagctttaatcgaacttcagaccttattcaacatcagagaatccacactggggaaaagccctatgaatgtaatgagtgtgggaaggccttcagccagagctcacaccttattcagcatcagagaatccacactggggaaaaaccttatgaatgtagtgattgtgggaaaaccttcagctgtagctctgccctcattctgcatcggaggatccacacgggggagaaaccctatgaatgtaatgagtgtgggaagaccttcagctggagctccaccctcacccaccatcagagaatccacactggtgagaaaccctacgcctgcaatgaatgtgggaaggccttcagcaggagctcaacccttattcaccatcagagaatccacactggagaaaaaccctatgaatgtaatgaatgtgggaaagccttcagccagagctcacacctctatcagcaccagagaatccacactggagagaagccctacgaatgtatggaatgtggaggaaagtttacctacagttcaggccttattcagcatcaaagaatccacaccggggagaacccctatgaatgtagtgagtgtgggaaagccttcaggtacagctcggctcttgttcgccatcagagaattcacactggagagaagcctttgaatgggatcggcatgagcaaaagctccctcagagttacgaccgagttaaatatcagagagtccacg

SEQ ID NO: 4044 - DNA, 2100 bp, Homo sapiens
  source 1..2100: mol_type = genomic DNA
atggcagccactgagatctctgtcctttctgagcaattcaccaagatcaaagaactcgagttgatgccggaaaaaggcctgaaggaggaggaaaaagacggagtgtgcagagagaaagaccatcggagccctagtgagttggaggccgagcgtacctctggggccttccaggacagcgtcctggaggaagaagtggagctggtgctggccccctcggaggagagcgagaagtacatcctgaccctgcagacggtgcacttcacttctgaagctgtggagttgcaggatatgagcttgctgagcatacagcagcaagaaggggtgcaggtggtggtgcaacagcctggccctgggttgctgtggcttgaggaagggccccggcagagcctgcagcagtgtgtggccattagtatccagcaagagctgtactccccgcaagagatggaggtgttgcagttccacgctctagaggagaatgtgatggtggccagtgaagacagtaagttagcggtgagcctggctgaaactactggactgatcaagctcgaggaagagcaggagaagaaccagttattggctgaaagaacaaaggagcagctcttttttgtggaaacaatgtcaggagatgaaagaagtgacgaaattgttctcacagtttcaaattcaaatgtggaagaacaagaggatcaacctacagctggtcaagcagatgctgaaaaggccaaatctacaaaaaatcaaagaaagacaaagggagcaaaaggaaccttccactgtgatgtctgcatgttcacctcttctagaatgtcaagttttaatcgtcatatgaaaactcacaccagtgagaagcctcacctgtgtcacctctgcctgaaaaccttccgtacggtcactctgctgcggaaccatgttaacacccacacaggaaccaggccctacaagtgtaacgactgcaacatggcatttgtcaccagtggagaactcgtccgacacaggcgctataaacatactcatgagaaaccctttaaatgttccatgtgcaagtatgccagtgtggaggcaagtaaattgaagcgccatgtccgatcccacactggggagcgcccctttcagtgttgccagtgcagctatgccagcagagatacctacaagctgaaacgccacatgagaacgcactcaggtgagaagccttacgaatgccacatctgccacacccgcttcacccagagcgggaccatgaaaatacatattctgcagaaacacggcgaaaatgtccccaaataccagtgtccccattgtgccaccatcattgcacggaaaagcgacctacgtgtgcatatgcgcaacttgcatgcttacagcgctgcagagctgaaatgccgctactgttctgctgtcttccatgaacgctatgccctcattcagcaccagaaaactcataagaatgagaagaggttcaagtgcaaacactgcagttatgcctgcaagcaggaacgtcatatgaccgctcacattcgtacccacactggagagaaaccattcacctgcctttcttgcaataaatgtttccgacagaagcaacttctaaacgctcacttcaggaaataccacgatgcaaatttcatcccgactgtttacaaatgctccaagtgtggcaaaggcttttcccgctggattaacctgcacagacattcggagaagtgtggatcaggggaagcaaagtcggctgcttcaggaaagggaagaagaacaagaaagaggaagcagaccatcctgaaggaagccacaaagggtcagaaggaagctgcgaagggatggaaggaagccgcgaacggagacgaagctgctgctgaggaggcttccaccacgaagggagaacagttcccaggagagatgtttcctgtcgcctgcagagaaaccacagccagagtcaaagaggaagtggatgaaggcgtgacctgtgaaatgctcctcaacacgatggataattccgcaggctgtacaggaaggatgatgttggtatctgcctggcttctggggaggcctcaggaaacttacaatcaaggcagaaggcgaagagggagtaggcgcgtcacatgg

SEQ ID NO: 4045 - DNA, 1989 bp, Homo sapiens
  source 1..1989: mol_type = genomic DNA
atggcagccactgagatctctgtcctttctgagcaattcaccaagatcaaagaactcgagttgatgccggaaaaaggcctgaaggaggaggaaaaagacggagtgtgcagagagaaagaccatcggagccctagtgagttggaggccgagcgtacctctggggccttccaggacagcgtcctggaggaagaagtggagctggtgctggccccctcggaggagagcgagaagtacatcctgaccctgcagacggtgcacttcacttctgaagctgtggagttgcaggatatgagcttgctgagcatacagcagcaagaaggggtgcaggtggtggtgcaacagcctggccctgggttgctgtggcttgaggaagggccccggcagagcctgcagcagtgtgtggccattagtatccagcaagagctgtactccccgcaagagatggaggtgttgcagttccacgctctagaggagaatgtgatggtggccagtgaagacagtaagttagcggtgagcctggctgaaactactggactgatcaagctcgaggaagagcaggagaagaaccagttattggctgaaagaacaaaggagcagctcttttttgtggaaacaatgtcaggagatgaaagaagtgacgaaattgttctcacagtttcaaattcaaatgtggaagaacaagaggatcaacctacagctggtcaagcagatgctgaaaaggccaaatctacaaaaaatcaaagaaagacaaagggagcaaaaggaaccttccactgtgatgtctgcatgttcacctcttctagaatgtcaagttttaatcgtcatatgaaaactcacaccagtgagaagcctcacctgtgtcacctctgcctgaaaaccttccgtacggtcactctgctgcggaaccatgttaacacccacacaggaaccaggccctacaagtgtaacgactgcaacatggcatttgtcaccagtggagaactcgtccgacacaggcgctataaacatactcatgagaaaccctttaaatgttccatgtgcaagtatgccagtgtggaggcaagtaaattgaagcgccatgtccgatcccacactggggagcgcccctttcagtgttgccagtgcagctatgccagcagagatacctacaagctgaaacgccacatgagaacgcactcaggtgagaagccttacgaatgccacatctgccacacccgcttcacccagagcgggaccatgaaaatacatattctgcagaaacacggcgaaaatgtccccaaataccagtgtccccattgtgccaccatcattgcacggaaaagcgacctacgtgtgcatatgcgcaacttgcatgcttacagcgctgcagagctgaaatgccgctactgttctgctgtcttccatgaacgctatgccctcattcagcaccagaaaactcataagaatgagaagaggttcaagtgcaaacactgcagttatgcctgcaagcaggaacgtcatatgaccgctcacattcgtacccacactggagagaaaccattcacctgcctttcttgcaataaatgtttccgacagaagcaacttctaaacgctcacttcaggaaataccacgatgcaaatttcatcccgactgtttacaaatgctccaagtgtggcaaaggcttttcccgctggattaacctgcacagacattcggagaagtgtggatcaggggaagcaaagtcggctgcttcaggaaagggaagaagaacaagaaagaggaagcagaccatcctgaaggaagccacaaagggtcagaaggaagctgcgaagggatggaaggaagccgcgaacggagacgaagctgctgctgaggaggcttccaccacgaagggagaacagttcccaggagagatgtttcctgtcgcctgcagagaaaccacagccagagtcaaagaggaagtggatgaaggcgtgacctgtgaaatgctcctcaacacgatggataag

SEQ ID NO: 4046 - DNA, 1212 bp, Homo sapiens
  source 1..1212: mol_type = genomic DNA
atggcagccactgagatctctgtcctttctgagcaattcaccaagatcaaagaactcgagttgatgccggaaaaaggcctgaaggaggaggaaaaagacggagtgtgcagagagaaagaccatcggagccctagtgagttggaggccgagcgtacctctggggccttccaggacagcgtcctggaggaagaagtggagctggtgctggccccctcggaggagagcgagaagtacatcctgaccctgcagacggtgcacttcacttctgaagctgtggagttgcaggatatgagcttgctgagcatacagcagcaagaaggggtgcaggtggtggtgcaacagcctggccctgggttgctgtggcttgaggaagggccccggcagagcctgcagcagtgtgtggccattagtatccagcaagagctgtactccccgcaagagatggaggtgttgcagttccacgctctagaggagaatgtgatggtggccagtgaagacagtaagttagcggtgagcctggctgaaactactggactgatcaagctcgaggaagagcaggagaagaaccagttattggctgaaagaacaaaggagcagctcttttttgtggaaacaatgtcaggagatgaaagaagtgacgaaattgttctcacagtttcaaattcaaatgtggaagaacaagaggatcaacctacagctggtcaagcagatgctgaaaaggccaaatctacaaaaaatcaaagaaagacaaagggagcaaaaggaaccttccactgtgatgtctgcatgttcacctcttctagaatgtcaagttttaatcgtcatatgaaaactcacaccagtgagaagcctcacctgtgtcacctctgcctgaaaaccttccgtacggtcactctgctgcggaaccatgttaacacccacacaggaaccaggccctacaagtgtaacgactgcaacatggcatttgtcaccagtggagaactcgtccgacacaggcgctataaacatactcatgagaaaccctttaaatgttccatgtgcaagtatgccagtgtggaggtaaagccattcttggacttgaagcttcatggcatcttagtagaggctgctgtacaagttactccaagtgtaactaacagtagaatctgttacaaacaggctttttattattcatataaaatttatgcaggaaataatatgcattctctttta

SEQ ID NO: 4047 - DNA, 1380 bp, Homo sapiens
  source 1..1380: mol_type = genomic DNA
atgtcaggagatgaaagaagtgacgaaattgttctcacagtttcaaattcaaatgtggaagaacaagaggatcaacctacagctggtcaagcagatgctgaaaaggccaaatctacaaaaaatcaaagaaagacaaagggagcaaaaggaaccttccactgtgatgtctgcatgttcacctcttctagaatgtcaagttttaatcgtcatatgaaaactcacaccagtgagaagcctcacctgtgtcacctctgcctgaaaaccttccgtacggtcactctgctgcggaaccatgttaacacccacacaggaaccaggccctacaagtgtaacgactgcaacatggcatttgtcaccagtggagaactcgtccgacacaggcgctataaacatactcatgagaaaccctttaaatgttccatgtgcaagtatgccagtgtggaggcaagtaaattgaagcgccatgtccgatcccacactggggagcgcccctttcagtgttgccagtgcagctatgccagcagagatacctacaagctgaaacgccacatgagaacgcactcaggtgagaagccttacgaatgccacatctgccacacccgcttcacccagagcgggaccatgaaaatacatattctgcagaaacacggcgaaaatgtccccaaataccagtgtccccattgtgccaccatcattgcacggaaaagcgacctacgtgtgcatatgcgcaacttgcatgcttacagcgctgcagagctgaaatgccgctactgttctgctgtcttccatgaacgctatgccctcattcagcaccagaaaactcataagaatgagaagaggttcaagtgcaaacactgcagttatgcctgcaagcaggaacgtcatatgaccgctcacattcgtacccacactggagagaaaccattcacctgcctttcttgcaataaatgtttccgacagaagcaacttctaaacgctcacttcaggaaataccacgatgcaaatttcatcccgactgtttacaaatgctccaagtgtggcaaaggcttttcccgctggattaacctgcacagacattcggagaagtgtggatcaggggaagcaaagtcggctgcttcaggaaagggaagaagaacaagaaagaggaagcagaccatcctgaaggaagccacaaagggtcagaaggaagctgcgaagggatggaaggaagccgcgaacggagacggtgtgatctcagctcaccgcaacctctgcctcctgggttcaagtgattctcatgcctcagtctccggagctgggattacagatgcccgccaccacgcctggctaattgttctattatttttagtagagatggggttttaccatgtctctcactcc

SEQ ID NO: 4048 - DNA, 1449 bp, Homo sapiens
  source 1..1449: mol_type = genomic DNA
atggcagccactgagatctctgtcctttctgagcaattcaccaagatcaaagaactcgagttgatgccggaaaaaggcctgaaggaggaggaaaaagacggagtgtgcagagagaaagaccatcggagccctagtgagttggaggccgagcgtacctctggggccttccaggacagcgtcctggaggaagaagtggagctggtgctggccccctcggaggagagcgagaagtacatcctgaccctgcagacggtgcacttcacttctgaagctgtggagttgcaggatatgagcttgctgagcatacagcagcaagaaggggtgcaggtggtggtgcaacagcctggccctgggttgctgtggcttgaggaagggccccggcagagcctgcagcagtgtgtggccattagtatccagcaagagctgtactccccgcaagagatggaggtgttgcagttccacgctctagaggagaatgtgatggtggccagtgaagacagtaagttagcggtgagcctggctgaaactactggactgatcaagctcgaggaagagcaggagaagaaccagttattggctgaaagaacaaaggagcagctcttttttgtggaaacaatgtcaggagatgaaagaagtgacgaaattgttctcacagtttcaaattcaaatgtggaagaacaagaggatcaacctacagctggtcaagcagatgctgaaaaggccaaatctacaaaaaatcaaagaaagacaaagggagcaaaaggaaccttccactgtgatgtctgcatgttcacctcttctagaatgtcaagttttaatcgtcatatgaaaactcacaccagtgagaagcctcacctgtgtcacctctgcctgaaaaccttccgtacggtcactctgctgcggaaccatgttaacacccacacaggaaccaggccctacaagtgtaacgactgcaacatggcatttgtcaccagtggagaactcgtccgacacaggcgctataaacatactcatgagaaaccctttaaatgttccatgtgcaagtatgccagtgtggaggaacgtcatatgaccgctcacattcgtacccacactggagagaaaccattcacctgcctttcttgcaataaatgtttccgacagaagcaacttctaaacgctcacttcaggaaataccacgatgcaaatttcatcccgactgtttacaaatgctccaagtgtggcaaaggcttttcccgctggattctctgggttgggaactcggaagtggctgaactgggtggtcctggctcagggccactcctgaggctgcagtcaggatgtccgccagggctgcatcatccgaaggctggactggggccagaggatccacttccaggacagctccgccacacaactgctggcaccggcctcagttccttgctacagggacctctctgcagggctgct

SEQ ID NO: 4049 - DNA, 1839 bp, Homo sapiens
  source 1..1839: mol_type = genomic DNA
atggcagccactgagatctctgtcctttctgagcaattcaccaagatcaaagaactcgagttgatgccggaaaaaggcctgaaggaggaggaaaaagacggagtgtgcagagagaaagaccatcggagccctagtgagttggaggccgagcgtacctctggggccttccaggacagcgtcctggaggaagaagtggagctggtgctggccccctcggaggagagcgagaagtacatcctgaccctgcagacggtgcacttcacttctgaagctgtggagttgcaggatatgagcttgctgagcatacagcagcaagaaggggtgcaggtggtggtgcaacagcctggccctgggttgctgtggcttgaggaagggccccggcagagcctgcagcagtgtgtggccattagtatccagcaagagctgtactccccgcaagagatggaggtgttgcagttccacgctctagaggagaatgtgatggtggccagtgaagacagtaagttagcggtgagcctggctgaaactactggactgatcaagctcgaggaagagcaggagaagaaccagttattggctgaaagaacaaaggagcagctcttttttgtggaaacaatgtcaggagatgaaagaagtgacgaaattgttctcacagtttcaaattcaaatgtggaagaacaagaggatcaacctacagctggtcaagcagatgctgaaaaggccaaatctacaaaaaatcaaagaaagacaaagggagcaaaaggaaccttccactgtgatgtctgcatgttcacctcttctagaatgtcaagttttaatcgtcatatgaaaactcacaccagtgagaagcctcacctgtgtcacctctgcctgaaaaccttccgtacggtcactctgctgcggaaccatgttaacacccacacaggaaccaggccctacaagtgtaacgactgcaacatggcatttgtcaccagtggagaactcgtccgacacaggcgctataaacatactcatgagaaaccctttaaatgttccatgtgcaagtatgccagtgtggaggcaagtaaattgaagcgccatgtccgatcccacactggggagcgcccctttcagtgttgccagtgcagctatgccagcagagatacctacaagctgaaacgccacatgagaacgcactcaggtgtgcatatgcgcaacttgcatgcttacagcgctgcagagctgaaatgccgctactgttctgctgtcttccatgaacgctatgccctcattcagcaccagaaaactcataagaatgagaagaggttcaagtgcaaacactgcagttatgcctgcaagcaggaacgtcatatgaccgctcacattcgtacccacactggagagaaaccattcacctgcctttcttgcaataaatgtttccgacagaagcaacttctaaacgctcacttcaggaaataccacgatgcaaatttcatcccgactgtttacaaatgctccaagtgtggcaaaggcttttcccgctggattaacctgcacagacattcggagaagtgtggatcaggggaagcaaagtcggctgcttcaggaaagggaagaagaacaagaaagaggaagcagaccatcctgaaggaagccacaaagggtcagaaggaagctgcgaagggatggaaggaagccgcgaacggagacgaagctgctgctgaggaggcttccaccacgaagggagaacagttcccaggagagatgtttcctgtcgcctgcagagaaaccacagccagagtcaaagaggaagtggatgaaggcgtgacctgtgaaatgctcctcaacacgatggataag

SEQ ID NO: 4050 - DNA, 897 bp, Homo sapiens
  source 1..897: mol_type = genomic DNA
atgttcacctcttctagaatgtcaagttttaatcgtcatatgaaaactcacaccagtgagaagcctcacctgtgtcacctctgcctgaaaaccttccgtacggtcactctgctgcggaaccatgttaacacccacacaggaaccaggccctacaagtgtaacgactgcaacatggcatttgtcaccagtggagaactcgtccgacacaggcgctataaacatactcatgagaaaccctttaaatgttccatgtgcaagtatgccagtgtggaggcaagtaaattgaagcgccatgtccgatcccacactggggagcgcccctttcagtgttgccagtgcagctatgccagcagagatacctacaagctgaaacgccacatgagaacgcactcaggtgagaagccttacgaatgccacatctgccacacccgcttcacccagagcgggaccatgaaaatacatattctgcagaaacacggcgaaaatgtccccaaataccagtgtccccattgtgccaccatcattgcacggaaaagcgacctacgtgtgcatatgcgcaacttgcatgcttacagcgctgcagagctgaaatgccgctactgttctgctgtcttccatgaacgctatgccctcattcagcaccagaaaactcataagaatgagaagaggttcaagtgcaaacactgcagttatgcctgcaagcaggaacgtcatatgaccgctcacattcgtacccacactggagagaaaccattcacctgcctttcttgcaataaatgtttccgacagaagcaacttctaaacgctcacttcaggaaataccacgatgcaaatttcatcccgactgtttacaaatgctccaagtgtggcaaaggcttttcccgctgggtgttgtat

SEQ ID NO: 4051 - DNA, 1209 bp, Homo sapiens
  source 1..1209: mol_type = genomic DNA
atgttcacctcttctagaatgtcaagttttaatcgtcatatgaaaactcacaccagtgagaagcctcacctgtgtcacctctgcctgaaaaccttccgtacggtcactctgctgcggaaccatgttaacacccacacaggaaccaggccctacaagtgtaacgactgcaacatggcatttgtcaccagtggagaactcgtccgacacaggcgctataaacatactcatgagaaaccctttaaatgttccatgtgcaagtatgccagtgtggaggcaagtaaattgaagcgccatgtccgatcccacactggggagcgcccctttcagtgttgccagtgcagctatgccagcagagatacctacaagctgaaacgccacatgagaacgcactcaggtgagaagccttacgaatgccacatctgccacacccgcttcacccagagcgggaccatgaaaatacatattctgcagaaacacggcgaaaatgtccccaaataccagtgtccccattgtgccaccatcattgcacggaaaagcgacctacgtgtgcatatgcgcaacttgcatgcttacagcgctgcagagctgaaatgccgctactgttctgctgtcttccatgaacgctatgccctcattcagcaccagaaaactcataagaatgagaagaggttcaagtgcaaacactgcagttatgcctgcaagcaggaacgtcatatgaccgctcacattcgtacccacactggagagaaaccattcacctgcctttcttgcaataaatgtttccgacagaagcaacttctaaacgctcacttcaggaaataccacgatgcaaatttcatcccgactgtttacaaatgctccaagtgtggcaaaggcttttcccgctggattaacctgcacagacattcggagaagtgtggatcaggggaagcaaagtcggctgcttcaggaaagggaagaagaacaagaaagaggaagcagaccatcctgaaggaagccacaaagggtcagaaggaagctgcgaagggatggaaggaagccgcgaacggagacggtgtgatctcagctcaccgcaacctctgcctcctgggttcaagtgattctcatgcctcagtctccggagctgggattacagatgcccgccaccacgcctggctaattgttctattatttttagtagagatggggttttaccatgtctctcactcc

SEQ ID NO: 4052 - DNA, 1995 bp, Homo sapiens
  source 1..1995: mol_type = genomic DNA
atggcagccactgagatctctgtcctttctgagcaattcaccaagatcaaagaactcgagttgatgccggaaaaaggcctgaaggaggaggaaaaagacggagtgtgcagagagaaagaccatcggagccctagtgagttggaggccgagcgtacctctggggccttccaggacagcgtcctggaggaagaagtggagctggtgctggccccctcggaggagagcgagaagtacatcctgaccctgcagacggtgcacttcacttctgaagctgtggagttgcaggatatgagcttgctgagcatacagcagcaagaaggggtgcaggtggtggtgcaacagcctggccctgggttgctgtggcttgaggaagggccccggcagagcctgcagcagtgtgtggccattagtatccagcaagagctgtactccccgcaagagatggaggtgttgcagttccacgctctagaggagaatgtgatggtggccagtgaagacagtaagttagcggtgagcctggctgaaactactggactgatcaagctcgaggaagagcaggagaagaaccagttattggctgaaagaacaaaggagcagctcttttttgtggaaacaatgtcaggagatgaaagaagtgacgaaattgttctcacagtttcaaattcaaatgtggaagaacaagaggatcaacctacagctggtcaagcagatgctgaaaaggccaaatctacaaaaaatcaaagaaagacaaagggagcaaaaggaaccttccactgtgatgtctgcatgttcacctcttctagaatgtcaagttttaatcgtcatatgaaaactcacaccagtgagaagcctcacctgtgtcacctctgcctgaaaaccttccgtacggtcactctgctgcggaaccatgttaacacccacacaggaaccaggccctacaagtgtaacgactgcaacatggcatttgtcaccagtggagaactcgtccgacacaggcgctataaacatactcatgagaaaccctttaaatgttccatgtgcaagtatgccagtgtggaggcaagtaaattgaagcgccatgtccgatcccacactggggagcgcccctttcagtgttgccagtgcagctatgccagcagagatacctacaagctgaaacgccacatgagaacgcactcaggtgagaagccttacgaatgccacatctgccacacccgcttcacccagagcgggaccatgaaaatacatattctgcagaaacacggcgaaaatgtccccaaataccagtgtccccattgtgccaccatcattgcacggaaaagcgacctacgtgtgcatatgcgcaacttgcatgcttacagcgctgcagagctgaaatgccgctactgttctgctgtcttccatgaacgctatgccctcattcagcaccagaaaactcataagaatgagaagaggttcaagtgcaaacactgcagttatgcctgcaagcaggaacgtcatatgaccgctcacattcgtacccacactggagagaaaccattcacctgcctttcttgcaataaatgtttccgacagaagcaacttctaaacgctcacttcaggaaataccacgatgcaaatttcatcccgactgtttacaaatgctccaagtgtggcaaaggcttttcccgctggattaacctgcacagacattcggagaagtgtggatcaggggaagcaaagtcggctgcttcaggaaagggaagaagaacaagaaagaggaagcagaccatcctgaaggaagccacaaagggtcagaaggaagctgcgaagggatggaaggaagccgcgaacggagacggtgtgatctcagctcaccgcaacctctgcctcctgggttcaagtgattctcatgcctcagtctccggagctgggattacagatgcccgccaccacgcctggctaattgttctattatttttagtagagatggggttttaccatgtctctcactcc

SEQ ID NO: 4053 - DNA, 1881 bp, Homo sapiens
  source 1..1881: mol_type = genomic DNA
atggcagccactgagatctctgtcctttctgagcaattcaccaagatcaaagaactcgagttgatgccggaaaaaggcctgaaggaggaggaaaaagacggagtgtgcagagagaaagaccatcggagccctagtgagttggaggccgagcgtacctctggggccttccaggacagcgtcctggaggaagaagtggagctggtgctggccccctcggaggagagcgagaagtacatcctgaccctgcagacggtgcacttcacttctgaagctgtggagttgcaggatatgagcttgctgagcatacagcagcaagaaggggtgcaggtggtggtgcaacagcctggccctgggttgctgtggcttgaggaagggccccggcagagcctgcagcagtgtgtggccattagtatccagcaagagctgtactccccgcaagagatggaggtgttgcagttccacgctctagaggagaatgtgatggtggccagtgaagacagtaagttagcggtgagcctggctgaaactactggactgatcaagctcgaggaagagcaggagaagaaccagttattggctgaaagaacaaaggagcagctcttttttgtggaaacaatgtcaggagatgaaagaagtgacgaaattgttctcacagtttcaaattcaaatgtggaagaacaagaggatcaacctacagctggtcaagcagatgctgaaaaggccaaatctacaaaaaatcaaagaaagacaaagggagcaaaaggaaccttccactgtgatgtctgcatgttcacctcttctagaatgtcaagttttaatcgtcatatgaaaactcacaccagtgagaagcctcacctgtgtcacctctgcctgaaaaccttccgtacggtcactctgctgcggaaccatgttaacacccacacaggaaccaggccctacaagtgtaacgactgcaacatggcatttgtcaccagtggagaactcgtccgacacaggcgctataaacatactcatgagaaaccctttaaatgttccatgtgcaagtatgccagtgtggaggcaagtaaattgaagcgccatgtccgatcccacactggggagcgcccctttcagtgttgccagtgcagctatgccagcagagatacctacaagctgaaacgccacatgagaacgcactcaggtgagaagccttacgaatgccacatctgccacacccgcttcacccagagcgggaccatgaaaatacatattctgcagaaacacggcgaaaatgtccccaaataccagtgtccccattgtgccaccatcattgcacggaaaagcgacctacgtgtgcatatgcgcaacttgcatgcttacagcgctgcagagctgaaatgccgctactgttctgctgtcttccatgaacgctatgccctcattcagcaccagaaaactcataagaatgagaagaggttcaagtgcaaacactgcagttatgcctgcaagcaggaacgtcatatgaccgctcacattcgtacccacactggagagaaaccattcacctgcctttcttgcaataaatgtttccgacagaagcaacttctaaacgctcacttcaggaaataccacgatgcaaatttcatcccgactgtttacaaatgctccaagtgtggcaaaggcttttcccgctggattctctgggttgggaactcggaagtggctgaactgggtggtcctggctcagggccactcctgaggctgcagtcaggatgtccgccagggctgcatcatccgaaggctggactggggccagaggatccacttccaggacagctccgccacacaactgctggcaccggcctcagttccttgctacagggacctctctgcagggctgct

SEQ ID NO: 4054 - DNA, 1266 bp, Homo sapiens
  source 1..1266: mol_type = genomic DNA
atgtcaggagatgaaagaagtgacgaaattgttctcacagtttcaaattcaaatgtggaagaacaagaggatcaacctacagctggtcaagcagatgctgaaaaggccaaatctacaaaaaatcaaagaaagacaaagggagcaaaaggaaccttccactgtgatgtctgcatgttcacctcttctagaatgtcaagttttaatcgtcatatgaaaactcacaccagtgagaagcctcacctgtgtcacctctgcctgaaaaccttccgtacggtcactctgctgcggaaccatgttaacacccacacaggaaccaggccctacaagtgtaacgactgcaacatggcatttgtcaccagtggagaactcgtccgacacaggcgctataaacatactcatgagaaaccctttaaatgttccatgtgcaagtatgccagtgtggaggcaagtaaattgaagcgccatgtccgatcccacactggggagcgcccctttcagtgttgccagtgcagctatgccagcagagatacctacaagctgaaacgccacatgagaacgcactcaggtgagaagccttacgaatgccacatctgccacacccgcttcacccagagcgggaccatgaaaatacatattctgcagaaacacggcgaaaatgtccccaaataccagtgtccccattgtgccaccatcattgcacggaaaagcgacctacgtgtgcatatgcgcaacttgcatgcttacagcgctgcagagctgaaatgccgctactgttctgctgtcttccatgaacgctatgccctcattcagcaccagaaaactcataagaatgagaagaggttcaagtgcaaacactgcagttatgcctgcaagcaggaacgtcatatgaccgctcacattcgtacccacactggagagaaaccattcacctgcctttcttgcaataaatgtttccgacagaagcaacttctaaacgctcacttcaggaaataccacgatgcaaatttcatcccgactgtttacaaatgctccaagtgtggcaaaggcttttcccgctggattctctgggttgggaactcggaagtggctgaactgggtggtcctggctcagggccactcctgaggctgcagtcaggatgtccgccagggctgcatcatccgaaggctggactggggccagaggatccacttccaggacagctccgccacacaactgctggcaccggcctcagttccttgctacagggacctctctgcagggctgct

SEQ ID NO: 4055 - DNA, 1719 bp, Homo sapiens
  source 1..1719: mol_type = genomic DNA
atggcagccactgagatctctgtcctttctgagcaattcaccaagatcaaagaactcgagttgatgccggaaaaaggcctgaaggaggaggaaaaagacggagtgtgcagagagaaagaccatcggagccctagtgagttggaggccgagcgtacctctggggccttccaggacagcgtcctggaggaagaagtggagctggtgctggccccctcggaggagagcgagaagtacatcctgaccctgcagacggtgcacttcacttctgaagctgtggagttgcaggatatgagcttgctgagcatacagcagcaagaaggggtgcaggtggtggtgcaacagcctggccctgggttgctgtggcttgaggaagggccccggcagagcctgcagcagtgtgtggccattagtatccagcaagagctgtactccccgcaagagatggaggtgttgcagttccacgctctagaggagaatgtgatggtggccagtgaagacagtaagttagcggtgagcctggctgaaactactggactgatcaagctcgaggaagagcaggagaagaaccagttattggctgaaagaacaaaggagcagctcttttttgtggaaacaatgtcaggagatgaaagaagtgacgaaattgttctcacagtttcaaattcaaatgtggaagaacaagaggatcaacctacagctggtcaagcagatgctgaaaaggccaaatctacaaaaaatcaaagaaagacaaagggagcaaaaggaaccttccactgtgatgtctgcatgttcacctcttctagaatgtcaagttttaatcgtcatatgaaaactcacaccagtgagaagcctcacctgtgtcacctctgcctgaaaaccttccgtacggtcactctgctgcggaaccatgttaacacccacacaggaaccaggccctacaagtgtaacgactgcaacatggcatttgtcaccagtggagaactcgtccgacacaggcgctataaacatactcatgagaaaccctttaaatgttccatgtgcaagtatgccagtgtggaggcaagtaaattgaagcgccatgtccgatcccacactggggagcgcccctttcagtgttgccagtgcagctatgccagcagagatacctacaagctgaaacgccacatgagaacgcactcaggtgagaagccttacgaatgccacatctgccacacccgcttcacccagagcgggaccatgaaaatacatattctgcagaaacacggcgaaaatgtccccaaataccagtgtccccattgtgccaccatcattgcacggaaaagcgacctacgtgtgcatatgcgcaacttgcatgcttacagcgctgcagagctgaaatgccgctactgttctgctgtcttccatgaacgctatgccctcattcagcaccagaaaactcataagaatgagaagaggttcaagtgcaaacactgcagttatgcctgcaagcaggaacgtcatatgaccgctcacattcgtacccacactggagagaaaccattcacctgcctttcttgcaataaatgtttccgacagaagcaacttctaaacgctcacttcaggaaataccacgatgcaaatttcatcccgactgtttacaaatgctccaagtgtggcaaaggcttttcccgctggattacctcaaaatggagtggcttaaaaccacaaacatttatcacc

SEQ ID NO: 4056 - DNA, 360 bp, Homo sapiens
  source 1..360: mol_type = genomic DNA
atggctgcagggtggctgacaacctggtcacagaactcagtaaccttccaggaagtggcagtggacttttcccaggaggagtgggcattgctggaccctgctcaaaaaaatctatacaaagatgtgatgctggagaactttaggaacctggcctcagtagggtatcagctctgcagacacagtctgatctccaaggtggatcaagaacagctgaagacagatgaaagaggaattttacaaggtgactgtgcagactgggaaactcaacttaaaccaaaagatacaattgctatgcagaacattcctgggggaaaaacatccaatggcataaacacgaatcctcatggaagagaattcctg

SEQ ID NO: 4057 - DNA, 855 bp, Homo sapiens
  source 1..855: mol_type = genomic DNA
atgtcggacgatttcttatggtttgaaggcatagctttccctactatgggtttcagatccgaaaccttaagaaaagtacgtgatgagttcgtgataagggatgaagatgtaataatattgacttaccccaaatcaggaacaaactggttggctgagattctctgcctgatgcactccaagggggatgccaagtggatccaatctgtgcccatctgggagcgatcaccctgggtagagagtgagattgggtatacagcactcagtgaaacggagagtccacgtttattctcctcccacctccccatccagttattccccaagtctttcttcagttccaaggccaaggtgatttatctcatgagaaatcccagagatgttttggtgtctggttattttttctggaaaaacatgaagtttattaagaaaccaaagtcatgggaagaatattttgaatggttttgtcaaggaactgtgctatatgggtcatggtttgaccacattcatggctggatgcccatgagagaggagaaaaacttcctgttactgagttatgaggagctgaaacaggacacaggaagaaccatagagaagatctgtcaattcctgggaaagacgttagaacccgaagaactgaacttaattctcaagaacagctcctttcagagcatgaaagaaaacaagatgtccaattattccctcctgagtgttgattatgtagtggacaaagcacaacttctgagaaaaggtgtatctggggactggaaaaatcacttcacagtggcccaagctgaagactttgataaattgttccaagagaagatggcagatcttcctcgagagctgttcccatgggaa

SEQ ID NO: 4058 - DNA, 2406 bp, Homo sapiens
  source 1..2406: mol_type = genomic DNA
atgcctcgaattatgatcaaggggggcgtatggaggaataccgaggatgaaattctgaaagcagcggtaatgaaatatgggaaaaatcagtggtctaggattgcctcattgctgcatagaaaatcagcaaagcagtgcaaagccagatggtatgaatggctggatccaagcattaagaagacagaatggtccagagaagaagaggaaaaactcttgcacttggccaagttgatgccaactcagtggaggaccattgctccaatcattggaagaacagcggcccagtgcttagaacactatgaatttcttctggataaagctgcccaaagagacaatgaagaggaaacaacagatgatccacgaaaacttaaacctggagaaatagatccaaatccagaaacaaaaccagcgcggcctgatccaattgatatggatgaggatgaacttgagatgctttctgaagccagagcccgcttggctaatactcagggaaagaaggccaagaggaaagcaagagagaaacaattggaagaagcaagacgtcttgctgccctccaaaaaagaagagaacttcgagcagctggcatagaaattcagaagaaaagaaaaaggaagagaggagttgattataatgccgaaatcccatttgaaaaaaagcctgcccttggtttttatgatacttctgaggaaaactaccaagctcttgacgcagatttcaggaaattaagacaacaggatcttgatggggagctaagatctgaaaaagaaggaagagatagaaaaaaagacaaacagcatttgaaaaggaaaaaagaatctgatttaccatcagctattcttcaaactagtggtgtttctgaatttactaaaaagagaagcaaactagtacttcctgcccctcagatttcagatgcagaactccaggaagttgtaaaagtaggccaagcgagtgaaattgcacgtcaaactgccgaggaatctggcataacaaattctgcttccagtacacttttgtctgagtacaatgtcaccaacaacagcgttgctcttagaacaccacgaacaccagcttcccaggacagaattctgcaggaagcccagaacctcatggccctcaccaatgtggacaccccattgaaaggtggacttaataccccattgcatgagagtgacttctcaggtgtaactccacagcgacaagttgtacagactccaaacacagttctctctactccattcaggactccttctaatggagctgaagggctgactccccggagtggaacaactcccaaaccagttattaactctactccgggtagaactcctcttcgagacaagttaaacattaatcccgaggatggaatggcagactatagtgatccctcttacgtgaagcagatggaaagagaatcccgagaacatctccgtttagggttgttgggccttcctgcccctaagaatgattttgaaattgttctaccagaaaatgccgagaaggagctggaagaacgtgaaatagatgatacttacattgaagatgctgctgatgtggatgctcgaaagcaggccatacgagatgcagagcgtgtaaaggaaatgaaacgaatgcataaagctgtccagaaagatctgccaagaccatcagaagtaaatgaaactattctaagacccttaaatgtagaaccgcctttaacagatttacagaaaagtgaagaactaatcaaaaaagaaatgatcacaatgcttcattatgaccttctacatcacccttatgaaccatctggaaataaaaaaggcaaaactgtagggtttggtaccaataattcagagcacattacctatctggaacataatccttatgaaaagttctccaaagaagagctgaaaaaggcccaggatgttttggtgcaggagatggaagtggttaaacaaggaatgagccatggagagctctcaagtgaagcttataaccaggtgtgggaagaatgctacagtcaagttttatatcttcctgggcagagccgctacacacgggccaatctggctagtaaaaaggacagaattgaatcacttgaaaagaggctcgagataaacaggggtcacatgacgacagaagccaagagggctgcaaagatggaaaagaagatgaaaattttgcttgggggttaccagtctcgtgctatggggctcatgaaacagttgaatgacttatgggaccaaattgaacaggctcacttggagttacgcacttttgaagaactcaagaaacatgaagattctgctattccccggaggctagagtgtctaaaagaagacgttcagcgacaacaagaaagagaaaaggaacttcaacatagatatgctgatttgctgctggagaaagagactttaaagtcaaaattc

SEQ ID NO: 4059 - DNA, 1992 bp, Homo sapiens
  source 1..1992: mol_type = genomic DNA
atgggagatgatggcagccccccagcgaaaaaaatgataacggacattcatgcaaatggaaaaacgataaacaaggtgccaacagttaagaaggaacacttggatgactatggagaagcaccagtggaaactgatggagagcatgttaagcgaacctgtacttctgttcctgaaactttgcatttaaatcccagtttgaaacacacattggcacaattccatttaagtagtcagagctcgctgggtggaccagcagcattttctgctcggcattcccaagaaagcatgtcgcctactgtatttctgcctcttccatcacctcaggttcttcctggcccattgctcatcccttcagatagctccacagaactcactcagactgtgttggaaggggaatctatttcttgttttcaagttggaggagaaaagagactctgtttgccccaagtcttaaattctgttctccgagaatttacactccagcaaataaatacagtgtgtgatgaactgtacatatattgttcaaggtgtacttcagaccagcttcatatcttaaaggtactgggcatacttccattcaatgccccatcctgtgggctgattacattaactgatgcacaaagattatgtaatgctttattgcggccacgaacttttcctcaaaatggtagcgtacttcctgctaaaagctcattggcccagttaaaggaaactggcagtgcctttgaagtggagcatgaatgcctaggcaaatgtcagggtttatttgcaccccagttttatgttcagcctgatgctccgtgtattcaatgtctggagtgttgtggaatgtttgcaccccagacgtttgtgatgcattctcacagatcacctgacaaaagaacttgccactggggctttgaatcagctaaatggcattgctatcttcatgtgaaccaaaaatacttaggaacacctgaagaaaagaaactgaagataattttagaagaaatgaaggagaagtttagcatgagaagtggaaagagaaatcaatccaagacagatgcaccatcaggaatggaattacagtcatggtatcctgttataaagcaggaaggtgaccatgtttctcagacacattcatttttacaccccagctactacttatacatgtgtgataaagtggttgccccaaatgtgtcacttacttctgctgtatcccagtctaaagagctcacaaagacagaggcaagtaagtccatatcaagacagtcagagaaggctcacagtagtggtaaacttcaaaaaacagtgtcttatccagatgtctcacttgaggaacaggagaaaatggatttaaaaacaagtagagaattatgtagccgtttagatgcatcaatctcaaataattctacaagtaaaaggaaatctgagtctgccacttgcaacttagtcagagacataaacaaagtgggaattggccttgttgctgccgcttcatctccgcttcttgtgaaagatgtcatttgtgaggatgataagggaaaaatcatggaagaagtaatgagaacttatttaaaacaacaggaaaaactaaacttgattttgcaaaagaagcaacaacttcagatggaagtaaaaatgttgagtagttcaaaatctatgaaggaactcactgaagaacagcagaatttacagaaagagcttgaatctttgcagaatgaacatgctcaaagaatggaagaattttatgttgaacagaaagacttagagaaaaaattggagcagataatgaagcaaaaatgtacctgtgactcaaatttagaaaaagacaaagaggctgaatatgcaggacagttggcagaactgaggcagagattggaccatgctgaggccgataggcaagaactccaagatgaactcagacaggaacgggaagcaagacagaagttagagatgatgataaaagagctaaagctgcaaattctgaaatcatcaaagactgctaaagaa

SEQ ID NO: 4060 - DNA, 1914 bp, Homo sapiens
  source 1..1914: mol_type = genomic DNA
atggaaaacctccagacaaatttctccttggttcagggctcaactaaaaaactgaatgggatgggagatgatggcagccccccagcgaaaaaaatgataacggacattcatgcaaatggaaaaacgataaacaaggtgccaacagttaagaaggaacacttggatgactatggagaagcaccagtggaaactgatggagagcatgttaagcgaacctgtacttctgttcctgaaactttgcatttaaatcccagtttgaaacacacattggcacaattccatttaagtagtcagagctcgctgggtggaccagcagcattttctgctcggcattcccaagaaagcatgtcgcctactgtatttctgcctcttccatcacctcaggttcttcctggcccattgctcatcccttcagatagctccacagaactcactcagactgtgttggaaggggaatctatttcttgttttcaagttggaggagaaaagagactctgtttgccccaagtcttaaattctgttctccgagaatttacactccagcaaataaatacagtgtgtgatgaactgtacatatattgttcaaggtgtacttcagaccagcttcatatcttaaaggtactgggcatacttccattcaatgccccatcctgtgggctgattacattaactgatgcacaaagattatgtaatgctttattgcggccacgaacttttcctcaaaatggtagcgtacttcctgctaaaagctcattggcccagttaaaggaaactggcagtgcctttgaagtggagcatgaatgcctaggcaaatgtcagggtttatttgcaccccagttttatgttcagcctgatgctccgtgtattcaatgtctggagtgttgtggaatgtttgcaccccagacgtttgtgatgcattctcacagatcacctgacaaaagaacttgccactggggctttgaatcagctaaatggcattgctatcttcatgtgaaccaaaaatacttaggaacacctgaagaaaagaaactgaagataattttagaagaaatgaaggagaagtttagcatgagaagtggaaagagaaatcaatccaagacagatgcaccatcaggaatggaattacagtcatggtatcctgttataaagcaggaaggtgaccatgtttctcagacacattcatttttacaccccagctactacttatacatgtgtgataaagtggttgccccaaatgtgtcacttacttctgctgtatcccagtctaaagagctcacaaagacagaggcaaatgcatcaatctcaaataattctacaagtaaaaggaaatctgagtctgccacttgcaacttagtcagagacataaacaaagtgggaattggccttgttgctgccgcttcatctccgcttcttgtgaaagatgtcatttgtgaggatgataagggaaaaatcatggaagaagtaatgagaacttatttaaaacaacaggaaaaactaaacttgattttgcaaaagaagcaacaacttcagatggaagtaaaaatgttgagtagttcaaaatctatgaaggaactcactgaagaacagcagaatttacagaaagagcttgaatctttgcagaatgaacatgctcaaagaatggaagaattttatgttgaacagaaagacttagagaaaaaattggagcagataatgaagcaaaaatgtacctgtgactcaaatttagaaaaagacaaagaggctgaatatgcaggacagttggcagaactgaggcagagattggaccatgctgaggccgataggcaagaactccaagatgaactcagacaggaacgggaagcaagacagaagttagagatgatgataaaagagctaaagctgcaaattctgaaatcatcaaagactgctaaagaa

SEQ ID NO: 4061 - DNA, 2052 bp, Homo sapiens
  source 1..2052: mol_type = genomic DNA
atggaaaacctccagacaaatttctccttggttcagggctcaactaaaaaactgaatgggatgggagatgatggcagccccccagcgaaaaaaatgataacggacattcatgcaaatggaaaaacgataaacaaggtgccaacagttaagaaggaacacttggatgactatggagaagcaccagtggaaactgatggagagcatgttaagcgaacctgtacttctgttcctgaaactttgcatttaaatcccagtttgaaacacacattggcacaattccatttaagtagtcagagctcgctgggtggaccagcagcattttctgctcggcattcccaagaaagcatgtcgcctactgtatttctgcctcttccatcacctcaggttcttcctggcccattgctcatcccttcagatagctccacagaactcactcagactgtgttggaaggggaatctatttcttgttttcaagttggaggagaaaagagactctgtttgccccaagtcttaaattctgttctccgagaatttacactccagcaaataaatacagtgtgtgatgaactgtacatatattgttcaaggtgtacttcagaccagcttcatatcttaaaggtactgggcatacttccattcaatgccccatcctgtgggctgattacattaactgatgcacaaagattatgtaatgctttattgcggccacgaacttttcctcaaaatggtagcgtacttcctgctaaaagctcattggcccagttaaaggaaactggcagtgcctttgaagtggagcatgaatgcctaggcaaatgtcagggtttatttgcaccccagttttatgttcagcctgatgctccgtgtattcaatgtctggagtgttgtggaatgtttgcaccccagacgtttgtgatgcattctcacagatcacctgacaaaagaacttgccactggggctttgaatcagctaaatggcattgctatcttcatgtgaaccaaaaatacttaggaacacctgaagaaaagaaactgaagataattttagaagaaatgaaggagaagtttagcatgagaagtggaaagagaaatcaatccaagacagatgcaccatcaggaatggaattacagtcatggtatcctgttataaagcaggaaggtgaccatgtttctcagacacattcatttttacaccccagctactacttatacatgtgtgataaagtggttgccccaaatgtgtcacttacttctgctgtatcccagtctaaagagctcacaaagacagaggcaagtaagtccatatcaagacagtcagagaaggctcacagtagtggtaaacttcaaaaaacagtgtcttatccagatgtctcacttgaggaacaggagaaaatggatttaaaaacaagtagagaattatgtagccgtttagatgcatcaatctcaaataattctacaagtaaaaggaaatctgagtctgccacttgcaacttagtcagagacataaacaaagtgggaattggccttgttgctgccgcttcatctccgcttcttgtgaaagatgtcatttgtgaggatgataagggaaaaatcatggaagaagtaatgagaacttatttaaaacaacaggaaaaactaaacttgattttgcaaaagaagcaacaacttcagatggaagtaaaaatgttgagtagttcaaaatctatgaaggaactcactgaagaacagcagaatttacagaaagagcttgaatctttgcagaatgaacatgctcaaagaatggaagaattttatgttgaacagaaagacttagagaaaaaattggagcagataatgaagcaaaaatgtacctgtgactcaaatttagaaaaagacaaagaggctgaatatgcaggacagttggcagaactgaggcagagattggaccatgctgaggccgataggcaagaactccaagatgaactcagacaggaacgggaagcaagacagaagttagagatgatgataaaagagctaaagctgcaaattctgaaatcatcaaagactgctaaagaa

SEQ ID NO: 4062 - DNA, 1290 bp, Homo sapiens
  source 1..1290: mol_type = genomic DNA
atggacgaacggctactggggccgccccctccaggcgggggccgggggggcctgggattggtgagtggggagcctgggggccctggcgagcctcccggtggcggagaccccggtgggggtagcgggggggtcccgggaggccgagggaagcaagacatcggggacattctgcagcagataatgaccatcaccgaccagagcctggacgaggcccaggccaagaaacacgccctaaactgccaccgaatgaagcctgctctctttagcgtcctgtgtgaaatcaaggagaaaactggcctcagcattcggagctcccaggaggaggagccggtggacccacagctgatgcgcttggacaacatgcttctggcagagggtgtggctgggcccgagaaagggggcggctcagcagcagcagctgcagccgctgcagcctctggtggtggtgtgtcccctgacaactccatcgaacactcggactatcgcagcaaacttgcccagatccgtcacatataccactcggagctggagaagtatgagcaggcatgtaatgagttcacgacccatgtcatgaacctgctgagggagcagagccgcaccaggcccgtggcccccaaagagatggaacgcatggtgagcatcatccatcgaaagttcagcgccatccagatgcagctgaagcagagcacctgcgaggctgtgatgatcctgcgctcccgtttcctggatgccagacgaaagcgccgtaacttcagcaaacaggccactgaggtcctaaatgagtatttctactcccacctgagtaacccatatcctagtgaggaggccaaggaggagcttgccaagaagtgtggcatcaccgtgtctcaggtctccaactggtttggcaacaagaggattcgctataagaaaaacatcggaaagttccaagaggaggcaaacatctatgctgtcaagaccgccgtgtcagtcacccaggggggccacagccgcaccagctccccgacacccccttcctctgcaggctctggcggctctttcaatctctcaggatctggagacatgtttctggggatgcctgggctcaacggagattcctattctgcttcccaggtggaatcactccgacactcgatggggccagggggctatggggataacctcgggggaggccagatgtacagcccacgggaaatgagggcaaatggcagctggcaagaggctgtgaccccctcttcagtgacatccccaacggagggaccagggagtgttcactctgatacctccaac

SEQ ID NO: 4063 - DNA, 1077 bp, Homo sapiens
  source 1..1077: mol_type = genomic DNA
atgaaaccagcgctcttcagcgtcctgtgtgagatcaaagagaaaacaggtctcagcatcagaggagcccaggaggaggaccctcccgatccccagctaatgagactggacaatatgcttttggcagaaggggtttcaggtcctgagaaaggtgggggatcggcggcagcagctgcagccgcggcagcctctggaggttcttcagataactctattgaacactcagattacagagccaaattgacccagatcagacaaatctatcacacagaactggagaaatatgaacaggcatgtaatgaatttactacacatgtgatgaaccttctccgagaacagagtagaacacgtcccatttctccaaaagagattgaaagaatggtgggcatcatccatcgaaaatttagttccattcagatgcagctcaaacaaagcacttgtgaagcagttatgattttaagatcaaggttccttgatgccagacggaaaaggcgtaacttcagtaaacaggccacagaaatcttgaatgaatatttttactcacacctcagcaacccctaccccagtgaagaagccaaagaggagctggccaagaaatgcagcatcacagtgtcacaggtatccaattggtttggcaacaaacgaatcaggtacaagaagaacattggcaagtttcaggaagaagccaacctctatgctgcaaagacggccgtgacagctgcacacgcagtagcagcagctgtgcagaacaaccagaccaattcgcccaccacaccaaattccggttcttctggttcttttaacctcccaaattctggggacatgttcatgaacatgcagagtctgaatggggattcttaccaagggtcccaagtcggagccaatgtgcaatcacaggtggataccctccgtcatgttatcaatcagacgggaggctacagtgatggccttggaggaaattcactgtacagtccacataatttaaatgctaatggaggctggcaggacgcaacaactccatcttctgtgacttctcctacagaaggcccaggaagtgtgcactcggatacctctaac

SEQ ID NO: 4064 - DNA, 1302 bp, Homo sapiens
  source 1..1302: mol_type = genomic DNA
atggacgatcaatccaggatgctgcagactctggccggggtgaacctggctggccactcggtgcaggggggcatggccctgccgcctcccccgcacggccacgaaggggcggacggcgacggcaggaagcaggacatcggcgacatcctccaccagatcatgaccatcaccgaccagagcttggacgaggcgcaagcaaagaaacatgccctgaactgtcacagaatgaaaccagcgctcttcagcgtcctgtgtgagatcaaagagaaaacaggtctcagcatcagaggagcccaggaggaggaccctcccgatccccagctaatgagactggacaatatgcttttggcagaaggggtttcaggtcctgagaaaggtgggggatcggcggcagcagctgcagccgcggcagcctctggaggttcttcagataactctattgaacactcagattacagagccaaattgacccagatcagacaaatctatcacacagaactggagaaatatgaacaggcatgtaatgaatttactacacatgtgatgaaccttctccgagaacagagtagaacacgtcccatttctccaaaagagattgaaagaatggtgggcatcatccatcgaaaatttagttccattcagatgcagctcaaacaaagcacttgtgaagcagttatgattttaagatcaaggttccttgatgccagacggaaaaggcgtaacttcagtaaacaggccacagaaatcttgaatgaatatttttactcacacctcagcaacccctaccccagtgaagaagccaaagaggagctggccaagaaatgcagcatcacagtgtcacaggtatccaattggtttggcaacaaacgaatcaggtacaagaagaacattggcaagtttcaggaagaagccaacctctatgctgcaaagacggccgtgacagctgcacacgcagtagcagcagctgtgcagaacaaccagaccaattcgcccaccacaccaaattccggttcttctggttcttttaacctcccaaattctggggacatgttcatgaacatgcagagtctgaatggggattcttaccaagggtcccaagtcggagccaatgtgcaatcacaggtggataccctccgtcatgttatcaatcagacgggaggctacagtgatggccttggaggaaattcactgtacagtccacataatttaaatgctaatggaggctggcaggacgcaacaactccatcttctgtgacttctcctacagaaggcccaggaagtgtgcactcggatacctctaac

SEQ ID NO: 4065 - DNA, 1053 bp, Homo sapiens
  source 1..1053: mol_type = genomic DNA
atggacgatcaatccaggatgctgcagactctggccggggtgaacctggctggccactcggtgcaggggggcatggccctgccgcctcccccgcacggccacgaaggggcggacggcgacggcaggaagcaggacatcggcgacatcctccaccagatcatgaccatcaccgaccagagcttggacgaggcgcaagcaaagaaacatgccctgaactgtcacagaatgaaaccagcgctcttcagcgtcctgtgtgagatcaaagagaaaacaggtctcagcatcagaggagcccaggaggaggaccctcccgatccccagctaatgagactggacaatatgcttttggcagaaggggtttcaggtcctgagaaaggtgggggatcggcggcagcagctgcagccgcggcagcctctggaggttcttcagataactctattgaacactcagattacagagccaaattgacccagatcagacaaatctatcacacagaactggagaaatatgaacaggcatgtaatgaatttactacacatgtgatgaaccttctccgagaacagagtagaacacgtcccatttctccaaaagagattgaaagaatggtgggcatcatccatcgaaaatttagttccattcagatgcagctcaaacaaagcacttgtgaagcagttatgattttaagatcaaggttccttgatgccagacggaaaaggcgtaacttcagtaaacaggccacagaaatcttgaatgaatatttttactcacacctcagcaacccctaccccagtgaagaagccaaagaggagctggccaagaaatgcagcatcacagtgtcacaggtatccaattggtttggcaacaaacgaatcaggtacaagaagaacattggcaagtttcaggaagaagccaacctctatgctgcaaagacggccgtgacagctgcacacgcagtagcagcagctgtgcagaacaaccagaccaattcgcccaccacaccaaattccggtggataccctccgtcatgttatcaatcagacgggaggctacag

SEQ ID NO: 4066 - DNA, 1365 bp, Homo sapiens
  source 1..1365: mol_type = genomic DNA
atggacgatcaatccaggatgctgcagactctggccggggtgaacctggctggccactcggtgcaggggggcatggccctgccgcctcccccgcacggccacgaaggggcggacggcgacggcaggaagcaggacatcggcgacatcctccaccagatcatgaccatcaccgaccagagcttggacgaggcgcaagcaaagaaacatgccctgaactgtcacagaatgaaaccagcgctcttcagcgtcctgtgtgagatcaaagagaaaacaggtctcagcatcagaggagcccaggaggaggaccctcccgatccccagctaatgagactggacaatatgcttttggcagaaggggtttcaggtcctgagaaaggtgggggatcggcggcagcagctgcagccgcggcagcctctggaggttcttcagataactctattgaacactcagattacagagccaaattgacccagatcagacaaatctatcacacagaactggagaaatatgaacaggcatgtaatgaatttactacacatgtgatgaaccttctccgagaacagagtagaacacgtcccatttctccaaaagagattgaaagaatggtgggcatcatccatcgaaaatttagttccattcagatgcagctcaaacaaagcacttgtgaagcagttatgattttaagatcaaggttccttgatgccagacggaaaaggcgtaacttcagtaaacaggccacagaaatcttgaatgaatatttttactcacacctcagcaacccctaccccagtgaagaagccaaagaggagctggccaagaaatgcagcatcacagtgtcacagagtcttgtaaaggatccaaaagaaagagggagcaaaggttctgacatccagccaactagcgtggtatccaattggtttggcaacaaacgaatcaggtacaagaagaacattggcaagtttcaggaagaagccaacctctatgctgcaaagacggccgtgacagctgcacacgcagtagcagcagctgtgcagaacaaccagaccaattcgcccaccacaccaaattccggttcttctggttcttttaacctcccaaattctggggacatgttcatgaacatgcagagtctgaatggggattcttaccaagggtcccaagtcggagccaatgtgcaatcacaggtggataccctccgtcatgttatcaatcagacgggaggctacagtgatggccttggaggaaattcactgtacagtccacataatttaaatgctaatggaggctggcaggacgcaacaactccatcttctgtgacttctcctacagaaggcccaggaagtgtgcactcggatacctctaac

SEQ ID NO: 4067 - DNA, 1290 bp, Homo sapiens
  source 1..1290: mol_type = genomic DNA
atggacgagcagcccaggctgatgcattcccatgctggggtcgggatggccggacaccccggcctgtcccagcacttgcaggatggggccggagggaccgagggggagggcgggaggaagcaggacattggagacattttacagcaaattatgaccatcacagaccagagtttggatgaggcgcaggccagaaaacatgctttaaactgccacagaatgaagcctgccttgtttaatgtgttgtgtgaaatcaaagaaaaaacagttttgagtatccgaggagcccaggaggaggaacccacagacccccagctgatgcggctggacaacatgctgttagcggaaggcgtggcggggcctgagaagggcggagggtcggcggcagcggcggcagcggcggcggcttctggaggggcaggttcagacaactcagtggagcattcagattacagagccaaactctcacagatcagacaaatctaccatacggagctggagaaatacgagcaggcctgcaacgagttcaccacccacgtgatgaatctcctgcgagagcaaagccggaccaggcccatctccccaaaggagattgagcggatggtcagcatcatccaccgcaagttcagctccatccagatgcagctcaagcagagcacgtgcgaggcggtgatgatcctgcgttcccgatttctggatgcgcggcggaagagacggaatttcaacaagcaagcgacagaaatcctgaatgaatatttctattcccatctcagcaacccttaccccagtgaggaagccaaagaggagttagccaagaagtgtggcatcacagtctcccaggtatcaaactggtttggaaataagcgaatccggtacaagaagaacataggtaaatttcaagaggaagccaatatttatgctgccaaaacagctgtcactgctaccaatgtgtcagcccatggaagccaagctaactcgccctcaactcccaactcggctggttcttccagttcttttaacatgtcaaactctggagatttgttcatgagcgtgcagtcactcaatggggattcttaccaaggggcccaggttggagccaacgtgcaatcacaggtggatacccttcgccatgttatcagccagacaggaggatacagtgatggactcgcagccagtcagatgtacagtccgcagggcatcagtgctaatggaggttggcaggatgctactaccccttcatcagtgacctcccctacagaaggccctggcagtgttcactctgatacctccaac

SEQ ID NO: 4068 - DNA, 1260 bp, Homo sapiens
  source 1..1260: mol_type = genomic DNA
atggacgagcagcccaggctgatgcattcccatgctggggtcgggatggccggacaccccggcctgtcccagcacttgcaggatggggccggagggaccgagggggagggcgggaggaagcaggacattggagacattttacagcaaattatgaccatcacagaccagagtttggatgaggcgcaggccagaaaacatgctttaaactgccacagaatgaagcctgccttgtttaatgtgttgtgtgaaatcaaagaaaaaacagttttgagtatccgaggagcccaggaggaggaacccacagacccccagctgatgcggctggacaacatgctgttagcggaaggcgtggcggggcctgagaagggcggagggtcggcggcagcggcggcagcggcggcggcttctggaggggcaggttcagacaactcagtggagcattcagattacagagccaaactctcacagatcagacaaatctaccatacggagctggagaaatacgagcaggcctgcaacgagttcaccacccacgtgatgaatctcctgcgagagcaaagccggaccaggcccatctccccaaaggagattgagcggatggtcagcatcatccaccgcaagttcagctccatccagatgcagctcaagcagagcacgtgcgaggcggtgatgatcctgcgttcccgatttctggatgcgcggcggaagagacggaatttcaacaagcaagcgacagaaatcctgaatgaatatttctattcccatctcagcaacccttaccccagtgaggaagccaaagaggagttagccaagaagtgtggcatcacagtctcccaggtatcaaactggtttggaaataagcgaatccggtacaagaagaacataggtaaatttcaagaggaagccaatatttatgctgccaaaacagctgtcactgctaccaatgtgtcagcccatggaagccaagctaactcgccctcaactcccaactcggctggttcttccagttcttttaacatgtcaaactctggagatttgttcatgagcgtgcagtcactcaatggggattcttaccaaggggcccaggttggagccaacgtgcaatcacaggtggatacccttcgccatgttatcagccagacaggaggatacagtgatggactcgcagccagtcagatgtacagtccgcagggcatcagtcacctcccccggcacccccggcaagcccactatcacttccgacttccaacgtggcatccg

SEQ ID NO: 4069 - DNA, 1041 bp, Homo sapiens
  source 1..1041: mol_type = genomic DNA
atggacgagcagcccaggctgatgcattcccatgctggggtcgggatggccggacaccccggcctgtcccagcacttgcaggatggggccggagggaccgagggggagggcgggaggaagcaggacattggagacattttacagcaaattatgaccatcacagaccagagtttggatgaggcgcaggccagaaaacatgctttaaactgccacagaatgaagcctgccttgtttaatgtgttgtgtgaaatcaaagaaaaaacagttttgagtatccgaggagcccaggaggaggaacccacagacccccagctgatgcggctggacaacatgctgttagcggaaggcgtggcggggcctgagaagggcggagggtcggcggcagcggcggcagcggcggcggcttctggaggggcaggttcagacaactcagtggagcattcagattacagagccaaactctcacagatcagacaaatctaccatacggagctggagaaatacgagcaggcctgcaacgagttcaccacccacgtgatgaatctcctgcgagagcaaagccggaccaggcccatctccccaaaggagattgagcggatggtcagcatcatccaccgcaagttcagctccatccagatgcagctcaagcagagcacgtgcgaggcggtgatgatcctgcgttcccgatttctggatgcgcggcggaagagacggaatttcaacaagcaagcgacagaaatcctgaatgaatatttctattcccatctcagcaacccttaccccagtgaggaagccaaagaggagttagccaagaagtgtggcatcacagtctcccaggtatcaaactggtttggaaataagcgaatccggtacaagaagaacataggtaaatttcaagaggaagccaatatttatgctgccaaaacagctgtcactgctaccaatgtgtcagcccatggaagccaagctaactcgccctcaactcccaactcggctggtggatacccttcgccatgttatcagccagacaggaggatacag

SEQ ID NO: 4070 - DNA, 1137 bp, Homo sapiens
  source 1..1137: mol_type = genomic DNA
atggaatctgagaaaatttatatgaccgcgaacccatatctctgtactgaatgtgggaaaggctacacttgtcttgcatccctgacccagcatcagaaaacacatattggagaaaaaccttatgaatgtaaaatatgtggtaagtcctttacccggaacagtaatcttgttcaacatcaaagaatacatactggagagaaaccttatgaatgtaatgaatgtgggaaagcttttagtcagagcactaatcttattcagcatcaaagagtccatactggggagaaaccttatgagtgtaatgaatgtgaaaaaacctttagtcataggtcatcccttagaaatcatgagagaatccatactggagaaaaaccctatccttgtaatgaatgtgggaaagctttcagccatatctctgcccttactcaacatcatagaattcatactggaaagaaaccatatgaatgtactgaatgtggaaaaaccttcagccgcagcacacacctaattgaacatcagggaattcattctgaggaaaaatcctaccagtgtaagcaatgtcggaaagttttttgccacagtacatcactaatccgacatcagagaacccacacaggagagaaaccatatgaatgtaatgaatgtgggaaagctttcagccataccccagccttcattcaacatcaaagaattcatactggagaaaaaccctatgagtgtaatgcatgtggaaaggccttcaatcggagtgcacatcttactgaacaccagagaactcatactggagagaagccctatgtttgtaaagaatgtggaaaaaccttcagtcgaagtacacaccttactgaacatctaaaaattcattcttgtgtgaaaccctatcaatgtaatgaatgtcagaaactgttttgctatagaacatcactaattcgacatcagaggacgcatacaggagagaaaccctaccagtgtaatgaatgtgggaaatccttcagcttaagctcagctctaactaaacataagcgaatacatacaagggagagaccctatcaatgtactaagtgtggtgatgtcttttgtcatagtacatccttaattcgacatcagaaaactcatttcagaaaggaaaccttagcagag

SEQ ID NO: 4071 - DNA, 1635 bp, Homo sapiens
  source 1..1635: mol_type = genomic DNA
atggcgacggacgcggcgctacgccggcttctgaggctgcaccgcacggagatcgcggtggccgtggacagcgccttcccactgctgcacgcgctggctgaccacgacgtggtccccgaggacaagtttcaggagacgcttcatctgaaggaaaaggagggctgcccccaggccttccacgccctcctgtcctggctgctgacccaggactccacagccatcctggacttctggagggtgctgttcaaggactacaacctggagcgctatggccggctgcagcccatcctggacagcttccccaaagatgtggacctcagccagccccggaaggggaggaagcccccggccgtccccaaggctttggtaccgccacccagactccccaccaagaggaaggcctcagaagaggctcgagctgccgcgccagcagccctgactccaaggggcaccgccagcccaggctctcaactgaaggccaagccccccaagaagccggagagcagcgcagagcagcagcgccttccactcgggaacgggattcagaccatgtcagcttcagtccagagagctgtggccatgtcctccggggacgtcccgggagcccgaggggccgtggaggggatcctcatccagcaggtgtttgagtcaggcggctccaagaagtgcatccaggttggcggggagttctacactcccagcaagttcgaagactccggcagtgggaagaacaaggcccgcagcagcagtggcccgaagcctctggttcgagccaagggagcccagggcgctgcccccggtggaggtgaggctaggctgggccagcagggcagcgttcccgcccctctggccctccccagtgacccccagctccaccagaagaatgaggacgagtgtgccgtgtgtcgggacggcggggagctcatctgctgtgacggctgccctcgggccttccacctggcctgcctgtcccctccgctccgggagatccccagtgggacctggaggtgctccagctgcctgcaggcaacagtccaggaggtgcagccccgggcagaggagccccggccccaggagccacccgtggagaccccgctccccccggggcttaggtcggcgggagaggaggtaagaggtccacctggggaacccctagccggcatggacacgactcttgtctacaagcacctgccggctccgccttctgcagccccgctgccagggctggactcctcggccctgcaccccctactgtgtgtgggtcctgagggtcagcagaacctggctcctggtgcgcgttgcggggtgtgcggagatggtacggacgtgctgcggtgtactcactgcgccgctgccttccactggcgctgccacttcccagccggcacctcccggcccgggacgggcctgcgctgcagatcctgctcaggagacgtgaccccagcccctgtggagggggtgctggcccccagccccgcccgcctggcccctgggcctgccaaggatgacactgccagtcacgagcccgctctgcacagggatgacctggagtcccttctgagcgagcacaccttcgatggcatcctgcagtgggccatccagagcatggcccgtccggcggcccccttcccctcc

SEQ ID NO: 4072 - DNA, 4497 bp, Homo sapiens
  source 1..4497: mol_type = genomic DNA
atgatgatggcaagaaagcaagatgtccgaattcccacctacaacatcagtgtggtgggattatctgggaccgagaaggaaaagggccagtgtgggattggaaagtcttgtttgtgcaaccgcttcgtgcgcccgagtgctgacgagtttcacttggaccatacctccgtcctcagcaccagtgactttggagggcgagtggtcaataatgaccactttctctactggggagaagttagccgctccctggaggattgtgtggaatgtaagatgcacattgtggagcagactgaatttattgatgatcagacttttcaacctcatcgaagcacggccctgcagccctatatcaagagagctgctgcgaccaagcttgcatcagctgaaaaactcatgtacttttgcactgaccagctggggctggagcaggactttgagcagaaacaaatgccagacggaaagctgctggttgatggttttcttcttggtattgatgttagcaggggcatgaataggaactttgatgaccagctcaagtttgtctccaatctctacaatcagcttgcaaaaacaaaaaagcccatagtggtggtcctgactaagtgtgacgaaggtgttgagcggtacattagagatgcacatacttttgccttaagcaaaaagaacctccaggttgtggagacctcagcgagatccaatgtaaacgtggacttggctttcagcaccttagtgcaactcattgataaaagtcggggaaagacaaaaatcattccttattttgaagctctcaagcagcagagtcagcagatagctacagcaaaagacaagtatgagtggctggtgagtcgcattgtgaaaaaccacaatgagaactggctgagtgtcagccgaaagatgcaggcctctccagaataccaggactatgtctacctggaagggactcagaaagccaagaagctgtttctacagcacatccaccgcctcaagcatgagcatatcgagcgtaggagaaagctgtacctggcagccctgccattagcttttgaagctcttatacctaatctagatgaaatagaccacctaagctgcataaaagccaaaaagctcttagaaaccaagccagaattcttgaagtggtttgttgtgcttgaagagaccccatgggatgccaccagtcacattgacaacatggaaaacgaacggattccctttgatttaatggataccgtccctgcagagcagctatacgaggcccacttagagaagctgaggaacgaaaggaaaagagttgagatgcgaagggcgtttaaagaaaacctggagacttctcctttcataactcccggaaagccttgggaagaggcccgtagttttattatgaatgaggatttctaccagtggctggaggaatctgtatacatggatatttatggcaaacaccaaaagcaaattatagataaagcaaaggaagaatttcaggagttgcttttggaatattcagaattgttttatgaactggagctggatgctaagcccagcaaggagaagatgggtgttattcaggatgttctgggagaggaacagcgatttaaagcattacaaaagctccaagcagagcgtgatgcccttattctgaaacacattcattttgtgtaccacccaacaaaggagacatgccccagctgcccagcttgtgtggacgctaagattgagcacttgattagttctcggtttatccggccgtctgaccggaatcagaaaaattcactctctgaccctaacattgatagaatcaacttggttatattgggcaaagacggccttgcccgagagttggccaatgagattcgagctctttgtacaaatgatgacaagtatgtgatagatggtaaaatgtatgagctttccctgaggccaatagaggggaatgtcaggcttcctgtgaactctttccagacgccaacatttcagccccacggctgtctctgcctttacaattcaaaggaatcgctatcctatgtagtggaaagtatagagaagagtagagagtccacgctgggccggcgggataatcatttagtccatctcccccttacattaattttggttaacaagagaggagacaccagtggagagactctgcatagcttaatacagcaaggtcaacaaattgctagcaaacttcagtgtgtctttctcgaccctgcttctgctggcattggttacggacgcaacattaatgaaaagcaaatcagtcaagttttgaagggactcctggactctaagcgtaacttaaacctggtcagttctactgctagcatcaaagatttggctgatgttgatctgcgaattgttatgtgtctgatgtgtggagatccttttagtgcagatgacatactttttcctgtccttcagtcccaaacctgtaaatcttcccattgtggaagcaacaactctgttttacttgaactaccaatcggactgcacaagaagcggattgaactgtctgttctttcataccattcctcctttagcatcagaaagagccggttggttcatgggtacattgttttttattcagccaaacgtaaggcctctttggctatgttacgtgcctttctttgtgaagtgcaggatattatccctattcagcttgtagcactcactgatggcgctgtagatgtcctggacaatgacttaagtagggaacagctaactgagggggaggagattgctcaagaaattgacggaaggttcacaagcatcccctgtagccaaccccagcataaacttgagatctttcacccattttttaaagatgtggtggaaaaaaagaacataatcgaggctactcatatgtacgataatgctgccgaggcctgtagcaccaccgaagaggtgtttaactccccccgggcaggatcaccgctctgcaactcaaacctgcaggattcagaagaagatatcgagccatcttacagcctgtttcgagaagacacatcactgccttctctgtccaaagaccattctaagctctctatggaactggagggaaatgatgggctgtctttcattatgagcaattttgagagtaaactgaacaacaaagtacctccgccagtcaaaccaaagcctcctgtccattttgaaattacaaagggggatctatcttatttagaccaaggccatagggatggacagaggaagtctgtgtcttctagcccctggctgcctcaggatgggtttgatccttctgactatgctgaacccatggatgctgtggtgaagccaaggaatgaagaagaaaacatatactccgtgccccatgacagcacccaaggcaaaatcatcaccattcggaatatcaacaaagcccagtccaacggcagcgggaatggttctgacagtgaaatggacaccagctctctagagcgagggcgcaaggtttccatcgtgagcaagccagtgctgtacaggacgagatgcacccggctggggcggtttgctagttaccggaccagcttcagcgtggggagtgatgatgagctggggcccatccggaagaaagaggaggatcaggcatcccagggttataaaggggacaatgctgtcattccatacgaaacagacgaagacccgcggaggaggaatattcttcgcagcctaaggaggaacactaagaaaccaaagcccaaaccccggccatccatcacaaaggcaacctgggagagtaactattttggggtgcccttaacaactgtcgtgactccagagaagccgatccccatttttattgaaagatgtattgagtacattgaagccacaggactgagcacggaaggcatctaccgggtcagcgggaacaagtctgagatggagagtctgcagagacagtttgatcaagaccacaacctggacctggcagagaaagactttacggtgaataccgtggctggtgccatgaagagctttttctcagaactgcctgaccccctggtcccgtataacatgcagatcgacttggtggaagcacacaaaatcaacgaccgggagcagaagttgcatgcccttaaggaggtattaaagaaatttccaaaggaaaaccacgaagtcttcaagtatgtcatctctcacctaaacaaggtcagccacaacaacaaggtgaatctcatgaccagcgagaacctctccatctgcttctggcccaccttgatgagacctgatttcagcactatggacgccctcacagccacgcgcacctaccagacaatcattgaactctttatccagcagtgccccttcttcttctacaatcggcccatcaccgagccccccggcgccaggcccagctccccctctgccgtggcttccaccgtccccttcctcacttccacgcctgtcacaagtcagccgtcgcccccacagtcgcctccacccaccccccagtccccaatgcagccactgcttccctcccagcttcaagccgaacacacgctg

SEQ ID NO: 4073 - DNA, 1455 bp, Homo sapiens
  source 1..1455: mol_type = genomic DNA
atgcgtgacaacagagctgtatccctctgtcagcaagaatggatgtgcccaggccctgcacaaagggccctctacaggggtgccacccagaggaaggacagtcacgtctcgctggcaacaggtgtgccctggggctatgaagagaccaagacgctcctggctattcttagtagttctcaattttatggaaaactccagacctgtcagcagaacagccagatctacagggccatggcggaaggactctgggagcagggttttctgcggaccccagaacagtgtcgcaccaagttcaaaagcctacagttgagttaccgcaaagtgaggagaggccgtgtgcctgagccttgtatcttttatgaggaaatgaatgctctttcaggctcctgggcctctgcacctcctatggcaagcgatgctgttcctggccaagaaggaagtgatattgaggctggagagctgaatcaccagaatggggaacccacggaggtagaagatggcactgtggatggtgcagacagggatgaaaaggacttcaggaatcctggccaggaagtcaggaaactagacctgccagtgctgttcccaaacagacttggttttgagttcaagaacgagattaaaaaagaaaatctaaaatgggatgattcagaggaagtagaaataaacaaggctttacagagaaagtccagaggagtttattggcactctgagctacaaaaaggcttggagagtgagccaacatcaagaaggcaatgtagaaattctccaggggagagtgaggagaaaaccccatcccaggagaagatgagtcaccagagtttttgtgccagggacaaagcctgtacacatatcctctgtgggaaaaactgctctcagagtgtgcactctccccacaagccagcgctcaaactggaaaaagtatctcaatgtcctgaatgtgggaaaacctttagccgaagttcttatcttgttcggcatcaaagaatccacacaggcgagaagcctcacaagtgcagtgagtgcgggaagggctttagtgagcgctccaacctcactgcccacctacgaactcacacaggggagaggccctatcagtgtgggcaatgtgggaaaagcttcaaccagagttccagcctcattgtccaccagaggacccataccggggaaaagccttaccagtgcattgtctgtggaaagagattcaacaacagttcccagttcagtgctcaccggcgcatccacactggggagagcccatacaagtgtgcagtgtgtgggaaaatcttcaacaatagctcccacttcagtgcccaccgaaaaacccacactggtgaaaagccttacaggtgttctcactgtgagagaggcttcactaagaactctgccctcacccgtcatcagacagtacacatgaaagcagtactctcatcacaggaaggaagagatgcgtta

SEQ ID NO: 4074 - DNA, 2091 bp, Homo sapiens
  source 1..2091: mol_type = genomic DNA
atgatggctgcagtgaagagtaccgaggcacacccatcctcaaacaaggatcccacacagggccagaaatcagccctccagggtaacagccctgactccgaggcctcccgtcagcgcttcaggcagttttgctaccaggaggtaactggcccacatgaagcttttagcaaactctgggaactctgttgtcagtggctgaggccgaagacccactcaaaagaggaaatcctggagctgctggttttggagcagtttctgactatcttgccagaggagatccagacctgggtgagggagcagcatccagaaaacggcgaggaagctgtggctctggttgaggatgtacagagagctcctggacaacaggttctagattctgagaaggacttgaaagtactcatgaaggagatggcccctttgggagcaaccagagaatcactgagatcccaatggaaacaggaggttcagccagaggaaccgacttttaagggatcacagagctcacaccaaagaccaggggaacagtcagaagcctggcttgctcctcaggctcccaggaacctgcctcaaaacacaggtctccacgaccaggagacaggtgctgtggtctggacagctgggtcccagggaccagccatgcgtgacaacagagctgtatccctctgtcagcaagaatggatgtgcccaggccctgcacaaagggccctctacaggggtgccacccagaggaaggacagtcacgtctcgctggcaacaggtgtgccctggggctatgaagagaccaagacgctcctggctattcttagtagttctcaattttatggaaaactccagacctgtcagcagaacagccagatctacagggccatggcggaaggactctgggagcagggttttctgcggaccccagaacagtgtcgcaccaagttcaaaagcctacagttgagttaccgcaaagtgaggagaggccgtgtgcctgagccttgtatcttttatgaggaaatgaatgctctttcaggctcctgggcctctgcacctcctatggcaagcgatgctgttcctggccaagaaggaagtgatattgaggctggagagctgaatcaccagaatggggaacccacggaggtagaagatggcactgtggatggtgcagacagggatgaaaaggacttcaggaatcctggccaggaagtcaggaaactagacctgccagtgctgttcccaaacagacttggttttgagttcaagaacgagattaaaaaagaaaatctaaaatgggatgattcagaggaagtagaaataaacaaggctttacagagaaagtccagaggagtttattggcactctgagctacaaaaaggcttggagagtgagccaacatcaagaaggcaatgtagaaattctccaggggagagtgaggagaaaaccccatcccaggagaagatgagtcaccagagtttttgtgccagggacaaagcctgtacacatatcctctgtgggaaaaactgctctcagagtgtgcactctccccacaagccagcgctcaaactggaaaaagtatctcaatgtcctgaatgtgggaaaacctttagccgaagttcttatcttgttcggcatcaaagaatccacacaggcgagaagcctcacaagtgcagtgagtgcgggaagggctttagtgagcgctccaacctcactgcccacctacgaactcacacaggggagaggccctatcagtgtgggcaatgtgggaaaagcttcaaccagagttccagcctcattgtccaccagaggacccataccggggaaaagccttaccagtgcattgtctgtggaaagagattcaacaacagttcccagttcagtgctcaccggcgcatccacactggggagagcccatacaagtgtgcagtgtgtgggaaaatcttcaacaatagctcccacttcagtgcccaccgaaaaacccacactggtgaaaagccttacaggtgttctcactgtgagagaggcttcactaagaactctgccctcacccgtcatcagacagtacacatgaaagcagtactctcatcacaggaaggaagagatgcgtta

SEQ ID NO: 4075 - DNA, 1224 bp, Homo sapiens
  source 1..1224: mol_type = genomic DNA
atggcggaaggactctgggagcagggttttctgcggaccccagaacagtgtcgcaccaagttcaaaagcctacagttgagttaccgcaaagtgaggagaggccgtgtgcctgagccttgtatcttttatgaggaaatgaatgctctttcaggctcctgggcctctgcacctcctatggcaagcgatgctgttcctggccaagaaggaagtgatattgaggctggagagctgaatcaccagaatggggaacccacggaggtagaagatggcactgtggatggtgcagacagggatgaaaaggacttcaggaatcctggccaggaagtcaggaaactagacctgccagtgctgttcccaaacagacttggttttgagttcaagaacgagattaaaaaagaaaatctaaaatgggatgattcagaggaagtagaaataaacaaggctttacagagaaagtccagaggagtttattggcactctgagctacaaaaaggcttggagagtgagccaacatcaagaaggcaatgtagaaattctccaggggagagtgaggagaaaaccccatcccaggagaagatgagtcaccagagtttttgtgccagggacaaagcctgtacacatatcctctgtgggaaaaactgctctcagagtgtgcactctccccacaagccagcgctcaaactggaaaaagtatctcaatgtcctgaatgtgggaaaacctttagccgaagttcttatcttgttcggcatcaaagaatccacacaggcgagaagcctcacaagtgcagtgagtgcgggaagggctttagtgagcgctccaacctcactgcccacctacgaactcacacaggggagaggccctatcagtgtgggcaatgtgggaaaagcttcaaccagagttccagcctcattgtccaccagaggacccataccggggaaaagccttaccagtgcattgtctgtggaaagagattcaacaacagttcccagttcagtgctcaccggcgcatccacactggggagagcccatacaagtgtgcagtgtgtgggaaaatcttcaacaatagctcccacttcagtgcccaccgaaaaacccacactggtgaaaagccttacaggtgttctcactgtgagagaggcttcactaagaactctgccctcacccgtcatcagacagtacacatgaaagcagtactctcatcacaggaaggaagagatgcgtta

SEQ ID NO: 4076 - DNA, 1218 bp, Homo sapiens
  source 1..1218: mol_type = genomic DNA
atggcttcaacagaggaacagtacgatcttaagattgtgaaagtggaggaagaccctatctgggaccaagaaacccaccttcgagggaacaacttttctggccaagaagcctcccgacaactttttaggcagttttgttaccaagagactcctggtccccgagaagctctgagccggctccgagaactctgtcatcagtggctaaggccagaaatccacaccaaagagcaaatcttggagctgctggtgctggagcaattcctgactatcctgcctgaggagctccaggcctgggtgcgggagcaccatccggagagtggggaggaggctgtggctgtagttgaagatctggaacaagagcttagtgagccagggaaccaggctccagaccatgaacatggacattctgaagtgctcttggaggatgtggaacatctgaaggtcaagcaggaaccaacagacatacagcttcagcctatggtgacacagctcagatatgaatctttttgcctccaccaatttcaagaacaagatggtgaaagtatacctgagaaccaggagttggcatcaaagcaagaaatcttaaaagaaatggaacatttgggggatagcaaactccaaagagatgtatctttggattctaagtacagagaaacttgtaaacgagacagcaaggcagaaaagcagcaggcacattccactggagagagacgccacaggtgcaatgaatgtgggaaaagcttcactaagagttcagtactcattgagcaccagagaatccacactggggagaagccatatgaatgtgaagaatgtgggaaggccttcagccggaggtcaagcctgaatgaacatcggcggagccacactggagagaaaccctatcaatgtaaggagtgtgggaaagccttcagtgccagcaatggcctcactcgacacagaagaatccacacaggggaaaaaccatatgaatgcaaagtgtgtgggaaggctttcctcctcagctcatgccttgttcagcatcagaggatacacactggagagaagcgctatcagtgtcgtgagtgtggcaaagccttcattcagaatgcagggcttttccagcatctccgagtccacactggtgagaaaccctatcagtgcagtcagtgcagtaaactctttagtaagcggacacttcttaagaaacatcagaaaatccacactggagagagacca

SEQ ID NO: 4077 - DNA, 741 bp, Homo sapiens
  source 1..741: mol_type = genomic DNA
atggtgacacagctcagatatgaatctttttgcctccaccaatttcaagaacaagatggtgaaagtatacctgagaaccaggagttggcatcaaagcaagaaatcttaaaagaaatggaacatttgggggatagcaaactccaaagagatgtatctttggattctaagtacagagaaacttgtaaacgagacagcaaggcagaaaagcagcaggcacattccactggagagagacgccacaggtgcaatgaatgtgggaaaagcttcactaagagttcagtactcattgagcaccagagaatccacactggggagaagccatatgaatgtgaagaatgtgggaaggccttcagccggaggtcaagcctgaatgaacatcggcggagccacactggagagaaaccctatcaatgtaaggagtgtgggaaagccttcagtgccagcaatggcctcactcgacacagaagaatccacacaggggaaaaaccatatgaatgcaaagtgtgtgggaaggctttcctcctcagctcatgccttgttcagcatcagaggatacacactggagagaagcgctatcagtgtcgtgagtgtggcaaagccttcattcagaatgcagggcttttccagcatctccgagtccacactggtgagaaaccctatcagtgcagtcagtgcagtaaactctttagtaagcggacacttcttaagaaacatcagaaaatccacactggagagagacca

SEQ ID NO: 4078 - DNA, 1482 bp, Homo sapiens
  source 1..1482: mol_type = genomic DNA
atgtcaggagaggccacagtcttggcctaccatgctccagaagaacaggaaggacttctagttgtcaaggttgaagaagaaaattatgttttggaccaggactttggccttcaggaaaacccctggagccaagaggtattccggcagaagttcaggcagtttagttactctgactccactggccctcgggaggctctgagccggctgcgagagctttgctgtcagtggttgaggccggaggtgcactccaaggagcagatcctggagctgctgatgttggagcagttcctggccatccttcctgaggagctgcaagcttggctgcgagagcatcggccagagaatggagaggaagctgtgactatgctggaggagctggaaaaagaactggaggagccaaggcaacaggacacaactcatggccaagaaatgttctggcaggaaatgacatccacaggagcactgaagtctctgtctctgaatagcccggtgcagcccttagagaaccagtgcaagactgagactcaggagtcccaggctttccaggagagagatggcaggatggtggctggcaaagtgttgatggcaaagcaagaaattgttgaatgtgtagcctcagcagctatgatatcgccgggaaaacttcctggagaaacacattcccaacggatagctgaagaagctttgggaggtctggacaactctaagaagcaaaagggaaatgctgcagggaacaaaatcagtcagcttccttcccaggacagacatttcagtctggcaaccttcaacagaagaatccccacagaacacagtgtccttgaatctcatgagagtgaaggaagtttcagtatgaattcaaatgatattacacaacagagcgttgacactagggaaaagctctatgagtgctttgactgtgggaaggccttttgccagagctcaaagctgattagacatcagagaattcatactggagagagaccttatgcatgtaaagaatgtggcaaagccttcagtttgagctcagaccttgttagacatcagagaattcatagtggtgaaaaaccctatgaatgttgtgaatgtggaaaagccttcaggggcagttcagagctcatcaggcatcggagaatccacactggagagaagccttatgaatgtggagaatgtgggaaggccttcagccggagctcagcccttattcagcataagaaaattcacactggagataaaagctatgaatgtattgcatgtggtaaggcttttggtaggagttctatccttattgaacatcaaagaattcacactggagagaaaccttatgaatgtaatgaatgtggaaaatccttcaatcagagctcagccctcacccagcaccagagaattcacactggagagaagccttatgaatgtagtgaatgtagaaaaacatttaggcataggtcaggccttatgcagcatcagagaacacacaccagagtt

SEQ ID NO: 4079 - DNA, 921 bp, Homo sapiens
  source 1..921: mol_type = genomic DNA
atggtggctggcaaagtgttgatggcaaagcaagaaattgttgaatgtgtagcctcagcagctatgatatcgccgggaaaacttcctggagaaacacattcccaacggatagctgaagaagctttgggaggtctggacaactctaagaagcaaaagggaaatgctgcagggaacaaaatcagtcagcttccttcccaggacagacatttcagtctggcaaccttcaacagaagaatccccacagaacacagtgtccttgaatctcatgagagtgaaggaagtttcagtatgaattcaaatgatattacacaacagagcgttgacactagggaaaagctctatgagtgctttgactgtgggaaggccttttgccagagctcaaagctgattagacatcagagaattcatactggagagagaccttatgcatgtaaagaatgtggcaaagccttcagtttgagctcagaccttgttagacatcagagaattcatagtggtgaaaaaccctatgaatgttgtgaatgtggaaaagccttcaggggcagttcagagctcatcaggcatcggagaatccacactggagagaagccttatgaatgtggagaatgtgggaaggccttcagccggagctcagcccttattcagcataagaaaattcacactggagataaaagctatgaatgtattgcatgtggtaaggcttttggtaggagttctatccttattgaacatcaaagaattcacactggagagaaaccttatgaatgtaatgaatgtggaaaatccttcaatcagagctcagccctcacccagcaccagagaattcacactggagagaagccttatgaatgtagtgaatgtagaaaaacatttaggcataggtcaggccttatgcagcatcagagaacacacaccagagtt

SEQ ID NO: 4080 - DNA, 1830 bp, Homo sapiens
  source 1..1830: mol_type = genomic DNA
atggatgaagatgaatttgaattgcagccacaagagccaaactcattttttgatggaatagtggatgatgctggcaaaatagaacatgatggttccactggagtgaccatcgatgcagaatcagaaatggatccttgtaaagtggatagcacttgtcctgaagtcatcaaggtgtacatttttaaagctgaccctggagaagatgacttaggtggaactgtagacattgtggagagtgaacctgaaaatgatcatggagttgaactacttgatcagaacagcagtattcgtgttcccagggaaaagatggtttatatgactgtcaatgactctcaacaagaagatgaagatttaaatgttgctgaaattgctgatgaagtttatatggaagtgatcgtaggagaggaggatgctgctgttgcagcagcagcagctgctgtgcatgagcagcaaattgatgaggatgaaatgaaaaccttcgtaccaattgcatgggcagcagcttatggtaataattctgatggaattgaaaaccggaatggcactgcaagtgccctcttgcacatagatgagtctgctggccttggcagactggctaaacagaaaccaaagaaaaagagaagacctgattccaggcagtaccaaacagcaataattattggccctgatggtcatcctttgactgtctatccttgcatgatttgtgggaagaagtttaagtcgaggggttttttgaaaagacacatgaaaaaccatcctgaacaccttgccaagaagaagtaccactgtactgactgtgattacactaccaataagaagataagtttacataaccacctggagagccacaagctgaccagcaaggcagagaaggccattgaatgtgatgagtgtgggaagcatttttctcatgcaggggctttgtttactcacaaaatggtgcataaggaaaaaggggccaacaaaatgcacaagtgtaaattctgtgaatatgagacagctgaacaggggttattgaatcgccacctcttggcagtccacagcaagaactttcctcatatttgtgtggagtgtggtaaaggtttccgacacccgtcggaactgagaaagcacatgcgaatccataccggcgagaagccataccaatgccagtactgtgaatataggtctgcagactcttctaacttgaaaacacatataaaaacaaagcatagtaaagagatgccattcaagtgtgacatttgtcttctgactttctcagataccaaagaagtgcagcaacatactcttgtccaccaagaaagcaaaacacatcagtgtttgcattgcgaccacaagagttcaaactcaagtgatttgaaacgacatgtaatttcagttcatacgaaagactatcctcataagtgtgagatgtgcgagaaaggctttcacaggccttcagaacttaagaaacatgtggctgtccacaaaggtaaaaaaatgcaccaatgtagacattgtgactttaagattgcagacccatttgttctaagtcgccatattctctcagttcacacaaaggatcttccatttaggtgtaagagatgtagaaagggatttaggcaacaaaatgagcttaaaaagcatatgaagacacacagtggcaggaaagtatatcagtgtgagtactgtgagtatagcactacagatgcctcaggctttaaacggcacgttatttccattcatacaaaagactatcctcatcggtgtgagtactgcaagaaaggcttccgaagaccttcagaaaagaaccagcacataatgagacaccataaagaagttggtctgccc

SEQ ID NO: 4081 - DNA, 2403 bp, Homo sapiens
  source 1..2403: mol_type = genomic DNA
atggatgaagatgaatttgaattgcagccacaagagccaaactcattttttgatggaataggagctgatgctacacacatggatggtgatcagattgttgtggaaatacaagaagcagtttttgtttctaatattgtggattctgacataactgtgcataactttgttcctgatgacccagactcagttgtaatccaagatgttgttgaagatgttgtcatagaggaggatgttcagtgctcagatatcttagaagaggcagatgtatctgaaaatgtcatcattcctgagcaagtgctggactcagatgtaactgaagaagtttctttaccacactgcacagtcccagatgatgttttagcttctgacattacttcaacctcaatgtctatgccagaacatgttttaacgagtgaatccatgcatgtgtgtgacattggacatgttgaacatatggtgcatgatagtgtagtggaagcagaaatcattactgatcctctgacgagtgacatagtttcagaagaagtattggtagcagactgtgcccctgaagcagtcatagatgccagcgggatctcagtggaccagcaagataatgacaaagccagctgtgaggactacctaatgatttcgttggatgatgctggcaaaatagaacatgatggttccactggagtgaccatcgatgcagaatcagaaatggatccttgtaaagtggatagcacttgtcctgaagtcatcaaggtgtacatttttaaagctgaccctggagaagatgacttaggtggaactgtagacattgtggagagtgaacctgaaaatgatcatggagttgaactacttgatcagaacagcagtattcgtgttcccagggaaaagatggtttatatgactgtcaatgactctcaacaagaagatgaagatttaaatgttgctgaaattgctgatgaagtttatatggaagtgatcgtaggagaggaggatgctgctgttgcagcagcagcagctgctgtgcatgagcagcaaattgatgaggatgaaatgaaaaccttcgtaccaattgcatgggcagcagcttatggtaataattctgatggaattgaaaaccggaatggcactgcaagtgccctcttgcacatagatgagtctgctggccttggcagactggctaaacagaaaccaaagaaaaagagaagacctgattccaggcagtaccaaacagcaataattattggccctgatggtcatcctttgactgtctatccttgcatgatttgtgggaagaagtttaagtcgaggggttttttgaaaagacacatgaaaaaccatcctgaacaccttgccaagaagaagtaccactgtactgactgtgattacactaccaataagaagataagtttacataaccacctggagagccacaagctgaccagcaaggcagagaaggccattgaatgtgatgagtgtgggaagcatttttctcatgcaggggctttgtttactcacaaaatggtgcataaggaaaaaggggccaacaaaatgcacaagtgtaaattctgtgaatatgagacagctgaacaggggttattgaatcgccacctcttggcagtccacagcaagaactttcctcatatttgtgtggagtgtggtaaaggtttccgacacccgtcggaactgagaaagcacatgcgaatccataccggcgagaagccataccaatgccagtactgtgaatataggtctgcagactcttctaacttgaaaacacatataaaaacaaagcatagtaaagagatgccattcaagtgtgacatttgtcttctgactttctcagataccaaagaagtgcagcaacatactcttgtccaccaagaaagcaaaacacatcagtgtttgcattgcgaccacaagagttcaaactcaagtgatttgaaacgacatgtaatttcagttcatacgaaagactatcctcataagtgtgagatgtgcgagaaaggctttcacaggccttcagaacttaagaaacatgtggctgtccacaaaggtaaaaaaatgcaccaatgtagacattgtgactttaagattgcagacccatttgttctaagtcgccatattctctcagttcacacaaaggatcttccatttaggtgtaagagatgtagaaagggatttaggcaacaaaatgagcttaaaaagcatatgaagacacacagtggcaggaaagtatatcagtgtgagtactgtgagtatagcactacagatgcctcaggctttaaacggcacgttatttccattcatacaaaagactatcctcatcggtgtgagtactgcaagaaaggcttccgaagaccttcagaaaagaaccagcacataatgagacaccataaagaagttggtctgccc

SEQ ID NO: 4082 - DNA, 2532 bp, Homo sapiens
  source 1..2532: mol_type = genomic DNA
atggatgaagatgggcttgaattacaacaagagccaaactcattttttgatgcaacagacagggtctcgttctgtcacccaggctggagcacagtggcgccatctgggtccactgcaacctccgcctcccaggctcaagtgatctgctcagcttcccgagtaactggggctacaggagctgatggtacacacatggatggtgatcaaattgttgtggaagtacaagaaactgtttttgtttcagatgttgtggattcagacataactgtgcataactttgttcctgatgacccagattcagttgtaatccaagatgttattgaggacgttgttatagaagatgttcagtgcccagatatcatggaagaagcagatgtgtctgaaacggtcatcattcctgagcaagtgctggactcagatgtaactgaagaagtttctttagcacattgcacagtcccagatgatgttttagcttctgacattacttcagcctcaatgtctatgccagaacacgtcttgacgggtgattctatacatgtgtctgacgttggacatgttggacatgttggacatgttgaacatgtggttcatgatagtgtagtggaagcagaaattgtcactgatcctctgactaccgacgtagtttcagaagaagtattggtagcagactgtgcctctgaagcagtcatagatgccaatgggatccctgtggaccagcaggatgatgacaaaggcaactgtgaggactaccttatgatttccttggatgatgctggcaaaatagaacacgatggttcttctggaatgaccatggacacagagtcggaaattgatccttgtaaagtggatggcacttgccctgaggtcatcaaggtgtacatttttaaagctgaccctggagaagatgacttaggtggaactgtagacattgtggagagtgagcctgagaatgatcatggagttgaactgcttgatcagaacagcagtattcgtgttcccagggaaaagatggtttatatgactgtcaatgactctcagccagaagatgaagatttaaatgttgctgaaatcgctgacgaagtttatatggaagtgatcgtaggagaggaggatgctgcagcagcagcggcagccgccgccgtgcacgagcagcaaatggatgacaatgaaatcaaaaccttcatgccgattgcatgggcagcagcttatggtaataattctgatggaattgaaaaccggaatggcactgcaagtgccctcttgcacatagatgagtctgctggcctcggcagactggctaaacaaaaaccaaagaaaaggagaagacctgattccaggcagtaccaaacagcaataattattggccctgatggacatcctttgactgtctatccttgcatgatttgtgggaagaagtttaagtcgagaggttttttgaaaaggcacatgaaaaaccatcccgaacaccttgccaagaagaaataccgctgtactgactgtgattacactaccaacaagaagataagtttacacaaccacctggagagccacaagctgaccagcaaggcagagaaggccattgaatgcgatgagtgtgggaagcatttctctcatgcaggggctttgtttactcacaaaatggtgcataaggaaaaaggagccaacaaaatgcacaagtgtaaattctgtgaatacgagacagctgaacaagggttattgaatcgccacctcttggcagtccacagcaagaactttcctcatatttgtgtggagtgtggtaagggttttcgtcacccgtcagagctcaaaaagcacatgagaatccatactggggagaagccgtaccaatgccagtactgcgaatataggtctgcagactcttctaacttgaaaacgcatgtcaaaactaagcatagtaaagagatgccattcaagtgtgacatttgtcttctgactttctcggataccaaagaggtgcagcaacatgctcttatccaccaagaaagcaaaacacaccagtgtttgcattgcgaccacaagagttcgaactcaagtgatttgaaacgacacataatttcagttcacacgaaagactacccccataagtgtgacatgtgtgataaaggctttcacaggccttcagaactcaagaaacacgtggctgcccacaagggcaaaaaaatgcaccagtgtagacattgtgactttaagattgcagatccatttgttctaagtcgccatattctctcagttcacacaaaggatcttccatttaggtgcaagagatgtagaaagggatttaggcaacagagtgagcttaaaaagcatatgaagacacacagtggcaggaaagtgtatcagtgtgagtactgtgagtatagcactacagatgcctcaggctttaaacggcacgttatttccattcacacgaaagactatcctcaccggtgtgagtactgcaagaaaggcttccgaagaccttcagaaaagaaccagcacataatgcgacatcataaagaagttggcctgccc

SEQ ID NO: 4083 - DNA, 1728 bp, Homo sapiens
  source 1..1728: mol_type = genomic DNA
atgaccatggacacagagtcggaaattgatccttgtaaagtggatggcacttgccctgaggtcatcaaggtgtacatttttaaagctgaccctggagaagatgacttaggtggaactgtagacattgtggagagtgagcctgagaatgatcatggagttgaactgcttgatcagaacagcagtattcgtgttcccagggaaaagatggtttatatgactgtcaatgactctcagccagaagatgaagatttaaatgttgctgaaatcgctgacgaagtttatatggaagtgatcgtaggagaggaggatgctgcagcagcagcggcagccgccgccgtgcacgagcagcaaatggatgacaatgaaatcaaaaccttcatgccgattgcatgggcagcagcttatggtaataattctgatggaattgaaaaccggaatggcactgcaagtgccctcttgcacatagatgagtctgctggcctcggcagactggctaaacaaaaaccaaagaaaaggagaagacctgattccaggcagtaccaaacagcaataattattggccctgatggacatcctttgactgtctatccttgcatgatttgtgggaagaagtttaagtcgagaggttttttgaaaaggcacatgaaaaaccatcccgaacaccttgccaagaagaaataccgctgtactgactgtgattacactaccaacaagaagataagtttacacaaccacctggagagccacaagctgaccagcaaggcagagaaggccattgaatgcgatgagtgtgggaagcatttctctcatgcaggggctttgtttactcacaaaatggtgcataaggaaaaaggagccaacaaaatgcacaagtgtaaattctgtgaatacgagacagctgaacaagggttattgaatcgccacctcttggcagtccacagcaagaactttcctcatatttgtgtggagtgtggtaagggttttcgtcacccgtcagagctcaaaaagcacatgagaatccatactggggagaagccgtaccaatgccagtactgcgaatataggtctgcagactcttctaacttgaaaacgcatgtcaaaactaagcatagtaaagagatgccattcaagtgtgacatttgtcttctgactttctcggataccaaagaggtgcagcaacatgctcttatccaccaagaaagcaaaacacaccagtgtttgcattgcgaccacaagagttcgaactcaagtgatttgaaacgacacataatttcagttcacacgaaagactacccccataagtgtgacatgtgtgataaaggctttcacaggccttcagaactcaagaaacacgtggctgcccacaagggcaaaaaaatgcaccagtgtagacattgtgactttaagattgcagatccatttgttctaagtcgccatattctctcagttcacacaaaggatcttccatttaggtgcaagagatgtagaaagggatttaggcaacagagtgagcttaaaaagcatatgaagacacacagtggcaggaaagtgtatcagtgtgagtactgtgagtatagcactacagatgcctcaggctttaaacggcacgttatttccattcacacgaaagactatcctcaccggtgtgagtactgcaagaaaggcttccgaagaccttcagaaaagaaccagcacataatgcgacatcataaagaagttggcctgccc

SEQ ID NO: 4084 - DNA, 2415 bp, Homo sapiens
  source 1..2415: mol_type = genomic DNA
atggatgaagatgggcttgaattacaacaagagccaaactcattttttgatgcaacaggagctgatggtacacacatggatggtgatcaaattgttgtggaagtacaagaaactgtttttgtttcagatgttgtggattcagacataactgtgcataactttgttcctgatgacccagattcagttgtaatccaagatgttattgaggacgttgttatagaagatgttcagtgcccagatatcatggaagaagcagatgtgtctgaaacggtcatcattcctgagcaagtgctggactcagatgtaactgaagaagtttctttagcacattgcacagtcccagatgatgttttagcttctgacattacttcagcctcaatgtctatgccagaacacgtcttgacgggtgattctatacatgtgtctgacgttggacatgttggacatgttggacatgttgaacatgtggttcatgatagtgtagtggaagcagaaattgtcactgatcctctgactaccgacgtagtttcagaagaagtattggtagcagactgtgcctctgaagcagtcatagatgccaatgggatccctgtggaccagcaggatgatgacaaaggcaactgtgaggactaccttatgatttccttggatgatgctggcaaaatagaacacgatggttcttctggaatgaccatggacacagagtcggaaattgatccttgtaaagtggatggcacttgccctgaggtcatcaaggtgtacatttttaaagctgaccctggagaagatgacttaggtggaactgtagacattgtggagagtgagcctgagaatgatcatggagttgaactgcttgatcagaacagcagtattcgtgttcccagggaaaagatggtttatatgactgtcaatgactctcagccagaagatgaagatttaaatgttgctgaaatcgctgacgaagtttatatggaagtgatcgtaggagaggaggatgctgcagcagcagcggcagccgccgccgtgcacgagcagcaaatggatgacaatgaaatcaaaaccttcatgccgattgcatgggcagcagcttatggtaataattctgatggaattgaaaaccggaatggcactgcaagtgccctcttgcacatagatgagtctgctggcctcggcagactggctaaacaaaaaccaaagaaaaggagaagacctgattccaggcagtaccaaacagcaataattattggccctgatggacatcctttgactgtctatccttgcatgatttgtgggaagaagtttaagtcgagaggttttttgaaaaggcacatgaaaaaccatcccgaacaccttgccaagaagaaataccgctgtactgactgtgattacactaccaacaagaagataagtttacacaaccacctggagagccacaagctgaccagcaaggcagagaaggccattgaatgcgatgagtgtgggaagcatttctctcatgcaggggctttgtttactcacaaaatggtgcataaggaaaaaggagccaacaaaatgcacaagtgtaaattctgtgaatacgagacagctgaacaagggttattgaatcgccacctcttggcagtccacagcaagaactttcctcatatttgtgtggagtgtggtaagggttttcgtcacccgtcagagctcaaaaagcacatgagaatccatactggggagaagccgtaccaatgccagtactgcgaatataggtctgcagactcttctaacttgaaaacgcatgtcaaaactaagcatagtaaagagatgccattcaagtgtgacatttgtcttctgactttctcggataccaaagaggtgcagcaacatgctcttatccaccaagaaagcaaaacacaccagtgtttgcattgcgaccacaagagttcgaactcaagtgatttgaaacgacacataatttcagttcacacgaaagactacccccataagtgtgacatgtgtgataaaggctttcacaggccttcagaactcaagaaacacgtggctgcccacaagggcaaaaaaatgcaccagtgtagacattgtgactttaagattgcagatccatttgttctaagtcgccatattctctcagttcacacaaaggatcttccatttaggtgcaagagatgtagaaagggatttaggcaacagagtgagcttaaaaagcatatgaagacacacagtggcaggaaagtgtatcagtgtgagtactgtgagtatagcactacagatgcctcaggctttaaacggcacgttatttccattcacacgaaagactatcctcaccggtgtgagtactgcaagaaaggcttccgaagaccttcagaaaagaaccagcacataatgcgacatcataaagaagttggcctgccc

SEQ ID NO: 4085 - DNA, 1482 bp, Homo sapiens
  source 1..1482: mol_type = genomic DNA
atgcagggagaacgcttgagaccagggttagattcccaaaaggagaagcttcctggaaaaatgagccccaaacatgatggtttagggacagctgatagtgtgtgttcaaggattatacaggatcgagtctccttaggagatgatgtccatgactgtgactcacatggatcaggtaaaaatccagttattcaggaagaggaaaatatctttaaatgcaatgaatgtgaaaaagtgtttaacaagaaacgcctgcttgctcggcatgagaggattcactctggagtgaagccctatgaatgcacagagtgtggaaaaacctttagcaagagtacatacctcctgcagcaccacatggtccacactggggagaagccctataagtgcatggagtgtgggaaggcttttaatcggaagtcacaccttacccagcaccagcggattcacagtggagagaagccttataagtgcagtgaatgtggaaaggccttcacccaccgctccacttttgtcttgcataacaggagccacactggagaaaaaccctttgtgtgcaaagagtgtggcaaagcctttcgagataggccaggtttcattcgacactacatcatccacagtggtgagaatccctacgagtgcttcgaatgtggcaaggtcttcaaacacagatcatacctcatgtggcaccagcagactcataccggggagaagccctatgagtgcagtgaatgtgggaaggccttctgtgagagcgcagcgctgattcaccactatgtcatccacactggagagaagccctttgagtgcctcgagtgtgggaaggctttcaaccaccgatcctacctcaaaaggcaccagcggattcacactggggagaagccatatgtgtgtagtgaatgcggaaaggccttcacccactgctctactttcatcttgcataaaagggcccacactggagaaaaacctttcgagtgcaaagagtgtgggaaagcctttagcaatagggcagacctcattcgccacttcagcatccacactggagagaagccctatgagtgcatggagtgtggaaaggccttcaaccgcaggtcaggcctcacaaggcaccagcggattcatagtggagagaagccctatgaatgcatcgagtgtgggaaaacattttgctggagcacaaacctcattcgacactctatcatccacactggagagaagccgtatgagtgcagtgaatgtggaaaggccttcagtcgcagctcgtccctcactcagcatcaaaggatgcatactgggagaaatcctatcagtgtaacagatgtgggaagaccttttacaagtgggcagacctcagtcaacatccaagaacttttattggggaaaaactttttgaatgtcaccactgaggaaaatcttttgcaagaggaagcatcttacatggcatctgatcgtacataccaaagagaaaccccacaagtgtcttcactg

SEQ ID NO: 4086 - DNA, 1881 bp, Homo sapiens
  source 1..1881: mol_type = genomic DNA
atggcgatggctttgacggacccggcgcaggtgtctgtgacctttgatgatgtggctgtgactttcacccaggaggagtggggccagctggacctagctcagcggaccctgtaccaggaggtgatgctggaaaactgtgggctcctggtatctctggggtgtcctgttcccagacctgagctgatctaccacctagagcatgggcaggagccatggaccaggaaggaagacctctcccaaggcacctgtccaggtgacaaaggaaaacccaagagcacagaacctaccacctgtgagctagccttgtctgaaggaatctctttttggggacaactaacacaaggagcttcaggggactcccagttggggcaacccaaggatcaggatgggttttcagaaatgcagggagaacgcttgagaccagggttagattcccaaaaggagaagcttcctggaaaaatgagccccaaacatgatggtttagggacagctgatagtgtgtgttcaaggattatacaggatcgagtctccttaggagatgatgtccatgactgtgactcacatggatcaggtaaaaatccagttattcaggaagaggaaaatatctttaaatgcaatgaatgtgaaaaagtgtttaacaagaaacgcctgcttgctcggcatgagaggattcactctggagtgaagccctatgaatgcacagagtgtggaaaaacctttagcaagagtacatacctcctgcagcaccacatggtccacactggggagaagccctataagtgcatggagtgtgggaaggcttttaatcggaagtcacaccttacccagcaccagcggattcacagtggagagaagccttataagtgcagtgaatgtggaaaggccttcacccaccgctccacttttgtcttgcataacaggagccacactggagaaaaaccctttgtgtgcaaagagtgtggcaaagcctttcgagataggccaggtttcattcgacactacatcatccacagtggtgagaatccctacgagtgcttcgaatgtggcaaggtcttcaaacacagatcatacctcatgtggcaccagcagactcataccggggagaagccctatgagtgcagtgaatgtgggaaggccttctgtgagagcgcagcgctgattcaccactatgtcatccacactggagagaagccctttgagtgcctcgagtgtgggaaggctttcaaccaccgatcctacctcaaaaggcaccagcggattcacactggggagaagccatatgtgtgtagtgaatgcggaaaggccttcacccactgctctactttcatcttgcataaaagggcccacactggagaaaaacctttcgagtgcaaagagtgtgggaaagcctttagcaatagggcagacctcattcgccacttcagcatccacactggagagaagccctatgagtgcatggagtgtggaaaggccttcaaccgcaggtcaggcctcacaaggcaccagcggattcatagtggagagaagccctatgaatgcatcgagtgtgggaaaacattttgctggagcacaaacctcattcgacactctatcatccacactggagagaagccgtatgagtgcagtgaatgtggaaaggccttcagtcgcagctcgtccctcactcagcatcaaaggatgcatactgggagaaatcctatcagtgtaacagatgtgggaagaccttttacaagtgggcagacctcagtcaacatccaagaacttttattggggaaaaactttttgaatgtcaccactgaggaaaatcttttgcaagaggaagcatcttacatggcatctgatcgtacataccaaagagaaaccccacaagtgtcttcactg

SEQ ID NO: 4087 - DNA, 2940 bp, Homo sapiens
  source 1..2940: mol_type = genomic DNA
atgataatggcatcagctgctaaggaatttaaaatggacaacttttcacctaaagctggcactagcaaattgcaacagacagtaccagctgatgcatctcctgattctaagtgtcctatatgcttggatagatttgataatgtgtcttacttagatcgctgcttacataagttctgttttcgctgtgtacaggagtggtcaaaaaacaaagctgaatgcccactatgtaaacagccctttgattctattttccattctgtgagggcagaagatgacttcaaggagtatgtcctaaggccttcgtataatggttcttttgtcacccctgatcgacgatttcgctaccgtacaactctgacaagggaacgaaatgcttctgtgtattcacctagtggtcctgtgaacagaagaacaacaactccaccggatagtggagtactgtttgaagggttaggcatttcaacaagacctagagatgttgaaattcctcagtttatgagacagattgcagtaaggaggccaactacggcagatgaaagatctttgcggaaaattcaagaacaagatattattaattttagacgaactctttatcgtgctggtgctcgagttagaaatattgaagatggtggccgctacagggatatttcagctgaatttttccgtagaaatccagcttgccttcacagattagtcccctggttaaaacgtgaacttacagttctttttggagctcatggatctttagtgaatattgtccagcatattatcatgagtaatgttactcgctatgacttggagagtcaggcatttgtgtctgatttaagaccatttttacttaatcgaactgagcattttatacatgaatttatcagttttgcccgatctccttttaacatggcagcctttgaccagcatgccaattatgattgccctgctccttcatacgaagaaggcagccattctgattcttcagtcataacaatatctccagatgaggctgagacccaagagctggatattaatgtagccactgttagtcaggcaccatgggatgatgaaactccaggaccatcttactcaagctcagagcaggtacacgttactatgtcttctcttttaaatacttctgacagttcagatgaagaacttgtcacaggaggagccacgtctcagatacaaggagtacaaaccaatgacgacctaaataatgacagtgatgattcttcagataattgtgtcattgttgggtttgttaaaccactagctgagaggaccccagaacttgttgaactgtcctctgattctgaggacttaggttcttatgagaaaatggagacagtgaagacacaagaacaggagcaatcttacagttctggtgatagcgatgttagtagatgctcatctccacactctgtccttggaaaggatgaacaaataaataaaggtcattgtgattctagtacaagaatcaaatcaaagaaggaagagaaacgatctacatcattgtcatctcccagaaacctgaactcatctgtaagaggagacagagtatattctccatataaccatagacacagaaagaggggaagatcaagaagttcagattcacgttctcagagtagaagtgggcatgatcagaagaatcatagaaagcatcatgggaagaaaagaatgaaaagtaaacgatccagaagcagggaaagtagcagacctagagggagaagagacaaaaagagatcaagaactagagatagcagttggtccagaagaagccaaactctgtctctaagtagtgaaagcacaagcagatcaaggtctcgtagcagtgatcatggtaaaagaagatcacggagcagaaatagagatcgttattatttaagaaataattatggaagcagatacaaatgggagtatacttattacagtagaaacaaggacagggatgggtacgaatcatcttacaggaggaggactctgtccagagctcattattctagacagtcttcaagtccagaatttagagttcagtccttttctgaaagaacaaatgctaggaaaaaaaataatcacagtgagaggaagtattactactatgaaaggcacagatcaaggagcctgtctagtaacagatcaaggactgcatctaccgggactgaccgggtgagaaatgaaaagcctggagggaaacgaaaatacaaaacacggcatttggagggtactaacgaagtggctcagccatctcgtgaatttgcttctaaagcaaaggacagtcattaccaaaaatcttcatcaaaattggatggaaactacaaaaatgagagtgataccttttcagacagccgatcatcagacagagagacaaaacacaaaaggagaaaaaggaagacccggagcctaagtgtagagatagtttatgaaggaaaagctactgatacaactaaacaccataaaaagaaaaagaagaaacataagaagaagcataagaaacaccatggagataatgcttcacgttccccagttgtaattaccattgacagtgacagtgataaggattctgaagtaaaggaggatacagaatgtgacaatagtggtcctcaagaccctctacaaaatgagtttttggctccttccttggaaccatttgaaactaaagatgtagttacaatagaagctgaatttggtgtgctggacaaggaatgtgatattgccacacttagtaacaacttgaataatgccaacaaaactgtagataatattccacctctggcagcttcagttgaacaaactctcgatgtaagagaagagagcacctttgtttctgatttggagaaccagcccagtaacattgtgtctcttcaaactgagccatcaaggcaattgccatcgccacggacatcattaatgtcagtatgtcttggtagagactgtgatatgtct

SEQ ID NO: 4088 - DNA, 3135 bp, Homo sapiens
  source 1..3135: mol_type = genomic DNA
atggggtcgcagccgccgctggggtctccgctgtctcgcgaggagggtgaagcgcccccgcctgctcccgcttcggagggtaggcggagaagtcgccgggtacgccttcgcggatcctgccgacaccgacctagctttctgggctgccgggagctcgcggcgagcgccccagccaggcctgcgccggcatcctccgagataatggcatcagctgctaaggaatttaaaatggacaacttttcacctaaagctggcactagcaaattgcaacagacagtaccagctgatgcatctcctgattctaagtgtcctatatgcttggatagatttgataatgtgtcttacttagatcgctgcttacataagttctgttttcgctgtgtacaggagtggtcaaaaaacaaagctgaatgcccactatgtaaacagccctttgattctattttccattctgtgagggcagaagatgacttcaaggagtatgtcctaaggccttcgtataatggttcttttgtcacccctgatcgacgatttcgctaccgtacaactctgacaagggaacgaaatgcttctgtgtattcacctagtggtcctgtgaacagaagaacaacaactccaccggatagtggagtactgtttgaagggttaggcatttcaacaagacctagagatgttgaaattcctcagtttatgagacagattgcagtaaggaggccaactacggcagatgaaagatctttgcggaaaattcaagaacaagatattattaattttagacgaactctttatcgtgctggtgctcgagttagaaatattgaagatggtggccgctacagggatatttcagctgaatttttccgtagaaatccagcttgccttcacagattagtcccctggttaaaacgtgaacttacagttctttttggagctcatggatctttagtgaatattgtccagcatattatcatgagtaatgttactcgctatgacttggagagtcaggcatttgtgtctgatttaagaccatttttacttaatcgaactgagcattttatacatgaatttatcagttttgcccgatctccttttaacatggcagcctttgaccagcatgccaattatgattgccctgctccttcatacgaagaaggcagccattctgattcttcagtcataacaatatctccagatgaggctgagacccaagagctggatattaatgtagccactgttagtcaggcaccatgggatgatgaaactccaggaccatcttactcaagctcagagcaggtacacgttactatgtcttctcttttaaatacttctgacagttcagatgaagaacttgtcacaggaggagccacgtctcagatacaaggagtacaaaccaatgacgacctaaataatgacagtgatgattcttcagataattgtgtcattgttgggtttgttaaaccactagctgagaggaccccagaacttgttgaactgtcctctgattctgaggacttaggttcttatgagaaaatggagacagtgaagacacaagaacaggagcaatcttacagttctggtgatagcgatgttagtagatgctcatctccacactctgtccttggaaaggatgaacaaataaataaaggtcattgtgattctagtacaagaatcaaatcaaagaaggaagagaaacgatctacatcattgtcatctcccagaaacctgaactcatctgtaagaggagacagagtatattctccatataaccatagacacagaaagaggggaagatcaagaagttcagattcacgttctcagagtagaagtgggcatgatcagaagaatcatagaaagcatcatgggaagaaaagaatgaaaagtaaacgatccagaagcagggaaagtagcagacctagagggagaagagacaaaaagagatcaagaactagagatagcagttggtccagaagaagccaaactctgtctctaagtagtgaaagcacaagcagatcaaggtctcgtagcagtgatcatggtaaaagaagatcacggagcagaaatagagatcgttattatttaagaaataattatggaagcagatacaaatgggagtatacttattacagtagaaacaaggacagggatgggtacgaatcatcttacaggaggaggactctgtccagagctcattattctagacagtcttcaagtccagaatttagagttcagtccttttctgaaagaacaaatgctaggaaaaaaaataatcacagtgagaggaagtattactactatgaaaggcacagatcaaggagcctgtctagtaacagatcaaggactgcatctaccgggactgaccgggtgagaaatgaaaagcctggagggaaacgaaaatacaaaacacggcatttggagggtactaacgaagtggctcagccatctcgtgaatttgcttctaaagcaaaggacagtcattaccaaaaatcttcatcaaaattggatggaaactacaaaaatgagagtgataccttttcagacagccgatcatcagacagagagacaaaacacaaaaggagaaaaaggaagacccggagcctaagtgtagagatagtttatgaaggaaaagctactgatacaactaaacaccataaaaagaaaaagaagaaacataagaagaagcataagaaacaccatggagataatgcttcacgttccccagttgtaattaccattgacagtgacagtgataaggattctgaagtaaaggaggatacagaatgtgacaatagtggtcctcaagaccctctacaaaatgagtttttggctccttccttggaaccatttgaaactaaagatgtagttacaatagaagctgaatttggtgtgctggacaaggaatgtgatattgccacacttagtaacaacttgaataatgccaacaaaactgtagataatattccacctctggcagcttcagttgaacaaactctcgatgtaagagaagagagcacctttgtttctgatttggagaaccagcccagtaacattgtgtctcttcaaactgagccatcaaggcaattgccatcgccacggacatcattaatgtcagtatgtcttggtagagactgtgatatgtct

SEQ ID NO: 4089 - DNA, 4896 bp, Homo sapiens
  source 1..4896: mol_type = genomic DNA
atgccggcgcgtaccgccccagcccgggtgcccacactggccgtcccggccatctcgctgcccgacgatgtccgcaggcggctcaaagatttggaaagagacagcttaacagaaaaggaatgtgtgaaggagaaattgaatctcttgcacgaatttctgcaaacagaaataaagaatcagttatgtgacttggaaaccaaattacgtaaagaagaattatccgaggagggctacctggctaaagtcaaatcccttttaaataaagatttgtccttggagaacggtgctcatgcttacaaccgggaagtgaatggacgtctagaaaacgggaaccaagcaagaagtgaagcccgtagagtgggaatggcagatgccaacagcccccccaaacccctttccaaacctcgcacgcccaggaggagcaagtccgatggagaggctaagcgttcaagagaccctcctgcctcagcctcccaagtaactgggattagagctgaaccttcacctagccccaggattacaaggaaaagcaccaggcaaaccaccatcacatctcattttgcaaagggccctgccaaacggaaacctcaggaagagtctgaaagagccaaatcggatgagtccatcaaggaagaagacaaagaccaggatgagaagagacgtagagttacatccagagaacgagttgctagaccgcttcctgcagaagaacctgaaagagcaaaatcaggaacgcgcactgaaaaggaagaagaaagagatgaaaaagaagaaaagagactccgaagtcaaaccaaagaaccaacacccaaacagaaactgaaggaggagccggacagagaagccagggcaggcgtgcaggctgacgaggacgaagatggagacgagaaagatgagaagaagcacagaagtcaacccaaagatctagctgccaaacggaggcccgaagaaaaagaacctgaaaaagtaaatccacagatttctgatgaaaaagacgaggatgaaaaggaggagaagagacgcaaaacgacccccaaagaaccaacggagaaaaaaatggctcgcgccaaaacagtcatgaactccaagacccaccctcccaagtgcattcagtgcgggcagtacctggacgaccctgacctcaaatatgggcagcacccaccagacgcggtggatgagccacagatgctgacaaatgagaagctgtccatctttgatgccaacgagtctggctttgagagttatgaggcgcttccccagcacaaactgacctgcttcagtgtgtactgtaagcacggtcacctgtgtcccatcgacaccggcctcatcgagaagaatatcgaactcttcttttctggttcagcaaaaccaatctatgatgatgacccatctcttgaaggtggtgttaatggcaaaaatcttggccccataaatgaatggtggatcactggctttgatggaggtgaaaaggccctcatcggcttcagcacctcatttgccgaatacattctgatggatcccagtcccgagtatgcgcccatatttgggctgatgcaggagaagatctacatcagcaagattgtggtggagttcctgcagagcaattccgactcgacctatgaggacctgatcaacaagatcgagaccacggttcctccttctggcctcaacttgaaccgcttcacagaggactccctcctgcgacacgcgcagtttgtggtggagcaggtggagagttatgacgaggccggggacagtgatgagcagcccatcttcctgacaccctgcatgcgggacctgatcaagctggctggggtcacgctgggacagaggcgagcccaggcgaggcggcagaccatcaggcattctaccagggagaaggacaggggacccacgaaagccaccaccaccaagctggtctaccagatcttcgatactttcttcgcagagcaaattgaaaaggatgacagagaagacaaggagaacgcctttaagcgccggcgatgtggcgtctgtgaggtgtgtcagcagcctgagtgtgggaaatgtaaagcctgcaaggacatggttaaatttggtggcagtggacggagcaagcaggcttgccaagagcggaggtgtcccaatatggccatgaaggaggcagatgacgatgaggaagtcgatgataacatcccagagatgccgtcacccaaaaaaatgcaccaggggaagaagaagaaacagaacaagaatcgcatctcttgggtcggagaagccgtcaagactgatgggaagaagagttactataagaaggtgtgcattgatgcggaaaccctggaagtgggggactgtgtctctgttattccagatgattcctcaaaaccgctgtatctagcaagggtcacggcgctgtgggaggacagcagcaacgggcagatgtttcacgcccactggttctgcgctgggacagacacagtcctcggggccacgtcggaccctctggagctgttcttggtggatgaatgtgaggacatgcagctttcatatatccacagcaaagtgaaagtcatctacaaagccccctccgaaaactgggccatggagggaggcatggatcccgagtccctgctggagggggacgacgggaagacctacttctaccagctgtggtatgatcaagactacgcgagattcgagtcccctccaaaaacccagccaacagaggacaacaagttcaaattctgtgtgagctgtgcccgtctggctgagatgaggcaaaaagaaatccccagggtcctggagcagctcgaggacctggatagccgggtcctctactactcagccaccaagaacggcatcctgtaccgagttggtgatggtgtgtacctgccccctgaggccttcacgttcaacatcaagctgtccagtcccgtgaaacgcccacggaaggagcccgtggatgaggacctgtacccagagcactaccggaaatactccgactacatcaaaggcagcaacctggatgcccctgagccctaccgaattggccggatcaaagagatcttctgtcccaagaagagcaacggcaggcccaatgagactgacatcaaaatccgggtcaacaagttctacaggcctgagaacacccacaagtccactccagcgagctaccacgcagacatcaacctgctctactggagcgacgaggaggccgtggtggacttcaaggctgtgcagggccgctgcaccgtggagtatggggaggacctgcccgagtgcgtccaggtgtactccatgggcggccccaaccgcttctacttcctcgaggcctataatgcaaagagcaaaagctttgaagatcctcccaaccatgcccgtagccctggaaacaaagggaagggcaagggaaaagggaagggcaagcccaagtcccaagcctgtgagccgagcgagccagagatagagatcaagctgcccaagctgcggaccctggatgtgttttctggctgcggggggttgtcggagggattccaccaagcaggcatctctgacacgctgtgggccatcgagatgtgggaccctgcggcccaggcgttccggctgaacaaccccggctccacagtgttcacagaggactgcaacatcctgctgaagctggtcatggctggggagaccaccaactcccgcggccagcggctgccccagaagggagacgtggagatgctgtgcggcgggccgccctgccagggcttcagcggcatgaaccgcttcaattcgcgcacctactccaagttcaaaaactctctggtggtttccttcctcagctactgcgactactaccggccccggttcttcctcctggagaatgtcaggaactttgtctccttcaagcgctccatggtcctgaagctcaccctccgctgcctggtccgcatgggctatcagtgcaccttcggcgtgctgcaggccggtcagtacggcgtggcccagactaggaggcgggccatcatcctggccgcggcccctggagagaagctccctctgttcccggagccactgcacgtgtttgctccccgggcctgccagctgagcgtggtggtggatgacaagaagtttgtgagcaacataaccaggttgagctcgggtcctttccggaccatcacggtgcgagacacgatgtccgacctgccggaggtgcggaatggagcctcggcactggagatctcctacaacggggagcctcagtcctggttccagaggcagctccggggcgcacagtaccagcccatcctcagggaccacatctgtaaggacatgagtgcattggtggctgcccgcatgcggcacatccccttggccccagggtcagactggcgcgatctgcccaacatcgaggtgcggctctcagacggcaccatggccaggaagctgcggtatacccaccatgacaggaagaacggccgcagcagctctggggccctccgtggggtctgctcctgcgtggaagccggcaaagcctgcgaccccgcagccaggcagttcaacaccctcatcccctggtgcctgccccacaccgggaaccggcacaaccactgggctggcctctatggaaggctcgagtgggacggcttcttcagcacaaccgtcaccaaccccgagcccatgggcaagcagggccgcgtgctccacccagagcagcaccgtgtggtgagcgtgcgggagtgtgcccgctcccagggcttccctgacacctaccggctcttcggcaacatcctggacaagcaccggcaggtgggcaatgccgtgccaccgcccctggccaaagccattggcttggagatcaagctttgtatgttggccaaagcccgagagagtgcctcagctaaaataaaggaggaggaagctgctaaggac

SEQ ID NO: 4090 - DNA, 4848 bp, Homo sapiens
  source 1..4848: mol_type = genomic DNA
atgccggcgcgtaccgccccagcccgggtgcccacactggccgtcccggccatctcgctgcccgacgatgtccgcaggcggctcaaagatttggaaagagacagcttaacagaaaaggaatgtgtgaaggagaaattgaatctcttgcacgaatttctgcaaacagaaataaagaatcagttatgtgacttggaaaccaaattacgtaaagaagaattatccgaggagggctacctggctaaagtcaaatcccttttaaataaagatttgtccttggagaacggtgctcatgcttacaaccgggaagtgaatggacgtctagaaaacgggaaccaagcaagaagtgaagcccgtagagtgggaatggcagatgccaacagcccccccaaacccctttccaaacctcgcacgcccaggaggagcaagtccgatggagaggctaagcctgaaccttcacctagccccaggattacaaggaaaagcaccaggcaaaccaccatcacatctcattttgcaaagggccctgccaaacggaaacctcaggaagagtctgaaagagccaaatcggatgagtccatcaaggaagaagacaaagaccaggatgagaagagacgtagagttacatccagagaacgagttgctagaccgcttcctgcagaagaacctgaaagagcaaaatcaggaacgcgcactgaaaaggaagaagaaagagatgaaaaagaagaaaagagactccgaagtcaaaccaaagaaccaacacccaaacagaaactgaaggaggagccggacagagaagccagggcaggcgtgcaggctgacgaggacgaagatggagacgagaaagatgagaagaagcacagaagtcaacccaaagatctagctgccaaacggaggcccgaagaaaaagaacctgaaaaagtaaatccacagatttctgatgaaaaagacgaggatgaaaaggaggagaagagacgcaaaacgacccccaaagaaccaacggagaaaaaaatggctcgcgccaaaacagtcatgaactccaagacccaccctcccaagtgcattcagtgcgggcagtacctggacgaccctgacctcaaatatgggcagcacccaccagacgcggtggatgagccacagatgctgacaaatgagaagctgtccatctttgatgccaacgagtctggctttgagagttatgaggcgcttccccagcacaaactgacctgcttcagtgtgtactgtaagcacggtcacctgtgtcccatcgacaccggcctcatcgagaagaatatcgaactcttcttttctggttcagcaaaaccaatctatgatgatgacccatctcttgaaggtggtgttaatggcaaaaatcttggccccataaatgaatggtggatcactggctttgatggaggtgaaaaggccctcatcggcttcagcacctcatttgccgaatacattctgatggatcccagtcccgagtatgcgcccatatttgggctgatgcaggagaagatctacatcagcaagattgtggtggagttcctgcagagcaattccgactcgacctatgaggacctgatcaacaagatcgagaccacggttcctccttctggcctcaacttgaaccgcttcacagaggactccctcctgcgacacgcgcagtttgtggtggagcaggtggagagttatgacgaggccggggacagtgatgagcagcccatcttcctgacaccctgcatgcgggacctgatcaagctggctggggtcacgctgggacagaggcgagcccaggcgaggcggcagaccatcaggcattctaccagggagaaggacaggggacccacgaaagccaccaccaccaagctggtctaccagatcttcgatactttcttcgcagagcaaattgaaaaggatgacagagaagacaaggagaacgcctttaagcgccggcgatgtggcgtctgtgaggtgtgtcagcagcctgagtgtgggaaatgtaaagcctgcaaggacatggttaaatttggtggcagtggacggagcaagcaggcttgccaagagcggaggtgtcccaatatggccatgaaggaggcagatgacgatgaggaagtcgatgataacatcccagagatgccgtcacccaaaaaaatgcaccaggggaagaagaagaaacagaacaagaatcgcatctcttgggtcggagaagccgtcaagactgatgggaagaagagttactataagaaggtgtgcattgatgcggaaaccctggaagtgggggactgtgtctctgttattccagatgattcctcaaaaccgctgtatctagcaagggtcacggcgctgtgggaggacagcagcaacgggcagatgtttcacgcccactggttctgcgctgggacagacacagtcctcggggccacgtcggaccctctggagctgttcttggtggatgaatgtgaggacatgcagctttcatatatccacagcaaagtgaaagtcatctacaaagccccctccgaaaactgggccatggagggaggcatggatcccgagtccctgctggagggggacgacgggaagacctacttctaccagctgtggtatgatcaagactacgcgagattcgagtcccctccaaaaacccagccaacagaggacaacaagttcaaattctgtgtgagctgtgcccgtctggctgagatgaggcaaaaagaaatccccagggtcctggagcagctcgaggacctggatagccgggtcctctactactcagccaccaagaacggcatcctgtaccgagttggtgatggtgtgtacctgccccctgaggccttcacgttcaacatcaagctgtccagtcccgtgaaacgcccacggaaggagcccgtggatgaggacctgtacccagagcactaccggaaatactccgactacatcaaaggcagcaacctggatgcccctgagccctaccgaattggccggatcaaagagatcttctgtcccaagaagagcaacggcaggcccaatgagactgacatcaaaatccgggtcaacaagttctacaggcctgagaacacccacaagtccactccagcgagctaccacgcagacatcaacctgctctactggagcgacgaggaggccgtggtggacttcaaggctgtgcagggccgctgcaccgtggagtatggggaggacctgcccgagtgcgtccaggtgtactccatgggcggccccaaccgcttctacttcctcgaggcctataatgcaaagagcaaaagctttgaagatcctcccaaccatgcccgtagccctggaaacaaagggaagggcaagggaaaagggaagggcaagcccaagtcccaagcctgtgagccgagcgagccagagatagagatcaagctgcccaagctgcggaccctggatgtgttttctggctgcggggggttgtcggagggattccaccaagcaggcatctctgacacgctgtgggccatcgagatgtgggaccctgcggcccaggcgttccggctgaacaaccccggctccacagtgttcacagaggactgcaacatcctgctgaagctggtcatggctggggagaccaccaactcccgcggccagcggctgccccagaagggagacgtggagatgctgtgcggcgggccgccctgccagggcttcagcggcatgaaccgcttcaattcgcgcacctactccaagttcaaaaactctctggtggtttccttcctcagctactgcgactactaccggccccggttcttcctcctggagaatgtcaggaactttgtctccttcaagcgctccatggtcctgaagctcaccctccgctgcctggtccgcatgggctatcagtgcaccttcggcgtgctgcaggccggtcagtacggcgtggcccagactaggaggcgggccatcatcctggccgcggcccctggagagaagctccctctgttcccggagccactgcacgtgtttgctccccgggcctgccagctgagcgtggtggtggatgacaagaagtttgtgagcaacataaccaggttgagctcgggtcctttccggaccatcacggtgcgagacacgatgtccgacctgccggaggtgcggaatggagcctcggcactggagatctcctacaacggggagcctcagtcctggttccagaggcagctccggggcgcacagtaccagcccatcctcagggaccacatctgtaaggacatgagtgcattggtggctgcccgcatgcggcacatccccttggccccagggtcagactggcgcgatctgcccaacatcgaggtgcggctctcagacggcaccatggccaggaagctgcggtatacccaccatgacaggaagaacggccgcagcagctctggggccctccgtggggtctgctcctgcgtggaagccggcaaagcctgcgaccccgcagccaggcagttcaacaccctcatcccctggtgcctgccccacaccgggaaccggcacaaccactgggctggcctctatggaaggctcgagtgggacggcttcttcagcacaaccgtcaccaaccccgagcccatgggcaagcagggccgcgtgctccacccagagcagcaccgtgtggtgagcgtgcgggagtgtgcccgctcccagggcttccctgacacctaccggctcttcggcaacatcctggacaagcaccggcaggtgggcaatgccgtgccaccgcccctggccaaagccattggcttggagatcaagctttgtatgttggccaaagcccgagagagtgcctcagctaaaataaaggaggaggaagctgctaaggac

SEQ ID NO: 4091 - DNA, 1230 bp, Homo sapiens
  source 1..1230: mol_type = genomic DNA
atggaacagaagccaagcaaggtggagtgtgggtcagacccagaggagaacagtgccaggtcaccagatggaaagcgaaaaagaaagaacggccaatgttccctgaaaaccagcatgtcagggtatatccctagttacctggacaaagacgagcagtgtgtcgtgtgtggggacaaggcaactggttatcactaccgctgtatcacttgtgagggctgcaagggcttctttcgccgcacaatccagaagaacctccatcccacctattcctgcaaatatgacagctgctgtgtcattgacaagatcacccgcaatcagtgccagctgtgccgcttcaagaagtgcatcgccgtgggcatggccatggacttggttctagatgactcgaagcgggtggccaagcgtaagctgattgagcagaaccgggagcggcggcggaaggaggagatgatccgatcactgcagcagcgaccagagcccactcctgaagagtgggatctgatccacattgccacagaggcccatcgcagcaccaatgcccagggcagccattggaaacagaggcggaaattcctgcccgatgacattggccagtcacccattgtctccatgccggacggagacaaggtggacctggaagccttcagcgagtttaccaagatcatcaccccggccatcacccgtgtggtggactttgccaaaaaactgcccatgttctccgagctgccttgcgaagaccagatcatcctcctgaaggggtgctgcatggagatcatgtccctgcgggcggctgtccgctacgaccctgagagcgacaccctgacgctgagtggggagatggctgtcaagcgggagcagctcaagaatggcggcctgggcgtagtctccgacgccatctttgaactgggcaagtcactctctgcctttaacctggatgacacggaagtggctctgctgcaggctgtgctgctaatgtcaacagaccgctcgggcctgctgtgtgtggacaagatcgagaagagtcaggaggcgtacctgctggcgttcgagcactacgtcaaccaccgcaaacacaacattccgcacttctggcccaagctgctgatgaaggtgactgacctccgcatgatcggggcctgccacgccagccgcttcctccacatgaaagtcgagtgccccaccgaactcttccccccactcttcctcgaggtctttgaggatcaggaagtc

SEQ ID NO: 4092 - DNA, 1353 bp, Homo sapiens
  source 1..1353: mol_type = genomic DNA
atggaacagaagccaagcaaggtggagtgtgggtcagacccagaggagaacagtgccaggtcaccagatggaaagcgaaaaagaaagaacggccaatgttccctgaaaaccagcatgtcagggtatatccctagttacctggacaaagacgagcagtgtgtcgtgtgtggggacaaggcaactggttatcactaccgctgtatcacttgtgagggctgcaagggcttctttcgccgcacaatccagaagaacctccatcccacctattcctgcaaatatgacagctgctgtgtcattgacaagatcacccgcaatcagtgccagctgtgccgcttcaagaagtgcatcgccgtgggcatggccatggacttggttctagatgactcgaagcgggtggccaagcgtaagctgattgagcagaaccgggagcggcggcggaaggaggagatgatccgatcactgcagcagcgaccagagcccactcctgaagagtgggatctgatccacattgccacagaggcccatcgcagcaccaatgcccagggcagccattggaaacagaggcggaaattcctgcccgatgacattggccagtcacccattgtctccatgccggacggagacaaggtggacctggaagccttcagcgagtttaccaagatcatcaccccggccatcacccgtgtggtggactttgccaaaaaactgcccatgttctccgagctgccttgcgaagaccagatcatcctcctgaaggggtgctgcatggagatcatgtccctgcgggcggctgtccgctacgaccctgagagcgacaccctgacgctgagtggggagatggctgtcaagcgggagcagctcaagaatggcggcctgggcgtagtctccgacgccatctttgaactgggcaagtcactctctgcctttaacctggatgacacggaagtggctctgctgcaggctgtgctgctaatgtcaacagaccgctcgggcctgctgtgtgtggacaagatcgagaagagtcaggaggcgtacctgctggcgttcgagcactacgtcaaccaccgcaaacacaacattccgcacttctggcccaagctgctgatgaagggtccgcaggtccggcagcttgagcagcagcttggtgaagcgggaagtctccaagggccggttcttcagcaccagagcccgaagagcccgcagcagcgtctcctggagctgctccaccgaagcggaattctccatgcccgagcggtctgtggggaagacgacagcagtgaggcggactccccgagctcctctgaggaggaaccggaggtctgcgaggacctggcaggcaatgcagcctctccc

SEQ ID NO: 4093 - DNA, 1470 bp, Homo sapiens
  source 1..1470: mol_type = genomic DNA
atggaacagaagccaagcaaggtggagtgtgggtcagacccagaggagaacagtgccaggtcaccagatggaaagcgaaaaagaaagaacggccaatgttccctgaaaaccagcatgtcagggtatatccctagttacctggacaaagacgagcagtgtgtcgtgtgtggggacaaggcaactggttatcactaccgctgtatcacttgtgagggctgcaagggcttctttcgccgcacaatccagaagaacctccatcccacctattcctgcaaatatgacagctgctgtgtcattgacaagatcacccgcaatcagtgccagctgtgccgcttcaagaagtgcatcgccgtgggcatggccatggacttggttctagatgactcgaagcgggtggccaagcgtaagctgattgagcagaaccgggagcggcggcggaaggaggagatgatccgatcactgcagcagcgaccagagcccactcctgaagagtgggatctgatccacattgccacagaggcccatcgcagcaccaatgcccagggcagccattggaaacagaggcggaaattcctgcccgatgacattggccagtcacccattgtctccatgccggacggagacaaggtggacctggaagccttcagcgagtttaccaagatcatcaccccggccatcacccgtgtggtggactttgccaaaaaactgcccatgttctccgagctgccttgcgaagaccagatcatcctcctgaaggggtgctgcatggagatcatgtccctgcgggcggctgtccgctacgaccctgagagcgacaccctgacgctgagtggggagatggctgtcaagcgggagcagctcaagaatggcggcctgggcgtagtctccgacgccatctttgaactgggcaagtcactctctgcctttaacctggatgacacggaagtggctctgctgcaggctgtgctgctaatgtcaacagaccgctcgggcctgctgtgtgtggacaagatcgagaagagtcaggaggcgtacctgctggcgttcgagcactacgtcaaccaccgcaaacacaacattccgcacttctggcccaagctgctgatgaaggagagagaagtgcagagttcgattctgtacaagggggcagcggcagaaggccggccgggcgggtcactgggcgtccacccggaaggacagcagcttctcggaatgcatgttgttcagggtccgcaggtccggcagcttgagcagcagcttggtgaagcgggaagtctccaagggccggttcttcagcaccagagcccgaagagcccgcagcagcgtctcctggagctgctccaccgaagcggaattctccatgcccgagcggtctgtggggaagacgacagcagtgaggcggactccccgagctcctctgaggaggaaccggaggtctgcgaggacctggcaggcaatgcagcctctccc

SEQ ID NO: 4094 - DNA, 2586 bp, Homo sapiens
  source 1..2586: mol_type = genomic DNA
atgcccgccggcctcaccgaacccgccggcgccgctcccccggctgctgtgagcgcctcggggaccgtgaccatggccccggccggggcgctgccggtgcgggtggagagcactccggtggccctgggcgccgtgactaaggctcctgtcagcgtctgcgtggagcccacggcgtcccagcccctgcggtcccccgtggggaccctggtgaccaaagtggctccggtcagcgcccctcctaaagtcagcagcggccctaggctgcctgctcctcagatagtcgccgtgaaagcccccaacaccacgacaatccagtttcctgctaatttgcagcttcctccaggaaccgttttgattaaaagtaacagtggtccgttgatgttggtatctcctcagcaaactgtaacaagagccgagaccacaagtaacataacctcaaggccagcagtaccagcgaatcctcaaacagtcaaaatctgtacagtgccgaactctagctcacaattaatcaagaaagtggcagtgacacctgttaaaaaattggcacaaataggaactactgtggtaaccactgttccgaagccttcctcagtacaatctgtggctgtgccaaccagtgtcgtcacagttactcctggaaagccattgaatactgtaactaccctgaagccttcaagtttgggagcatcatccactccttcaaatgagcccaatcttaaagcagagaactcagcagctgttcagattaatctttctccgacaatgctagaaaatgtgaagaaatgcaagaacttccttgcaatgttaataaaactagcatgtagtggatcacagtccccagaaatggggcaaaatgtgaagaagctggtggaacaacttttggatgcaaaaatcgaagcagaagaatttactaggaaactgtatgttgaactcaagtcttcacctcagcctcacctggttccttttcttaagaaaagcgtggttgccttacgacaacttctgcctaactcccagagcttcatccagcaatgtgttcagcagacttctagtgacatggtcattgctacctgtactacaacagtaacaacttctcctgtggtgacaactacagtgtcctcaagccagtctgaaaagtcaattattgtttctggagcaacagcacccagaactgtgtcagtgcaaactttgaacccacttgctggtccagtgggagcaaaagctggagttgtgacacttcattctgtgggcccaactgctgcaacaggaggaacaacagctggaactggtttgcttcagacttcaaaaccacttgtgacatctgtggcaaacacagtgaccacggtctcactgcaacctgaaaagccagttgtctctggaacagcagtaacactgtcccttccagcagtaacttttggagaaacttcaggtgcagctatttgtcttccatctgtgaaacctgttgtttcttctgctgggaccacatctgacaagcctgttattgggactccagttcaaatcaaacttgcccagccgggccctgtcctttcacaaccagctgggattccacaggcagttcaagtcaagcaactagtagttcagcagccttcaggaggcaatgaaaaacaagtgaccacaatttcacattcctcaacattgaccattcagaaatgtggacagaagacgatgccagtgaacaccataatacctactagtcagtttcctccagcttccattctaaagcaaattactctgcctggaaataaaattctgtcacttcaagcatctcctactcagaaaaatagaataaaagagaatgtaacatcatgcttccgagatgaggatgacatcaatgatgtgacttctatggcaggggtcaaccttaatgaagaaaatgcctgcatcttagcaacaaactctgaattggttggcacactcattcagtcatgtaaagatgaaccatttctttttattggagctctacaaaagagaattttagacattggtaaaaagcatgacattacagaacttaactctgatgctgtgaacttgatctcccaagcaacacaggaacgactacgaggccttctagaaaaactgactgcaattgctcagcatcgaatgactacttacaaggcaagtgaaaattacatcctgtgtagtgataccaggtcacagctcaaatttcttgaaaagctggatcaattggagaagcagagaaaggatttggaagaaagagaaatgttacttaaggcagccaagagtcgttctaataaagaagatccagaacagctgagattaaagcagaaagccaaagagttacagcaattggaacttgcacagatacagcatagagacgctaatctcacagctcttgcagctattggaccaaggaagaagagaccactagaatctggaattgagggcttaaaagacaaccttcttgcttctgggacatccagcctgacagccaccaaacagttgcatcgtccaagaatcacgagaatctgcctcagggacttgatattttgtatggaacaggaacgggagatgaagtattctcgagctctatacctggcccttctgaag

SEQ ID NO: 4095 - DNA, 2601 bp, Homo sapiens
  source 1..2601: mol_type = genomic DNA
atgcccgccggcctcaccgaacccgccggcgccgctcccccggctgctgtgagcgcctcggggaccgtgaccatggccccggccggggcgctgccggtgcgggtggagagcactccggtggccctgggcgccgtgactaaggctcctgtcagcgtctgcgtggagcccacggcgtcccagcccctgcggtcccccgtggggaccctggtgaccaaagtggctccggtcagcgcccctcctaaagtcagcagcggccctaggctgcctgctcctcagatagtcgccgtgaaagcccccaacaccacgacaatccagtttcctgctaatttgcagcttcctccaggaaccgttttgattaaaagtaacagtggtccgttgatgttggtatctcctcagcaaactgtaacaagagccgagaccacaagtaacataacctcaaggccagcagtaccagcgaatcctcaaacagtcaaaatctgtacagtgccgaactctagctcacaattaatcaagaaagtggcagtgacacctgttaaaaaattggcacaaataggaactactgtggtaaccactgttccgaagccttcctcagtacaatctgtggctgtgccaaccagtgtcgtcacagttactcctggaaagccattgaatactgtaactaccctgaagccttcaagtttgggagcatcatccactccttcaaatgagcccaatcttaaagcagagaactcagcagctgttcagattaatctttctccgacaatgctagaaaatgtgaagaaatgcaagaacttccttgcaatgttaataaaactagcatgtagtggatcacagtccccagaaatggggcaaaatgtgaagaagctggtggaacaacttttggatgcaaaaatcgaagcagaagaatttactaggaaactgtatgttgaactcaagtcttcacctcagcctcacctggttccttttcttaagaaaagcgtggttgccttacgacaacttctgcctaactcccagagcttcatccagcaatgtgttcagcagacttctagtgacatggtcattgctacctgtactacaacagtaacaacttctcctgtggtgacaactacagtgtcctcaagccagtctgaaaagtcaattattgtttctggagcaacagcacccagaactgtgtcagtgcaaactttgaacccacttgctggtccagtgggagcaaaagctggagttgtgacacttcattctgtgggcccaactgctgcaacaggaggaacaacagctggaactggtttgcttcagacttcaaaaccacttgtgacatctgtggcaaacacagtgaccacggtctcactgcaacctgaaaagccagttgtctctggaacagcagtaacactgtcccttccagcagtaacttttggagaaacttcaggtgcagctatttgtcttccatctgtgaaacctgttgtttcttctgctgggaccacatctgacaagcctgttattgggactccagttcaaatcaaacttgcccagccgggccctgtcctttcacaaccagctgggattccacaggcagttcaagtcaagcaactattctcattgtttcaggtagttcagcagccttcaggaggcaatgaaaaacaagtgaccacaatttcacattcctcaacattgaccattcagaaatgtggacagaagacgatgccagtgaacaccataatacctactagtcagtttcctccagcttccattctaaagcaaattactctgcctggaaataaaattctgtcacttcaagcatctcctactcagaaaaatagaataaaagagaatgtaacatcatgcttccgagatgaggatgacatcaatgatgtgacttctatggcaggggtcaaccttaatgaagaaaatgcctgcatcttagcaacaaactctgaattggttggcacactcattcagtcatgtaaagatgaaccatttctttttattggagctctacaaaagagaattttagacattggtaaaaagcatgacattacagaacttaactctgatgctgtgaacttgatctcccaagcaacacaggaacgactacgaggccttctagaaaaactgactgcaattgctcagcatcgaatgactacttacaaggcaagtgaaaattacatcctgtgtagtgataccaggtcacagctcaaatttcttgaaaagctggatcaattggagaagcagagaaaggatttggaagaaagagaaatgttacttaaggcagccaagagtcgttctaataaagaagatccagaacagctgagattaaagcagaaagccaaagagttacagcaattggaacttgcacagatacagcatagagacgctaatctcacagctcttgcagctattggaccaaggaagaagagaccactagaatctggaattgagggcttaaaagacaaccttcttgcttctgggacatccagcctgacagccaccaaacagttgcatcgtccaagaatcacgagaatctgcctcagggacttgatattttgtatggaacaggaacgggagatgaagtattctcgagctctatacctggcccttctgaag

SEQ ID NO: 4096 - DNA, 1056 bp, Homo sapiens
  source 1..1056: mol_type = genomic DNA
atgttgggtgggagtgcgggacgcctcaaaatgtcttccagtggcaccctcagcaactactacgtggactcgcttataggccatgagggcgacgaggtgttcgcggcgcgcttcgggccgccggggccaggcgcgcagggccggcctgcaggtgtggctgatggcccggccgccaccgccgccgagttcgcctcgtgtagttttgcccccagatcggccgtgttctctgcctcgtggtccgcggtgccctcccagcccccggcagcggcggcgatgagcggcctctaccacccgtacgttcccccgccgcccctggccgcctctgcctccgagcccggccgctacgtgcgctcctggatggagccgctgcccggcttcccgggcggtgcgggcggtggcggtggtggtggaggcggcggtccgggccgcggtcccagccctggccccagcggcccagccaacgggcgccactacgggattaagcctgaaacccgagcggccccggcccccgccacggccgcctccaccacctcctcctcctccacttccttatcctcctcctccaaacggactgagtgctccgtggcccgggagtcccaggggagcagcggccccgagttctcgtgcaactcgttcctgcaggagaaggcggcagcggcgacggggggaaccgggcctggggcagggatcggggccgcgactgggacgggcggctcgtcggagccctcagcttgcagcgaccacccgatcccaggctgttcgctgaaggaggaggagaagcagcattcgcagccgcagcagcagcaacttgacccaaacaaccccgccgcgaactggatccacgctcgctccacccggaaaaagcgctgtccctacaccaaataccagacgcttgagctggagaaagaattcctcttcaacatgtacctcacccgggaccggcgctacgaggtggccaggattctcaacctaacagagagacaggtcaaaatctggtttcagaaccgtaggatgaaaatgaaaaagatgagcaaggagaaatgccccaaaggagac

SEQ ID NO: 4097 - DNA, 3150 bp, Homo sapiens
  source 1..3150: mol_type = genomic DNA
atggaggtggcggtggagaaggcggtggcggcggcggcagcggcctcggctgcggcctccggggggccctcggcggcgccgagcggggagaacgaggccgagagtcggcagggcccggactcggagcgcggcggcgaggcggcccggctcaacctgttggacacttgcgccgtgtgccaccagaacatccagagccgggcgcccaagctgctgccctgcctgcactctttctgccagcgctgcctgcccgcgccccagcgctacctcatgctgcccgcgcccatgctgggctcggccgagaccccgccacccgtccctgcccccggctcgccggtcagcggctcgtcgccgttcgccacccaagttggagtcattcgttgcccagtttgcagccaagaatgtgcagagagacacatcatagataacttttttgtgaaggacactactgaggttcccagcagtacagtagaaaagtcaaatcaggtatgtacaagctgtgaggacaacgcagaagccaatgggttttgtgtagagtgtgttgaatggctctgcaagacgtgtatcagagctcatcagagggtaaagttcacaaaagaccacactgtcagacagaaagaggaagtatctccagaggcagttggtgtcaccagccagcgaccagtgttttgtccttttcataaaaaggagcagctgaagctgtactgtgagacatgtgacaaactgacatgtcgagactgtcagttgttagaacataaagagcatagataccaatttatagaagaagcttttcagaatcagaaagtgatcatagatacactaatcaccaaactgatggaaaaaacaaaatacataaaattcacaggaaatcagatccaaaacagaattattgaagtaaatcaaaatcaaaagcaggtggaacaggatattaaagttgctatatttacactgatggtagaaataaataaaaaaggaaaagctctactgcatcagttagagagccttgcaaaggaccatcgcatgaaacttatgcaacaacaacaggaagtggctggactctctaaacaattggagcatgtcatgcatttttctaaatgggcagtttccagtggcagcagtacagcattactttatagcaaacgactgattacataccggttacggcacctccttcgtgcaaggtgtgatgcatccccagtgaccaacaacaccatccaatttcactgtgatcctagtttctgggctcaaaatatcatcaacttaggttctttagtaatcgaggataaagagagccagccacaaatgcctaagcagaatcctgtcgtggaacagaattcacagccaccaagtggtttatcatcaaaccagttatccaagttcccaacacagatcagcctagctcaattacggctccagcatatgcagcaacaggtaatggctcagaggcaacaggtgcaacggaggccagcacctgtgggtttaccaaaccctagaatgcaggggcccatccagcaaccttccatctctcatcagcaaccgcctccacgtttgataaactttcagaatcacagccccaaacccaatggaccagttcttcctcctcatcctcaacaactgagatatccaccaaaccagaacataccacgacaagcaataaagccaaaccccctacagatggctttcttggctcaacaagccataaaacagtggcagatcagcagtggacagggaaccccatcaactaccaacagcacatcctctactccttccagccccacgattactagtgcagcaggatatgatggaaaggcttttggttcacctatgatcgatttgagctcaccagtgggagggtcttataatcttccctctcttccggatattgactgttcaagtactattatgctggacaatattgtgaggaaagatactaatatagatcatggccagccaagaccaccctcaaacagaacggtccagtcaccaaattcatcagtgccatctccaggccttgcaggacctgttactatgactagtgtacaccccccaatacgttcacctagtgcctccagcgttggaagccgaggaagctctggctcttccagcaaaccagcaggagctgactctacacacaaagtcccagtggtcatgctggagccaattcgaataaaacaagaaaacagtggaccaccggaaaattatgatttccctgttgttatagtgaagcaagaatcagatgaagaatctaggcctcaaaatgccaattatccaagaagcatactcacctccctgctcttaaatagcagtcagagctctacttctgaggagactgtgctaagatcagatgcccctgatagtacaggagatcaacctggacttcaccaggacaattcctcaaatggaaagtctgaatggttggatccttcccagaagtcacctcttcatgttggagagacaaggaaagaggatgaccccaatgaggactggtgtgcagtttgtcaaaacggaggggaactcctctgctgtgaaaagtgccccaaagtattccatctttcttgtcatgtgcccacattgacaaattttccaagtggagagtggatttgcactttctgccgagacttatctaaaccagaagttgaatatgattgtgatgctcccagtcacaactcagaaaaaaagaaaactgaaggccttgttaagttaacacctatagataaaaggaagtgtgagcgcctacttttatttctttactgccatgaaatgagcctggcttttcaagaccctgttcctctaactgtgcctgattattacaaaataattaaaaatccaatggatttgtcaaccatcaagaaaagactacaagaagattattccatgtactcaaaacctgaagattttgtagctgattttagattgatctttcaaaactgtgctgaattcaatgagcctgattcagaagtagccaatgctggtataaaacttgaaaattattttgaagaacttctaaagaacctctatccagaaaaaaggtttcccaaaccagaattcaggaatgaatcagaagataataaatttagtgatgattcagatgatgactttgtacagccccggaagaaacgcctcaaaagcattgaagaacgccagttgcttaaa

SEQ ID NO: 4098 - DNA, 3048 bp, Homo sapiens
  source 1..3048: mol_type = genomic DNA
atggaggtggcggtggagaaggcggtggcggcggcggcagcggcctcggctgcggcctccggggggccctcggcggcgccgagcggggagaacgaggccgagagtcggcagggcccggactcggagcgcggcggcgaggcggcccggctcaacctgttggacacttgcgccgtgtgccaccagaacatccagagccgggcgcccaagctgctgccctgcctgcactctttctgccagcgctgcctgcccgcgccccagcgctacctcatgctgcccgcgcccatgctgggctcggccgagaccccgccacccgtccctgcccccggctcgccggtcagcggctcgtcgccgttcgccacccaagttggagtcattcgttgcccagtttgcagccaagaatgtgcagagagacacatcatagataacttttttgtgaaggacactactgaggttcccagcagtacagtagaaaagtcaaatcaggtatgtacaagctgtgaggacaacgcagaagccaatgggttttgtgtagagtgtgttgaatggctctgcaagacgtgtatcagagctcatcagagggtaaagttcacaaaagaccacactgtcagacagaaagaggaagtatctccagaggcagttggtgtcaccagccagcgaccagtgttttgtccttttcataaaaaggagcagctgaagctgtactgtgagacatgtgacaaactgacatgtcgagactgtcagttgttagaacataaagagcatagataccaatttatagaagaagcttttcagaatcagaaagtgatcatagatacactaatcaccaaactgatggaaaaaacaaaatacataaaattcacaggaaatcagatccaaaacagaattattgaagtaaatcaaaatcaaaagcaggtggaacaggatattaaagttgctatatttacactgatggtagaaataaataaaaaaggaaaagctctactgcatcagttagagagccttgcaaaggaccatcgcatgaaacttatgcaacaacaacaggaagtggctggactctctaaacaattggagcatgtcatgcatttttctaaatgggcagtttccagtggcagcagtacagcattactttatagcaaacgactgattacataccggttacggcacctccttcgtgcaaggtgtgatgcatccccagtgaccaacaacaccatccaatttcactgtgatcctagtttctgggctcaaaatatcatcaacttaggttctttagtaatcgaggataaagagagccagccacaaatgcctaagcagaatcctgtcgtggaacagaattcacagccaccaagtggtttatcatcaaaccagttatccaagttcccaacacagatcagcctagctcaattacggctccagcatatgcagcaacagcaaccgcctccacgtttgataaactttcagaatcacagccccaaacccaatggaccagttcttcctcctcatcctcaacaactgagatatccaccaaaccagaacataccacgacaagcaataaagccaaaccccctacagatggctttcttggctcaacaagccataaaacagtggcagatcagcagtggacagggaaccccatcaactaccaacagcacatcctctactccttccagccccacgattactagtgcagcaggatatgatggaaaggcttttggttcacctatgatcgatttgagctcaccagtgggagggtcttataatcttccctctcttccggatattgactgttcaagtactattatgctggacaatattgtgaggaaagatactaatatagatcatggccagccaagaccaccctcaaacagaacggtccagtcaccaaattcatcagtgccatctccaggccttgcaggacctgttactatgactagtgtacaccccccaatacgttcacctagtgcctccagcgttggaagccgaggaagctctggctcttccagcaaaccagcaggagctgactctacacacaaagtcccagtggtcatgctggagccaattcgaataaaacaagaaaacagtggaccaccggaaaattatgatttccctgttgttatagtgaagcaagaatcagatgaagaatctaggcctcaaaatgccaattatccaagaagcatactcacctccctgctcttaaatagcagtcagagctctacttctgaggagactgtgctaagatcagatgcccctgatagtacaggagatcaacctggacttcaccaggacaattcctcaaatggaaagtctgaatggttggatccttcccagaagtcacctcttcatgttggagagacaaggaaagaggatgaccccaatgaggactggtgtgcagtttgtcaaaacggaggggaactcctctgctgtgaaaagtgccccaaagtattccatctttcttgtcatgtgcccacattgacaaattttccaagtggagagtggatttgcactttctgccgagacttatctaaaccagaagttgaatatgattgtgatgctcccagtcacaactcagaaaaaaagaaaactgaaggccttgttaagttaacacctatagataaaaggaagtgtgagcgcctacttttatttctttactgccatgaaatgagcctggcttttcaagaccctgttcctctaactgtgcctgattattacaaaataattaaaaatccaatggatttgtcaaccatcaagaaaagactacaagaagattattccatgtactcaaaacctgaagattttgtagctgattttagattgatctttcaaaactgtgctgaattcaatgagcctgattcagaagtagccaatgctggtataaaacttgaaaattattttgaagaacttctaaagaacctctatccagaaaaaaggtttcccaaaccagaattcaggaatgaatcagaagataataaatttagtgatgattcagatgatgactttgtacagccccggaagaaacgcctcaaaagcattgaagaacgccagttgcttaaa

SEQ ID NO: 4099 - DNA, 1425 bp, Homo sapiens
  source 1..1425: mol_type = genomic DNA
atgattcataggcacaaacatgaaatgactttgaagtttccttcaataaaaacagacaatatgttatcagatcaaactccgaccccaacgagattcctgaagaactgcgaggaggtgggcctcttcagcgagctggactgctccctggagcacgagttcaggaaggctcaggaagaggagagcagcaagcggaatatctcgatgcataatgcagttggtggggccatgacggggcccggaactcaccagcttagcagcgctcggctgcccaaccatgacaccaacgttgtgattcagcaagccatgccgtcgcctcagtccagctctgtcatcactcaggcaccttccaccaaccgccagatcgggcctgtcccaggctctctatcttctctgctacatctccacaacagacagagacagcccatgccagcctccatgcctgggaccctgcccaaccctacaatgccaggatcttccgccgtcttgatgccaatggagcgacaaatgtcagtgaactccagcatcatggggatgcaaggtccaaatctcagcaacccctgtgcttctccccaggtccagccaatgcattcagaagccaaaatgaggttgaaggctgcattgactcaccaccctgctgccatgtcaaatgggaacatgaacaccatgggacacatgatggagatgatgggctcccggcaggaccagacgccacaccatcacatgcactcgcacccgcatcagcaccagacactgccaccccatcacccttacccacaccagcaccagcacccagcacaccatcctcaccctcaaccccatcaccagcagaaccatccacatcaccactcccattcccaccttcatgcacacccagcacatcaccagacctcgccacatccgcccctgcacaccggcaaccaagcacaggtttcaccagcaacacaacagatgcagccaacccagacaatacagccaccccagcccacaggggggcgccggcgaagggtggtagacgaggatccggacgagaggcggcggaaatttctggaacggaaccgggcagctgccacccgctgcagacagaagaggaaggtctgggtgatgtcattggaaaagaaagcagaagaactcacccagacaaacatgcagcttcagaatgaagtgtctatgttgaaaaatgaggtggcccagctgaaacagttgttgttaacacataaagactgcccaataacagccatgcagaaagaatcacaaggatatctaagtccagagagtagccctcctgctagtcctgtcccagcttgctcccagcaacaagtcatccagcataataccatcactacttcctcatcggtcagcgaggtggtaggaagctccaccctcagccagctcaccactcacagaacagacctgaatccgattctt

SEQ ID NO: 4100 - DNA, 1524 bp, Homo sapiens
  source 1..1524: mol_type = genomic DNA
atgatttatgaggaatccaagatgaatttggagcaggagaggccgtttgtctgcagtgccccaggctgctcccagcgcttcccaacagaggaccatctgatgattcataggcacaaacatgaaatgactttgaagtttccttcaataaaaacagacaatatgttatcagatcaaactccgaccccaacgagattcctgaagaactgcgaggaggtgggcctcttcagcgagctggactgctccctggagcacgagttcaggaaggctcaggaagaggagagcagcaagcggaatatctcgatgcataatgcagttggtggggccatgacggggcccggaactcaccagcttagcagcgctcggctgcccaaccatgacaccaacgttgtgattcagcaagccatgccgtcgcctcagtccagctctgtcatcactcaggcaccttccaccaaccgccagatcgggcctgtcccaggctctctatcttctctgctacatctccacaacagacagagacagcccatgccagcctccatgcctgggaccctgcccaaccctacaatgccaggatcttccgccgtcttgatgccaatggagcgacaaatgtcagtgaactccagcatcatggggatgcaaggtccaaatctcagcaacccctgtgcttctccccaggtccagccaatgcattcagaagccaaaatgaggttgaaggctgcattgactcaccaccctgctgccatgtcaaatgggaacatgaacaccatgggacacatgatggagatgatgggctcccggcaggaccagacgccacaccatcacatgcactcgcacccgcatcagcaccagacactgccaccccatcacccttacccacaccagcaccagcacccagcacaccatcctcaccctcaaccccatcaccagcagaaccatccacatcaccactcccattcccaccttcatgcacacccagcacatcaccagacctcgccacatccgcccctgcacaccggcaaccaagcacaggtttcaccagcaacacaacagatgcagccaacccagacaatacagccaccccagcccacaggggggcgccggcgaagggtggtagacgaggatccggacgagaggcggcggaaatttctggaacggaaccgggcagctgccacccgctgcagacagaagaggaaggtctgggtgatgtcattggaaaagaaagcagaagaactcacccagacaaacatgcagcttcagaatgaagtgtctatgttgaaaaatgaggtggcccagctgaaacagttgttgttaacacataaagactgcccaataacagccatgcagaaagaatcacaaggatatctaagtccagagagtagccctcctgctagtcctgtcccagcttgctcccagcaacaagtcatccagcataataccatcactacttcctcatcggtcagcgaggtggtaggaagctccaccctcagccagctcaccactcacagaacagacctgaatccgattctt

SEQ ID NO: 4101 - DNA, 1503 bp, Homo sapiens
  source 1..1503: mol_type = genomic DNA
atgaatttggagcaggagaggccgtttgtctgcagtgccccaggctgctcccagcgcttcccaacagaggaccatctgatgattcataggcacaaacatgaaatgactttgaagtttccttcaataaaaacagacaatatgttatcagatcaaactccgaccccaacgagattcctgaagaactgcgaggaggtgggcctcttcagcgagctggactgctccctggagcacgagttcaggaaggctcaggaagaggagagcagcaagcggaatatctcgatgcataatgcagttggtggggccatgacggggcccggaactcaccagcttagcagcgctcggctgcccaaccatgacaccaacgttgtgattcagcaagccatgccgtcgcctcagtccagctctgtcatcactcaggcaccttccaccaaccgccagatcgggcctgtcccaggctctctatcttctctgctacatctccacaacagacagagacagcccatgccagcctccatgcctgggaccctgcccaaccctacaatgccaggatcttccgccgtcttgatgccaatggagcgacaaatgtcagtgaactccagcatcatggggatgcaaggtccaaatctcagcaacccctgtgcttctccccaggtccagccaatgcattcagaagccaaaatgaggttgaaggctgcattgactcaccaccctgctgccatgtcaaatgggaacatgaacaccatgggacacatgatggagatgatgggctcccggcaggaccagacgccacaccatcacatgcactcgcacccgcatcagcaccagacactgccaccccatcacccttacccacaccagcaccagcacccagcacaccatcctcaccctcaaccccatcaccagcagaaccatccacatcaccactcccattcccaccttcatgcacacccagcacatcaccagacctcgccacatccgcccctgcacaccggcaaccaagcacaggtttcaccagcaacacaacagatgcagccaacccagacaatacagccaccccagcccacaggggggcgccggcgaagggtggtagacgaggatccggacgagaggcggcggaaatttctggaacggaaccgggcagctgccacccgctgcagacagaagaggaaggtctgggtgatgtcattggaaaagaaagcagaagaactcacccagacaaacatgcagcttcagaatgaagtgtctatgttgaaaaatgaggtggcccagctgaaacagttgttgttaacacataaagactgcccaataacagccatgcagaaagaatcacaaggatatctaagtccagagagtagccctcctgctagtcctgtcccagcttgctcccagcaacaagtcatccagcataataccatcactacttcctcatcggtcagcgaggtggtaggaagctccaccctcagccagctcaccactcacagaacagacctgaatccgattctt

SEQ ID NO: 4102 - DNA, 1107 bp, Homo sapiens
  source 1..1107: mol_type = genomic DNA
atgttctgcacctcaggagggaattcagcctcagtgatgtccatgaggcctgtcccaggctctctatcttctctgctacatctccacaacagacagagacagcccatgccagcctccatgcctgggaccctgcccaaccctacaatgccaggatcttccgccgtcttgatgccaatggagcgacaaatgtcagtgaactccagcatcatggggatgcaaggtccaaatctcagcaacccctgtgcttctccccaggtccagccaatgcattcagaagccaaaatgaggttgaaggctgcattgactcaccaccctgctgccatgtcaaatgggaacatgaacaccatgggacacatgatggagatgatgggctcccggcaggaccagacgccacaccatcacatgcactcgcacccgcatcagcaccagacactgccaccccatcacccttacccacaccagcaccagcacccagcacaccatcctcaccctcaaccccatcaccagcagaaccatccacatcaccactcccattcccaccttcatgcacacccagcacatcaccagacctcgccacatccgcccctgcacaccggcaaccaagcacaggtttcaccagcaacacaacagatgcagccaacccagacaatacagccaccccagcccacaggggggcgccggcgaagggtggtagacgaggatccggacgagaggcggcggaaatttctggaacggaaccgggcagctgccacccgctgcagacagaagaggaaggtctgggtgatgtcattggaaaagaaagcagaagaactcacccagacaaacatgcagcttcagaatgaagtgtctatgttgaaaaatgaggtggcccagctgaaacagttgttgttaacacataaagactgcccaataacagccatgcagaaagaatcacaaggatatctaagtccagagagtagccctcctgctagtcctgtcccagcttgctcccagcaacaagtcatccagcataataccatcactacttcctcatcggtcagcgaggtggtaggaagctccaccctcagccagctcaccactcacagaacagacctgaatccgattctt

SEQ ID NO: 4103 - DNA, 984 bp, Homo sapiens
  source 1..984: mol_type = genomic DNA
atgagctcctacctggagtacgtgtcatgcagcagcagcggcggggtcggcggcgacgtgctcagcttggcacccaagttctgccgctccgacgcccggcccgtggctctgcagcccgccttccctctgggcaacggcgacggcgccttcgtcagctgtctgcccctggccgccgcccgaccctcgccttcgcccccggccgcccccgcgcggccgtccgtaccgcctccggccgcgccccagtacgcgcagtgcaccctggagggggcctacgaacctggtgccgcacctgccgcggcagctgggggcgcggactacggcttcctggggtccgggccggcgtacgacttcccgggcgtgctggggcgggcggccgacgacggcgggtctcacgtccactacgccacctcggccgtcttctcgggcggcggctctttcctcctcagcggccaggtggattacgcggccttcggcgaacccggcccttttccggcttgtctcaaagcgtcagccgacggccaccctggtgctttccagaccgcatccccggccccaggcacctaccccaagtccgtctctcccgcctccggcctccctgccgccttcagcacgttcgagtggatgaaagtgaagaggaatgcctctaagaaaggcaaactcgccgagtatggggccgctagcccctccagcgcgatccgcacgaatttcagcaccaagcaactgacagaactggaaaaagagtttcatttcaataagtacttaactcgagcccggcgcatcgagatagccaactgcttgcacctgaatgacacgcaagtcaaaatctggttccagaaccgcaggatgaaacagaagaaaagggaacgagaagggcttctggccacggccattcctgtggctcccctccaacttcccctctctggaacaacccccactaagtttatcaagaaccccggcagcccttctcagtcccaagagccttcg

SEQ ID NO: 4104 - DNA, 1494 bp, Homo sapiens
  source 1..1494: mol_type = genomic DNA
atggatttctcagtaaaggtagacatagagaaggaggtgacctgccccatctgcctggagctcctgacagaacctctgagcctagattgtggccacagcttctgccaagcctgcatcactgcaaagatcaaggagtcagtgatcatctcaagaggggaaagcagctgtcctgtgtgtcagaccagattccagcctgggaacctccgacctaatcggcatctggccaacatagttgagagagtcaaagaggtcaagatgagcccacaggaggggcagaagagagatgtctgtgagcaccatggaaaaaaactccagatcttctgtaaggaggatggaaaagtcatttgctgggtttgtgaactgtctcaggaacaccaaggtcaccaaacattccgcataaacgaggtggtcaaggaatgtcaggaaaagctgcaggtagccctgcagaggctgataaaggaggatcaagaggctgagaagctggaagatgacatcagacaagagagaaccgcctggaagaattatatccagatcgagagacagaagattctgaaagggttcaatgaaatgagagtcatcttggacaatgaggagcagagagagctgcaaaagctggaggaaggtgaggtgaatgtgctggataacctggcagcagctacagaccagctggtccagcagaggcaggatgccagcacgctcatctcagatctccagcggaggttgaggggatcgtcagtagagatgctgcaggatgtgattgacgtcatgaaaaggagtgaaagctggacattgaagaagccaaaatctgtttccaagaaactaaagagtgtattccgagtaccagatctgagtgggatgctgcaagttcttaaagagctgacagatgtccagtactactgggtggacgtgatgctgaatccaggcagtgccacttcgaatgttgctatttctgtggatcagagacaagtgaaaactgtacgcacctgcacatttaagaattcaaatccatgtgatttttctgcttttggtgtcttcggctgccaatatttctcttcggggaaatattactgggaagtagatgtgtctggaaagattgcctggatcctgggcgtacacagtaaaataagtagtctgaataaaaggaagagctctgggtttgcttttgatccaagtgtaaattattcaaaagtttactccagatatagacctcaatatggctactgggttataggattacagaatacatgtgaatataatgcttttgaggactcctcctcttctgatcccaaggttttgactctctttatggctgtgcctccctgtcgtattggggttttcctagactatgaggcaggcattgtctcatttttcaatgtcacaaaccacggagcactcatctacaagttctctggatgtcgcttttctcgacctgcttatccgtatttcaatccttggaactgcctagtccccatgactgtgtgcccaccgagctcc

SEQ ID NO: 4105 - DNA, 1344 bp, Homo sapiens
  source 1..1344: mol_type = genomic DNA
atgagcgctagcggccccgaggctcctggggacattcccgcgctaccgccgcctccccagccaggttcggggcccgcaccgcccgctcccgccgccgctgcccaggaagctatggacgggcgcgccgagctgccggcctttccccgcgctggagccccgccgctcgcggccagcgacactgtgcctgcggcgcccgagggggctggagcggcccggcccgcagcgcccctgcgccccacctccttctcggtactggacatcctggaccccaacaagttcaacagcaggaggcgtcgttgcgtgctgctgggcccagtggctcccgctgcgtgcgccccttgcgcttcggccccatgcgcccctgcacccgccgcctcgggacgcccgccacgcgcggaggagctggagcgccgcgccctcgccggcgccgggggagtcggagccgccggagctgagccgccgaacgccggcgaccccttcaaggcaggggaggccgagaccaacgacaccaacggctacagcagcggcggcggcggccacagcccgagcgcggacagcggggacgaggttcccgacgacgaggacgacgacgaggacgaagcgcccgagacggaggcggcgcgaggcgcggaggaggcgcggggaggcggcggcggcctcggggcccgcgggtcgggttgccagggcgcggctgagaccgacgcgtcccccggagccaccgtcgacgaggcagcggcccccggaccccgcgagaactcgcccgttgcccagggcccaccgggaggtgcagcggcgccggggggcgcggggaccaccccgcagggcacggcgacggcggcgaagcccaagcggaagcgcacggggtccgactccaagtccgggaagccgcggcgagcgcgcaccgccttcacctacgagcagctcgtggcgctggagaacaagttcaaggccacgcgctacctgtcggtgtgcgagcgcctcaacctggcgctgtcgctcagcctcaccgagacgcaggtgaagatctggttccagaaccgccgaaccaagtggaagaagcagaacccgggcgccgacaccagcgctccgaccggcggcgggggcggaccgggaccgggggccgggcctggcacggggctgcccggcggcctcagcccgctcagcccctcgccgcccatgggcgccccgctcggcatgcacggcccggccgggtacccggcgcacggccccggaggcctggtgtgcgccgcgcagctgccgttcctgtcgagcccggcggtgctctcgcccttcgtgctgggctcgcagacctacggggcgcccgccttctacgcgccgcacctc

SEQ ID NO: 4106 - DNA, 2124 bp, Homo sapiens
  source 1..2124: mol_type = genomic DNA
atgggaatgtccaaatcacacagtttctttggttatcccctgagcatcttcttcatcgtggtcaatgagttttgcgaaagattttcctactatggaatgcgagcaatcctgattctgtacttcacaaatttcatcagctgggatgataacctgtccaccgccatctaccatacgtttgtggctctgtgctacctgacgccaattctcggagctcttatcgccgactcgtggctgggaaagttcaagaccattgtgtcgctctccattgtctacacaattggacaagcagtcacctcagtaagctccattaatgacctcacagaccacaaccatgatggcacccccgacagccttcctgtgcacgtggtgctgtccttgatcggcctggccctgatagctctcgggactggaggaatcaaaccctgtgtgtctgcgtttggtggagatcagtttgaagagggccaggagaaacaaagaaacagatttttttccatcttttacttggctattaatgctggaagtttgctttccacaatcatcacacccatgctcagagttcaacaatgtggaattcacagtaaacaagcttgttacccactggcctttggggttcctgctgctctcatggctgtagccctgattgtgtttgtccttggcagtgggatgtacaagaagttcaagccacagggcaacatcatgggtaaagtggccaagtgcatcggttttgccatcaaaaatagatttaggcatcggagtaaggcatttcccaagagggagcactggctggactgggctaaagagaaatacgatgagcggctcatctcccaaattaagatggttacgagggtgatgttcctgtatattccactcccaatgttctgggccttgtttgaccagcagggctccaggtggacactgcaggcaacaactatgtccgggaaaatcggagctcttgaaattcagcccgatcagatgcagaccgtgaacgccatcctgatcgtgatcatggtcccgatcttcgatgctgtgctgtaccctctcattgcaaaatgtggcttcaatttcacctccttgaagaagatggcagttggcatggtcctggcctccatggcctttgtggtggctgccatcgtgcaggtggaaatcgataaaactcttccagtcttccccaaaggaaacgaagtccaaattaaagttttgaatataggaaacaataccatgaatatatctcttcctggagagatggtgacacttggcccaatgtctcaaacaaatgcatttatgacttttgatgtaaacaaactgacaaggataaacatttcttctcctggatcaccagtcactgctgtaactgacgacttcaagcagggccaacgccacacgcttctagtgtgggcccccaatcactaccaggtggtaaaggatggtcttaaccagaagccagaaaaaggggaaaatggaatcagatttgtaaatacttttaacgagctcatcaccatcacaatgagtgggaaagtttatgcaaacatcagcagctacaatgccagcacataccagttttttccttctggcataaaaggcttcacaataagctcaacagagattccgccacaatgtcaacctaatttcaatactttctaccttgaatttggtagtgcttatacctatatagtccaaaggaagaatgacagctgccctgaagtgaaggtgtttgaagatatttcagccaacacagttaacatggctctgcaaatcccgcagtattttcttctcacctgtggcgaagtggtcttctctgtcacgggattggaattctcatattctcaggctccttccaacatgaagtcggtgcttcaggcaggatggctgctgaccgtggctgttggcaacatcattgtgctcatcgtggcaggggcaggccagttcagcaaacagtgggccgagtacattctatttgccgcgttgcttctggtcgtctgtgtaatttttgccatcatggctcggttctatacttacatcaacccagcggagatcgaagctcaatttgatgaggatgaaaagaaaaacagactggaaaagagtaacccatatttcatgtcaggggccaattcacagaaacagatg

SEQ ID NO: 4107 - DNA, 441 bp, Homo sapiens
  source 1..441: mol_type = genomic DNA
atgtcatctgagcctcccccaccaccacagccccccacccatcaagcttcagtcgggctgctggacacccctcggagccgtgagcgctcaccatcccctctgcggggcaacgtggtcccaagcccactgcccactcgccggacgaggaccttctcggcgacggtgcgggcttcacagggccccgtctacaaaggagtctgcaaatgcttctgccggtccaagggccatggcttcattactccagctgatggcggccccgacatcttcctgcacatctctgatgtggaaggggagtatgtcccagtggaaggcgacgaggtcacctataaaatgtgctccatcccacccaagaatgagaagctgcaggccgtggaggtcgtcatcactcacctggcaccaggcaccaagcatgagacctggtctggacatgtcatcagctcc

SEQ ID NO: 4108 - DNA, 1326 bp, Homo sapiens
  source 1..1326: mol_type = genomic DNA
atgccgcgaaggaagaggaatgcaggcagtagttcagatggaaccgaagattccgatttttctacagatctcgagcacacagacagttcagaaagtgatggcacatcccgacgatctgctcgagtcacccgctcctcagccaggctaagccagagttctcaaggacaccttacaggaaaacatgagagacatttctccatctcaggatgcccactgtatcataacctctcagctgacgaatgcaaggcaccaacggagagacagcttcgatataaggaaaaagtggctgaactcaggaagaaaagaaattctggactgagcaaagaacagaaagagaaatatatggaacacagacagacctatgggaacacacgggaacctcttttagaaaacctgacaagcgagtatgacttggatcttttccgaagagcacaagcccgggcttcagaggatttggagaagttaaggctgcaaggccaaatcacagagggaagcaacatgattaaaacaattgcttttggccgctatgagcttgatacctggtatcattctccatatcctgaagaatatgcacggctgggacgtctctatatgtgtgaattctgtttaaaatatatgaagagccaaacgatactccgccggcacatggccaaatgtgtgtggaaacacccacctggtgatgagatatatcgcaaaggttcaatctctgtgtttgaagtggatggcaagaaaaacaagatctactgccaaaacctgtgcctgttggccaaactttttctggaccacaagacattatattatgatgtggagcccttcctgttctatgttatgacagaggcggacaacactggctgtcacctgattggatatttttctaaggaaaagaattcattcctcaactacaacgtctcctgtatccttactatgcctcagtacatgagacagggctatggcaagatgcttattgatttcagttatttgctttccaaagtcgaagaaaaagttggctccccagaacgtccactctcagatctggggcttataagctatcgcagttactggaaagaagtacttctccgctacctgcataattttcaaggcaaagagatttctatcaaagaaatcagtcaggagacggctgtgaatcctgtggacattgtcagcactctgcaagcccttcagatgctcaaatactggaagggaaaacacctagttttaaagagacaggacctgattgatgagtggatagccaaagaggccaaaaggtccaactccaataaaaccatggatcccagctgcttaaaatggacccctcccaagggcact

SEQ ID NO: 4109 - DNA, 1503 bp, Homo sapiens
  source 1..1503: mol_type = genomic DNA
atgccgcgaaggaagaggaatgcaggcagtagttcagatggaaccgaagattccgatttttctacagatctcgagcacacagacagttcagaaagtgatggcacatcccgacgatctgctcgagtcacccgctcctcagccaggctaagccagagttctcaagattccagtcctgttcgaaatctgcagtcttttggcactgaggagcctgcttactctaccagaagagtgacccgtagtcagcagcagcctaccccagtgacaccgaaaaaataccctcttcggcagactcgttcatctggttcagaaactgagcaagtggttgatttttcagatagaggacaccttacaggaaaacatgagagacatttctccatctcaggatgcccactgtatcataacctctcagctgacgaatgcaaggcaccaacggagagacagcttcgatataaggaaaaagtggctgaactcaggaagaaaagaaattctggactgagcaaagaacagaaagagaaatatatggaacacagacagacctatgggaacacacgggaacctcttttagaaaacctgacaagcgagtatgacttggatcttttccgaagagcacaagcccgggcttcagaggatttggagaagttaaggctgcaaggccaaatcacagagggaagcaacatgattaaaacaattgcttttggccgctatgagcttgatacctggtatcattctccatatcctgaagaatatgcacggctgggacgtctctatatgtgtgaattctgtttaaaatatatgaagagccaaacgatactccgccggcacatggccaaatgtgtgtggaaacacccacctggtgatgagatatatcgcaaaggttcaatctctgtgtttgaagtggatggcaagaaaaacaagatctactgccaaaacctgtgcctgttggccaaactttttctggaccacaagacattatattatgatgtggagcccttcctgttctatgttatgacagaggcggacaacactggctgtcacctgattggatatttttctaaggaaaagaattcattcctcaactacaacgtctcctgtatccttactatgcctcagtacatgagacagggctatggcaagatgcttattgatttcagttatttgctttccaaagtcgaagaaaaagttggctccccagaacgtccactctcagatctggggcttataagctatcgcagttactggaaagaagtacttctccgctacctgcataattttcaaggcaaagagatttctatcaaagaaatcagtcaggagacggctgtgaatcctgtggacattgtcagcactctgcaagcccttcagatgctcaaatactggaagggaaaacacctagttttaaagagacaggacctgattgatgagtggatagccaaagaggccaaaaggtccaactccaataaaaccatggatcccagctgcttaaaatggacccctcccaagggcact

SEQ ID NO: 4110 - DNA, 1743 bp, Homo sapiens
  source 1..1743: mol_type = genomic DNA
atgccgcgaaggaagaggaatgcaggcagtagttcagatggaaccgaagattccgatttttctacagatctcgagcacacagacagttcagaaagtgatggcacatcccgacgatctgctcgagtcacccgctcctcagccaggctaagccagagttctcaagattccagtcctgttcgaaatctgcagtcttttggcactgaggagcctgcttactctaccagaagagtgacccgtagtcagcagcagcctaccccagtgacaccgaaaaaataccctcttcggcagactcgttcatctggttcagaaactgagcaagtggttgatttttcagatagagaaactaaaaatacagctgatcatgatgagtcaccgcctcgaactccaactggaaatgcgccttcttctgagtctgacatagacatctccagccccaatgtatctcacgatgagagcattgccaaggacatgtccctgaaggactcaggcagtgatctctctcatcgccccaagcgccgtcgcttccatgaaagctacaacttcaatatgaagtgtcctacaccaggctgtaactctctaggacaccttacaggaaaacatgagagacatttctccatctcaggatgcccactgtatcataacctctcagctgacgaatgcaaggcaccaacggagagacagcttcgatataaggaaaaagtggctgaactcaggaagaaaagaaattctggactgagcaaagaacagaaagagaaatatatggaacacagacagacctatgggaacacacgggaacctcttttagaaaacctgacaagcgagtatgacttggatcttttccgaagagcacaagcccgggcttcagaggatttggagaagttaaggctgcaaggccaaatcacagagggaagcaacatgattaaaacaattgcttttggccgctatgagcttgatacctggtatcattctccatatcctgaagaatatgcacggctgggacgtctctatatgtgtgaattctgtttaaaatatatgaagagccaaacgatactccgccggcacatggccaaatgtgtgtggaaacacccacctggtgatgagatatatcgcaaaggttcaatctctgtgtttgaagtggatggcaagaaaaacaagatctactgccaaaacctgtgcctgttggccaaactttttctggaccacaagacattatattatgatgtggagcccttcctgttctatgttatgacagaggcggacaacactggctgtcacctgattggatatttttctaaggaaaagaattcattcctcaactacaacgtctcctgtatccttactatgcctcagtacatgagacagggctatggcaagatgcttattgatttcagttatttgctttccaaagtcgaagaaaaagttggctccccagaacgtccactctcagatctggggcttataagctatcgcagttactggaaagaagtacttctccgctacctgcataattttcaaggcaaagagatttctatcaaagaaatcagtcaggagacggctgtgaatcctgtggacattgtcagcactctgcaagcccttcagatgctcaaatactggaagggaaaacacctagttttaaagagacaggacctgattgatgagtggatagccaaagaggccaaaaggtccaactccaataaaaccatggatcccagctgcttaaaatggacccctcccaagggcact

SEQ ID NO: 4111 - DNA, 1416 bp, Homo sapiens
  source 1..1416: mol_type = genomic DNA
atgccgcgaaggaagaggaatgcaggcagtagttcagatggaaccgaagattccgatttttctacagatctcgagcacacagacagttcagaaagtgatggcacatcccgacgatctgctcgagtcacccgctcctcagccaggctaagccagagttctcaaggacaccttacaggaaaacatgagagacatttctccatctcaggatgcccactgtatcataacctctcagctgacgaatgcaaggtgagagcacagagccgggataagcagatagaagaaaggatgctgtctcacaggcaagatgacaacaacaggcatgcaaccaggcaccaggcaccaacggagagacagcttcgatataaggaaaaagtggctgaactcaggaagaaaagaaattctggactgagcaaagaacagaaagagaaatatatggaacacagacagacctatgggaacacacgggaacctcttttagaaaacctgacaagcgagtatgacttggatcttttccgaagagcacaagcccgggcttcagaggatttggagaagttaaggctgcaaggccaaatcacagagggaagcaacatgattaaaacaattgcttttggccgctatgagcttgatacctggtatcattctccatatcctgaagaatatgcacggctgggacgtctctatatgtgtgaattctgtttaaaatatatgaagagccaaacgatactccgccggcacatggccaaatgtgtgtggaaacacccacctggtgatgagatatatcgcaaaggttcaatctctgtgtttgaagtggatggcaagaaaaacaagatctactgccaaaacctgtgcctgttggccaaactttttctggaccacaagacattatattatgatgtggagcccttcctgttctatgttatgacagaggcggacaacactggctgtcacctgattggatatttttctaaggaaaagaattcattcctcaactacaacgtctcctgtatccttactatgcctcagtacatgagacagggctatggcaagatgcttattgatttcagttatttgctttccaaagtcgaagaaaaagttggctccccagaacgtccactctcagatctggggcttataagctatcgcagttactggaaagaagtacttctccgctacctgcataattttcaaggcaaagagatttctatcaaagaaatcagtcaggagacggctgtgaatcctgtggacattgtcagcactctgcaagcccttcagatgctcaaatactggaagggaaaacacctagttttaaagagacaggacctgattgatgagtggatagccaaagaggccaaaaggtccaactccaataaaaccatggatcccagctgcttaaaatggacccctcccaagggcact

SEQ ID NO: 4112 - DNA, 1851 bp, Homo sapiens
  source 1..1851: mol_type = genomic DNA
atgatttcaccttcacttgaactgcttcattcaggactctgcaaattccctgaagtagaaggaaaaatgaccacattcaaagaggcagtgacattcaaggatgtggctgtggtcttcactgaggaggagctggggctgctggaccctgcccagaggaagctgtaccgagatgtgatgctagagaacttcaggaacctgctctcagtagggaatcaaccattccaccaagatactttccacttcttagggaaggaaaagttttggaagatgaagacaacaagccaaagagaagggaattcaggaggcaagatccaaattgagatggagactgttccagaagcaggaccacatgaagagtggtcctgtcagcaaatatgggaacaaattgcaagtgacctaaccaggtctcaaaactccataaggaacagctctcagttcttcaaagaaggtgatgtcccctgccagattgaggcaagactatctataagtcacgtgcaacagaaaccttaccgttgtaatgaatgtaaacagtccttcagtgatgtttctgtctttgatcttcatcaacaatcacactcaggagagaaatctcatacatgtggtgagtgtggaaaaagcttctgttacagcccagcccttcatattcatcagagagtccatatgggagaaaaatgctataagtgtgatgtgtgtggtaaggaatttaatcagagctcacatctgcaaactcatcagagagtccatactggagagaaaccattcaaatgtgggcaatgtgggaaaggcttccatagtagatcagcacttaatgttcattgcaaattgcacacaggagagaaaccttataattgtgaggaatgtgggaaagccttcattcatgattcacagcttcaagaacatcagagaatccatactggggagaagccattcaaatgtgatatatgtggtaagagcttccgtgttagatcaagacttaataggcattccatggttcacacaggagaaaaaccattcagatgtgatacatgtggcaagaactttcgtcagagatcagcacttaatagtcattccatggtccacatagaagagaagccatacaaatgtgagcaatgtggaaaaggcttcatttgtaggcgagatttttgtaagcatcagatggtccacacaggagagaaaccatataattgtaaagaatgtgggaagaccttcagatggtcctcatgtcttttgaaccatcagcaagtccacagtggacaaaaatccttcaaatgtgaagaatgtgggaagggattttatacaaattcacgacgatcttcccatcagagatcccacaatggagaaaagccatataactgtgaggagtgtggtaaggactataaaaggaggttggatcttgagtttcaccagagggtccacacgggtgagagaccctataattgtaaggaatgtggcaagagctttggctgggcctcctgtcttttgaaacatcagagactccacagtggggaaaaacctttcaaatgtgaagagtgtggaaagagatttactcagagttcacaacttcattcccatcagacatgccatactggagaaaagctatacaaatgtgagcagtgtgagaaggggtacaacagtaaatttaatcttgacatgcaccagagggtccacgggggagagcgaccctataattgtaaggaatgtggaaagagctttggctgggcttcatgtcttttgaaacatcagagactccacagtggagaaaagccattgaaatctggagtgtgggaagagatctactcagaattcacagcttcatttacatcagtaagtctatgtgggagaaaagccata

SEQ ID NO: 4113 - DNA, 2421 bp, Homo sapiens
  source 1..2421: mol_type = genomic DNA
atggcccagcagggccagcaggggcagatggcaagtggagacagcaatctcaacttcaggatggtcgcagagatccagaacgtagagggtcagaacctgcaggagcaggtttgccctgagcccattttcaggttcttcagagaaaacaaggtggagattgcaagtgcaataacaaggccatttcctttccttatgggcctccgagaccgctccttcatctccgagcagatgtatgaacattttcaagaagcttttagaaacctggtcccagtgacaagagtgatgtattgtgtactcagtgaactggagaagacatttggctggtcacatctggaagcattgttcagcaggattaacctgatggcctatcctgatttaaacgagatttacagaagcttccagaatgtatgctatgaacactcacctctccaaatgaataatgtaaacgatttagaagatagacccagattactaccatatggtaaacaagagaacagcaatgcctgtcatgaaatggatgatatagcagtgcctcaggaagccttgagctcctcgccaaggtgtgagccaggtttctcttcagagtcttgtgagcagttagctctcccaaaggctggtggaggagatgctgaagatgcacccagcctactaccaggtgggggagttctagaaagcaacgggatgatagatgcggcaaggacatacagcacagcaccaggggagaaacagggagaggaggaaggcaggaacagtcccagaaaaagaaaccaagacaaggagaagtaccaagagagtccagagggaagagacaaagagacctttgatctaaaaactccccaagtcactaatgaaggagaaccagagaaggggctctgtctactaccaggtgaaggagaagagggcagtgatgactgttcagaaatgtgtgatggagaagagccccaggaagcctctagctccctagcaagatgtgggtcagagggcagtgatgactgttcggaaatgtgtgatggagaagagcgccaggaagcctctagctccctagcaagacgtgggtcagtgtctagtgaactagaaaatcacccaatgaatgaagaaggagaatcagaagagcttgcttctagcctgctatatgataatgtaccaggagcggagcaatcagcatatgaaaatgagaagtgttcctgtgtcatgtgtttctcagaagaggtgccaggaagcccagaagcaaggacggaaagtgatcaagcgtgtggcacaatggatactgtggatattgcaaacaactccactttgggaaaacccaagaggaaaagaagaaaaaagagggggcatggctggagcagaatgagaatgagaaggcaggaaaacagccaacaaaatgataatagcaaagccgacggccaggtggtctccagtgaaaagaaggcgaacgtgaatctgaaagacctttccaagattagggggagaaagagaggcaaacctggaacccgcttcactcagagtgacagagctgcacagaaaagagtccgatcaagagcttcaagaaagcacaaagatgaaactgtggattttaaggctcctttgcttccagtgacctgtggtggggtgaagggaattttacataagaagaaattgcagcaaggaatcttggtgaagtgtatacagactgaggatggaaaatggttcacccccacggaatttgaaatcaaaggaggccatgcaagatcaaagaactggaggctgagtgtgcgctgtggcgggtggcccctacgatggctgatggagaatggatttctgcctgatcctccaagaatacgttacaggaaaaaaaagagaatactgaagtctcaaaacaatagctcagttgacccttgtatgagaaacctggatgagtgtgaggtgtgccgggacggaggggagctgttctgttgcgacacttgttcaagagtcttccatgaggactgtcacatcccgcctgtggaagctgagaggaccccgtggaattgcatcttctgcaggatgaaggagtctccgggaagccaacagtgttgtcaggaatctgaggtcctggagaggcagatgtgtcctgaggaacagttgaaatgtgagttcctcctcttgaaagtctattgctgttctgagagctccttttttgccaagattccatactattattatattagagaggcgtgtcaaggcctgaaggagcccatgtggttggataaaatcaagaaaaggctgaatgagcacggttacccccaagtggaggggtttgtacaagacatgcgcctcatcttccagaaccacagggcctcttacaagtacaaggattttggccaaatgggatttagactggaggctgagtttgagaagaatttcaaggaagtgtttgctattcaggaaacaaatgggaacaat

SEQ ID NO: 4114 - DNA, 2601 bp, Homo sapiens
  source 1..2601: mol_type = genomic DNA
atggcccagcagggccagcaggggcagatggcaagtggagacagcaatctcaacttcaggatggtcgcagagatccagaacgtagagggtcagaacctgcaggagcaggtttgccctgagcccattttcaggttcttcagagaaaacaaggtggagattgcaagtgcaataacaaggccatttcctttccttatgggcctccgagaccgctccttcatctccgagcagatgtatgaacattttcaagaagcttttagaaacctggtcccagtgacaagagtgatgtattgtgtactcagtgaactggagaagacatttggctggtcacatctggaagcattgttcagcaggattaacctgatggcctatcctgatttaaacgagatttacagaagcttccagaatgtatgctatgaacactcacctctccaaatgaataatgtaaacgatttagaagatagacccagattactaccatatggtaaacaagagaacagcaatgcctgtcatgaaatggatgatatagcagtgcctcaggaagccttgagctcctcgccaaggtgtgagccaggtttctcttcagagtcttgtgagcagttagctctcccaaaggctggtggaggagatgctgaagatgcacccagcctactaccaggtgggggagtgtcctgtaaacttgctatacaaatagatgaaggagaatcagaagaaatgcccaagttactgccttatgatacagaagttctagaaagcaacgggatgatagatgcggcaaggacatacagcacagcaccaggggagaaacagggagaggaggaaggcaggaacagtcccagaaaaagaaaccaagacaaggagaagtaccaagagagtccagagggaagagacaaagagacctttgatctaaaaactccccaagtcactaatgaaggagaaccagagaaggggctctgtctactaccaggtgaaggagaagagggcagtgatgactgttcagaaatgtgtgatggagaagagccccaggaagcctctagctccctagcaagatgtgggtcagtttcttgtttatctgcagagacctttgatctaaagactccccaagtcactaatgaaggagaaccagagaaggagctcagtctactaccaggtgaaggagaagagggcagtgatgactgttcggaaatgtgtgatggagaagagcgccaggaagcctctagctccctagcaagacgtgggtcagtgtctagtgaactagaaaatcacccaatgaatgaagaaggagaatcagaagagcttgcttctagcctgctatatgataatgtaccaggagcggagcaatcagcatatgaaaatgagaagtgttcctgtgtcatgtgtttctcagaagaggtgccaggaagcccagaagcaaggacggaaagtgatcaagcgtgtggcacaatggatactgtggatattgcaaacaactccactttgggaaaacccaagaggaaaagaagaaaaaagagggggcatggctggagcagaatgagaatgagaaggcaggaaaacagccaacaaaatgataatagcaaagccgacggccaggtggtctccagtgaaaagaaggcgaacgtgaatctgaaagacctttccaagattagggggagaaagagaggcaaacctggaacccgcttcactcagagtgacagagctgcacagaaaagagtccgatcaagagcttcaagaaagcacaaagatgaaactgtggattttaaggctcctttgcttccagtgacctgtggtggggtgaagggaattttacataagaagaaattgcagcaaggaatcttggtgaagtgtatacagactgaggatggaaaatggttcacccccacggaatttgaaatcaaaggaggccatgcaagatcaaagaactggaggctgagtgtgcgctgtggcgggtggcccctacgatggctgatggagaatggatttctgcctgatcctccaagaatacgttacaggaaaaaaaagagaatactgaagtctcaaaacaatagctcagttgacccttgtatgagaaacctggatgagtgtgaggtgtgccgggacggaggggagctgttctgttgcgacacttgttcaagagtcttccatgaggactgtcacatcccgcctgtggaagctgagaggaccccgtggaattgcatcttctgcaggatgaaggagtctccgggaagccaacagtgttgtcaggaatctgaggtcctggagaggcagatgtgtcctgaggaacagttgaaatgtgagttcctcctcttgaaagtctattgctgttctgagagctccttttttgccaagattccatactattattatattagagaggcgtgtcaaggcctgaaggagcccatgtggttggataaaatcaagaaaaggctgaatgagcacggttacccccaagtggaggggtttgtacaagacatgcgcctcatcttccagaaccacagggcctcttacaagtacaaggattttggccaaatgggatttagactggaggctgagtttgagaagaatttcaaggaagtgtttgctattcaggaaacaaatgggaacaat

SEQ ID NO: 4115 - DNA, 516 bp, Homo sapiens
  source 1..516: mol_type = genomic DNA
atggcccagcagggccagcaggggcagatggcaagtggagacagcaatctcaacttcaggatggtcgcagagatccagaacgtagagggtcagaacctgcaggagcaggtttgccctgagcccattttcaggttcttcagagaaaacaaggtggagattgcaagtgcaataacaaggccatttcctttccttatgggcctccgagaccgctccttcatctccgagcagatgtatgaacattttcaagaagcttttagaaacctggtcccagtgacaagagtgatgtattgtgtactcagtgaactggagaagacatttggctggtcacatctggaagcattgttcagcaggattaacctgatggcctatcctgatttaaacgagatttacagaagcttccagaatgaaaatttatcatccagtgcagtcctgtgtcaacttgtttctccaaacaaagactggagaagtcacgaagagagcctagcacatactggtacactgaggaggagctgcatg

SEQ ID NO: 4116 - DNA, 2259 bp, Homo sapiens
  source 1..2259: mol_type = genomic DNA
atggcccagcagggccagcaggggcagatggcaagtggagacagcaatctcaacttcaggatggtcgcagagatccagaacgtagagggtcagaacctgcaggagcaggtttgccctgagcccattttcaggttcttcagagaaaacaaggtggagattgcaagtgcaataacaaggccatttcctttccttatgggcctccgagaccgctccttcatctccgagcagatgtatgaacattttcaagaagcttttagaaacctggtcccagtgacaagagtgatgtattgtgtactcagtgaactggagaagacatttggctggtcacatctggaagcattgttcagcaggattaacctgatggcctatcctgatttaaacgagatttacagaagcttccagaatgtatgctatgaacactcacctctccaaatgaataatgtaaacgatttagaagatagacccagattactaccatatggtaaacaagagaacagcaatgcctgtcatgaaatggatgatatagcagtgcctcaggaagccttgagctcctcgccaaggtgtgagccaggtttctcttcagagtcttgtgagcagttagctctcccaaaggctggtggaggagatgctgaagatgcacccagcctactaccagtgtcctgtaaacttgctatacaaatagatgaaggagaatcagaagaaatgcccaagttactgccttatgatacagaagagacctttgatctaaaaactccccaagtcactaatgaaggagaaccagagaaggggctctgtctactaccaggtgaaggagaagagggcagtgatgactgttcggaaatgtgtgatggagaagagcgccaggaagcctctagctccctagcaagacgtgggtcagtgtctagtgaactagaaaatcacccaatgaatgaagaaggagaatcagaagagcttgcttctagcctgctatatgataatgtaccaggagcggagcaatcagcatatgaaaatgagaagtgttcctgtgtcatgtgtttctcagaagaggtgccaggaagcccagaagcaaggacggaaagtgatcaagcgtgtggcacaatggatactgtggatattgcaaacaactccactttgggaaaacccaagaggaaaagaagaaaaaagagggggcatggctggagcagaatgagaatgagaaggcaggaaaacagccaacaaaatgataatagcaaagccgacggccaggtggtctccagtgaaaagaaggcgaacgtgaatctgaaagacctttccaagattagggggagaaagagaggcaaacctggaacccgcttcactcagagtgacagagctgcacagaaaagagtccgatcaagagcttcaagaaagcacaaagatgaaactgtggattttaaggctcctttgcttccagtgacctgtggtggggtgaagggaattttacataagaagaaattgcagcaaggaatcttggtgaagtgtatacagactgaggatggaaaatggttcacccccacggaatttgaaatcaaaggaggccatgcaagatcaaagaactggaggctgagtgtgcgctgtggcgggtggcccctacgatggctgatggagaatggatttctgcctgatcctccaagaatacgttacaggaaaaaaaagagaatactgaagtctcaaaacaatagctcagttgacccttgtatgagaaacctggatgagtgtgaggtgtgccgggacggaggggagctgttctgttgcgacacttgttcaagagtcttccatgaggactgtcacatcccgcctgtggaagctgagaggaccccgtggaattgcatcttctgcaggatgaaggagtctccgggaagccaacagtgttgtcaggaatctgaggtcctggagaggcagatgtgtcctgaggaacagttgaaatgtgagttcctcctcttgaaagtctattgctgttctgagagctccttttttgccaagattccatactattattatattagagaggcgtgtcaaggcctgaaggagcccatgtggttggataaaatcaagaaaaggctgaatgagcacggttacccccaagtggaggggtttgtacaagacatgcgcctcatcttccagaaccacagggcctcttacaagtacaaggattttggccaaatgggatttagactggaggctgagtttgagaagaatttcaaggaagtgtttgctattcaggaaacaaatgggaacaat

SEQ ID NO: 4117 - DNA, 2520 bp, Homo sapiens
  source 1..2520: mol_type = genomic DNA
atggcccagcagggccagcaggggcagatggcaagtggagacagcaatctcaacttcaggatggtcgcagagatccagaacgtagagggtcagaacctgcaggagcaggtttgccctgagcccattttcaggttcttcagagaaaacaaggtggagattgcaagtgcaataacaaggccatttcctttccttatgggcctccgagaccgctccttcatctccgagcagatgtatgaacattttcaagaagcttttagaaacctggtcccagtgacaagagtgatgtattgtgtactcagtgaactggagaagacatttggctggtcacatctggaagcattgttcagcaggattaacctgatggcctatcctgatttaaacgagatttacagaagcttccagaatgtatgctatgaacactcacctctccaaatgaataatgtaaacgatttagaagatagacccagattactaccatatggtaaacaagagaacagcaatgcctgtcatgaaatggatgatatagcagtgcctcaggaagccttgagctcctcgccaaggtgtgagccaggtttctcttcagagtcttgtgagcagttagctctcccaaaggctggtggaggagatgctgaagatgcacccagcctactaccaggtgggggagtgtcctgtaaacttgctatacaaatagatgaaggagaatcagaagaaatgcccaagttactgccttatgatacagaagttctagaaagcaacgggatgatagatgcggcaaggacatacagcacagcaccaggggagaaacagggagaggaggaaggcaggaacagtcccagaaaaagaaaccaagacaaggagaagtaccaagagagtccagagggaagagacaaagagacctttgatctaaaaactccccaagtcactaatgaaggagaaccagagaaggggctctgtctactaccaggtgaaggagaagagggcagtgatgactgttcagaaatgtgtgatggagaagagccccaggaagcctctagctccctagcaagatgtgggtcagtttcttgtttatctgcagagacctttgatctaaagactccccaagtcactaatgaaggagaaccagagaaggagctcagtctactaccaggtgaaggagaagtgtctagtgaactagaaaatcacccaatgaatgaagaaggagaatcagaagagcttgcttctagcctgctatatgataatgtaccaggagcggagcaatcagcatatgaaaatgagaagtgttcctgtgtcatgtgtttctcagaagaggtgccaggaagcccagaagcaaggacggaaagtgatcaagcgtgtggcacaatggatactgtggatattgcaaacaactccactttgggaaaacccaagaggaaaagaagaaaaaagagggggcatggctggagcagaatgagaatgagaaggcaggaaaacagccaacaaaatgataatagcaaagccgacggccaggtggtctccagtgaaaagaaggcgaacgtgaatctgaaagacctttccaagattagggggagaaagagaggcaaacctggaacccgcttcactcagagtgacagagctgcacagaaaagagtccgatcaagagcttcaagaaagcacaaagatgaaactgtggattttaaggctcctttgcttccagtgacctgtggtggggtgaagggaattttacataagaagaaattgcagcaaggaatcttggtgaagtgtatacagactgaggatggaaaatggttcacccccacggaatttgaaatcaaaggaggccatgcaagatcaaagaactggaggctgagtgtgcgctgtggcgggtggcccctacgatggctgatggagaatggatttctgcctgatcctccaagaatacgttacaggaaaaaaaagagaatactgaagtctcaaaacaatagctcagttgacccttgtatgagaaacctggatgagtgtgaggtgtgccgggacggaggggagctgttctgttgcgacacttgttcaagagtcttccatgaggactgtcacatcccgcctgtggaagctgagaggaccccgtggaattgcatcttctgcaggatgaaggagtctccgggaagccaacagtgttgtcaggaatctgaggtcctggagaggcagatgtgtcctgaggaacagttgaaatgtgagttcctcctcttgaaagtctattgctgttctgagagctccttttttgccaagattccatactattattatattagagaggcgtgtcaaggcctgaaggagcccatgtggttggataaaatcaagaaaaggctgaatgagcacggttacccccaagtggaggggtttgtacaagacatgcgcctcatcttccagaaccacagggcctcttacaagtacaaggattttggccaaatgggatttagactggaggctgagtttgagaagaatttcaaggaagtgtttgctattcaggaaacaaatgggaacaat

SEQ ID NO: 4118 - DNA, 1353 bp, Homo sapiens
  source 1..1353: mol_type = genomic DNA
atggcaaagctctacgaggcagtgaccttcaaggatgtggctgtgatcttcactgaggaggagctggggctgctggaccctgcccagaggaagctgtaccgagatgtgatgcttgagaacttcaggaacctgctctcagtgggaggcaagatccaaactgagatggagactgttccagaagcaggaacacatgaagaattttcctgcaagcaaatttgggaacaaattgcaagtgacttaaccaggtctcaagataccaccataagtaactctcagttatttgaacaagatgacaacccctcccagattaaagcaagactatctacagttcacacaagagaaaaacctttccagggtgaaaattgtaaacagttcttcagtgatgtttccttctttgatcttcctcagcagttatattcaggagagaagtctcatacctgtgatgagtgtggaaaaagcttctgttacatctcagcccttcatattcatcagagggtccacatgggagtgaaatgctataagtgtgatgtgtgtggtaaggaatttagtcagagctcacgtctgcaaactcatcaaagagtccacactggagagaaaccattcaaatgtgagcagtgtgggaaaggcttcagatgtagatcagcacttaaagttcattgcaaattacacatgagagagaaaccttataattgtgagaaatgtgggaaggctttcatgcacaatttccagcttcagaaacatcacagaattcatactggggagaagccattcaaatgtgaaatatgtggtaagagcttctgtcttaggtcaagtcttaataggcattgcatggtccacacagcagagaaactgtacaaatctgaaaagtatggaagaggtttcattgataggctagatttgcataagcatcagatgattcatatgggacagaaaccatataattgtaaagaatgtgggaagagcttcaaatggtcctcatatcttttggtccatcaacgagtccacactggagaaaagccatacaaatgtgaggagtgtgggaagggctacattagtaagtcaggtcttgacttccaccatagaacccacacgggagagagatcttataactgtgataactgcgggaagagctttagacatgcttctagtattttgaatcataagaaactccactgccaaagaaagccattgaaatgtgaagactgtggaaagaggcttgtatgccggtcatactgtaaagaccaacaaagagaccacagtggagaaaacccatccaaatgtgaggactgtgggaagcgctacaagaggcgcttgaatctggatataattttatcattatttttaaatgacata

SEQ ID NO: 4119 - DNA, 1473 bp, Homo sapiens
  source 1..1473: mol_type = genomic DNA
atgatcgattcaggagaaaagaagcctgggcggagagcagaggaggcagtgaccttcaaggatgtggctgtgatcttcactgaggaggagctggggctgctggaccctgcccagaggaagctgtaccgagatgtgatgcttgagaacttcaggaacctgctctcagtggggcatcaaccattccatggagatactttccacttcctaagggaagaaaagttttgggtgatggggacaacaagccaaagagaagggaatttgggaggcaagatccaaactgagatggagactgttccagaagcaggaacacatgaagaattttcctgcaagcaaatttgggaacaaattgcaagtgacttaaccaggtctcaagataccaccataagtaactctcagttatttgaacaagatgacaacccctcccagattaaagcaagactatctacagttcacacaagagaaaaacctttccagggtgaaaattgtaaacagttcttcagtgatgtttccttctttgatcttcctcagcagttatattcaggagagaagtctcatacctgtgatgagtgtggaaaaagcttctgttacatctcagcccttcatattcatcagagggtccacatgggagtgaaatgctataagtgtgatgtgtgtggtaaggaatttagtcagagctcacgtctgcaaactcatcaaagagtccacactggagagaaaccattcaaatgtgagcagtgtgggaaaggcttcagatgtagatcagcacttaaagttcattgcaaattacacatgagagagaaaccttataattgtgagaaatgtgggaaggctttcatgcacaatttccagcttcagaaacatcacagaattcatactggggagaagccattcaaatgtgaaatatgtggtaagagcttctgtcttaggtcaagtcttaataggcattgcatggtccacacagcagagaaactgtacaaatctgaaaagtatggaagaggtttcattgataggctagatttgcataagcatcagatgattcatatgggacagaaaccatataattgtaaagaatgtgggaagagcttcaaatggtcctcatatcttttggtccatcaacgagtccacactggagaaaagccatacaaatgtgaggagtgtgggaagggctacattagtaagtcaggtcttgacttccaccatagaacccacacgggagagagatcttataactgtgataactgcgggaagagctttagacatgcttctagtattttgaatcataagaaactccactgccaaagaaagccattgaaatgtgaagactgtggaaagaggcttgtatgccggtcatactgtaaagaccaacaaagagaccacagtggagaaaacccatccaaatgtgaggactgtgggaagcgctacaagaggcgcttgaatctggatataattttatcattatttttaaatgacata

SEQ ID NO: 4120 - DNA, 2550 bp, Homo sapiens
  source 1..2550: mol_type = genomic DNA
atgagctcccaatgtcggagtttggaaaacaaatttgtctttttaaaagaaggtctaggaaactcaaaacctgaagaattggaagaaatcagaatagaaaatggtaggataagttctgaacgtcgaaaagaaaagtctcgagatgcagccagatctcggcgaagtaaagaatctgaagttttttatgagcttgctcatcagttgccacttccacataatgtgagttcgcatcttgataaggcctctgtgatgaggcttaccatcagctatttgcgtgtgaggaaacttctggatgctggtgatttggatattgaagatgacatgaaagcacagatgaattgcttttatttgaaagccttggatggttttgttatggttctcacagatgatggtgacatgatttacatttctgataatgtgaacaaatacatgggattaactcagtttgaactaactggacacagtgtgtttgattttactcatccatgtgaccatgaggaaatgagagaaatgcttacacacagaaatggccttgtgaaaaagggtaaagaacaaaacacacagcgaagcttttttctcagaatgaagtgtaccctaactagccgaggaagaactatgaacataaagtctgcaacatggaaggtattgcactgcacaggccacattcacgtatatgataccaacagtaaccaacctcagtgtgggtataagaaaccacctatgacctgcttggtgctgatttgtgaacccattcctcacccatcaaatattgaaattcctttagatagcaagactttcctcagtcgacacagcctggatatgaaattttcttattgtgatgaaagaattaccgaattgatgggatatgagccagaagaacttttaggccgctcaatttatgaatattatcatgctttggactctgatcatctgaccaaaactcatcatgatatgtttactaaaggacaagtcaccacaggacagtacaggatgcttgccaaaagaggtggatatgtctgggttgaaactcaagcaactgtcatatataacaccaagaattctcaaccacagtgcattgtatgtgtgaattacgttgtgagtggtattattcagcacgacttgattttctcccttcaacaaacagaatgtgtccttaaaccggttgaatcttcagatatgaaaatgactcagctattcaccaaagttgaatcagaagatacaagtagcctctttgacaaacttaagaaggaacctgatgctttaactttgctggccccagccgctggagacacaatcatatctttagattttggcagcaacgacacagaaactgatgaccagcaacttgaggaagtaccattatataatgatgtaatgctcccctcacccaacgaaaaattacagaatataaatttggcaatgtctccattacccaccgctgaaacgccaaagccacttcgaagtagtgctgaccctgcactcaatcaagaagttgcattaaaattagaaccaaatccagagtcactggaactttcttttaccatgccccagattcaggatcagacacctagtccttccgatggaagcactagacaaagttcacctgagcctaatagtcccagtgaatattgtttttatgtggatagtgatatggtcaatgaattcaagttggaattggtagaaaaactttttgctgaagacacagaagcaaagaacccattttctactcaggacacagatttagacttggagatgttagctccctatatcccaatggatgatgacttccagttacgttccttcgatcagttgtcaccattagaaagcagttccgcaagccctgaaagcgcaagtcctcaaagcacagttacagtattccagcagactcaaatacaagaacctactgctaatgccaccactaccactgccaccactgatgaattaaaaacagtgacaaaagaccgtatggaagacattaaaatattgattgcatctccatctcctacccacatacataaagaaactactagtgccacatcatcaccatatagagatactcaaagtcggacagcctcaccaaacagagcaggaaaaggagtcatagaacagacagaaaaatctcatccaagaagccctaacgtgttatctgtcgctttgagtcaaagaactacagttcctgaggaagaactaaatccaaagatactagctttgcagaatgctcagagaaagcgaaaaatggaacatgatggttcactttttcaagcagtaggaattggaacattattacagcagccagacgatcatgcagctactacatcactttcttggaaacgtgtaaaaggatgcaaatctagtgaacagaatggaatggagcaaaagacaattattttaataccctctgatttagcatgtagactgctggggcaatcaatggatgaaagtggattaccacagctgaccagttatgattgtgaagttaatgctcctatacaaggcagcagaaacctactgcagggtgaagaattactcagagctttggatcaagttaac

SEQ ID NO: 4121 - DNA, 2205 bp, Homo sapiens
  source 1..2205: mol_type = genomic DNA
atggagggcgccggcggcgcgaacgacaagaaaaagataagttctgaacgtcgaaaagaaaagtctcgagatgcagccagatctcggcgaagtaaagaatctgaagttttttatgagcttgctcatcagttgccacttccacataatgtgagttcgcatcttgataaggcctctgtgatgaggcttaccatcagctatttgcgtgtgaggaaacttctggatgctggtgatttggatattgaagatgacatgaaagcacagatgaattgcttttatttgaaagccttggatggttttgttatggttctcacagatgatggtgacatgatttacatttctgataatgtgaacaaatacatgggattaactcagtttgaactaactggacacagtgtgtttgattttactcatccatgtgaccatgaggaaatgagagaaatgcttacacacagaaatggccttgtgaaaaagggtaaagaacaaaacacacagcgaagcttttttctcagaatgaagtgtaccctaactagccgaggaagaactatgaacataaagtctgcaacatggaaggtattgcactgcacaggccacattcacgtatatgataccaacagtaaccaacctcagtgtgggtataagaaaccacctatgacctgcttggtgctgatttgtgaacccattcctcacccatcaaatattgaaattcctttagatagcaagactttcctcagtcgacacagcctggatatgaaattttcttattgtgatgaaagaattaccgaattgatgggatatgagccagaagaacttttaggccgctcaatttatgaatattatcatgctttggactctgatcatctgaccaaaactcatcatgatatgtttactaaaggacaagtcaccacaggacagtacaggatgcttgccaaaagaggtggatatgtctgggttgaaactcaagcaactgtcatatataacaccaagaattctcaaccacagtgcattgtatgtgtgaattacgttgtgagtggtattattcagcacgacttgattttctcccttcaacaaacagaatgtgtccttaaaccggttgaatcttcagatatgaaaatgactcagctattcaccaaagttgaatcagaagatacaagtagcctctttgacaaacttaagaaggaacctgatgctttaactttgctggccccagccgctggagacacaatcatatctttagattttggcagcaacgacacagaaactgatgaccagcaacttgaggaagtaccattatataatgatgtaatgctcccctcacccaacgaaaaattacagaatataaatttggcaatgtctccattacccaccgctgaaacgccaaagccacttcgaagtagtgctgaccctgcactcaatcaagaagttgcattaaaattagaaccaaatccagagtcactggaactttcttttaccatgccccagattcaggatcagacacctagtccttccgatggaagcactagacaaagttcacctgagcctaatagtcccagtgaatattgtttttatgtggatagtgatatggtcaatgaattcaagttggaattggtagaaaaactttttgctgaagacacagaagcaaagaacccattttctactcaggacacagatttagacttggagatgttagctccctatatcccaatggatgatgacttccagttacgttccttcgatcagttgtcaccattagaaagcagttccgcaagccctgaaagcgcaagtcctcaaagcacagttacagtattccagcagactcaaatacaagaacctactgctaatgccaccactaccactgccaccactgatgaattaaaaacagtgacaaaagaccgtatggaagacattaaaatattgattgcatctccatctcctacccacatacataaagaaactactagtgccacatcatcaccatatagagatactcaaagtcggacagcctcaccaaacagagcaggaaaaggagtcatagaacagacagaaaaatctcatccaagaagccctaacgtgttatctgtcgctttgagtcaaagaactacagttcctgaggaagaactaaatccaaagatactagctttgcagaatgctcagagaaagcgaaaaatggaacatgatggttcactttttcaagcagtaggaattatt

SEQ ID NO: 4122 - DNA, 1026 bp, Homo sapiens
  source 1..1026: mol_type = genomic DNA
atggccgacaaaatggtgcgcacccccaagtgctcgagatgcaggaaccatggcttcctggtgcccgtcaagggacacgcgggcaaatgccgctggaagcagtgcctctgcgagaagtgctacctgatctccgagcgccagaagatcatggccgcgcagaaggtgctcaagacgcaggccgccgaggaggagcaggaggcggccctgtgtgcgcaggggcccaagcaggcctccggggctgcggccgccgcccccgcccccgtccccgtcccggccgcgagcctccgcccgctgtccccggggactccctccggagacgccgacccgggacccgagggccgcgcggccgcttgcttcttcgagcagcccccgcggggccggaaccccggcccgagagccctccagccggttctgggcggccgcagccacgtggagccgagcgagcgagccgccgtggcgatgcccagccttgcgggacccccttttggggcggaggccgcaggcagtggctaccctggccccctagacctgcgcaggccgatgcggaccgtgcccggcccactgttcaccgactttgtgcgccctctgaacatcaacccggaccgtgcactgggccctgagtaccctggtggctccagcatgcacccctactgcccgttcccgctgggctacctggacgcccctcctggcgtccccctgcagcagggcttccggcatgtgtcccgcagccagtaccaaggcggaggcttggtgtcagaaccaggaggagacttccagccaagctactacctgccgccgccgccgccgccactgccgccccttccaccgcttccaccgcagccccagttcctcccgccaggctacctctctgcgctccacttcctccccccgccaccgccaccaccacctccatcatctttctcactgaccgtcctgtttgatactgacaaggagaacactgatgaccaggatgcagaggtactgtcgggtgagcccagccagccatcgtctcaggagcagtccgac

SEQ ID NO: 4123 - DNA, 1446 bp, Homo sapiens
  source 1..1446: mol_type = genomic DNA
atgaccatgtccaaggaggcagtgaccttcaaggatgtggcagtggtcttcactgaggaggagctggggctgctggaccttgcccagaggaagctgtatcgagatgtgatgctggagaacttcaggaacctgctgtcagtggggcatcaaccattccaccgagatactttccactttctaagggaggaaaagttttggatgatggatatagcaacccaaagggaagggaattcaggaggcaagatccaacctgagatgaagacttttccagaagcaggaccacatgaagggtggtcctgccagcagatctgggaagaaattgcaagtgatttaaccaggcctcaagactctaccataaagagctctcagttctttgaacagggtgatgcccactcccaggttgaggaaggactatctataatgcacacaggacagaaaccttccaattgtgggaagtgtaaacaatccttcagtgatatgtccatctttgatcttcctcagcaaatacgctcagcagagaagtctcattcctgtgatgagtgtggaaaaagcttctgttacatctcagcgcttcatattcatcagagagtccacctgggagagaaactctttaagtgtgacgtgtgtggtaaggaattcagtcagagtttacatctgcaaactcatcagagagtccatactggagagaaacctttcaaatgtgaacaatgtgggagaggcttcagatgtagatcagcacttacagttcattgcaaattacacatgggagagaaacattataattgtgaggcatgtgggagggccttcattcatgatttccagcttcagaaacatcagagaattcacacaggggagaagccattcaaatgtgagatatgtagtgtgagcttccgtcttaggtcaagtcttaataggcattgtgtggtccacacaggaaagaaaccaaacagcactggggaatatggaaaaggcttcattcgtaggctggatttgtgtaagcatcagacgatccacacaggagagaaaccatataattgtaaagaatgtgggaagagcttcagacggtcctcctatcttttgatccatcagcgagtccacactggagaaaagccatacaaatgtgacaagtgtgggaagagctacattactaagtcaggtcttgacttgcaccatagagcccacacaggagagagaccttataactgtgatgactgtgggaagagctttagacaggcctcaagtattttgaatcataagagactccattgccgaaaaaaaccattcaaatgtgaggattgtggaaagaagcttgtataccggtcataccgtaaagaccaacaaaaaaaccacagtggagaaaatccatccaaatgtgaagactgtgggaagcgctacaagaggcgcttgaatcttgatataattttatcattatttttaaatgacacg

SEQ ID NO: 4124 - DNA, 1248 bp, Homo sapiens
  source 1..1248: mol_type = genomic DNA
atggcagccattctcctgaccacgagacccaaggtgccagtatcttttgaggatgtgtccgtgtacttcacaaagacagaatggaagcttctggacctcagacaaaaggtcctctacaagcgggtgatgctggagaactatagccatttggtgtcactgggattttccttctccaagcctcacctgatctcccaattggaacgaggggaaggaccctgggtagcagacatccccagaacctgggccaccgcaggattgcacataggtgacagaacacagagcaagacgtcgacttcaacgcagaagcattctggacgacaactccccggggccgatccacaaggtggcaaggaggggcaggcggcgaggtcgtctgtgctccagagaggtgcccagggcttggggcagagttcggctgcggggccgcagggccccaaaggcgcggagaagcggtacctgtgccagcagtgtgggaaggccttcagccgcagctccaacctcatcaagcaccgcatcatccacagtggcgagaagccttacgcgtgccccgagtgcggcaagctgtttcgccgcagcttcgcgctcctggagcaccagcgcatccacagcggcgagaagccctacgcctgccccgagtgcagcaagaccttcacgcgcagctccaacctcatcaagcaccaggtcatccacagcggcgagcggcccttcgcctgcggcgactgcggcaaactgttccgccgcagcttcgcgctcctggagcacgcgcgcgtgcacagcggcgagcggccctacgcgtgcccagagtgcggcaaggccttcagccgcagctccaacctcatcgagcaccagcgcacgcaccgcggcgagaagccctacgcctgcggccagtgcgccaaggccttcaagggcgtctcgcagctcatccaccaccagcgcagccacagcggcgagcggcccttcgcgtgccgcgagtgcggcaaggccttccgtggccgttcgggcctcagccagcaccggcgcgtgcacagcggtgagaagccctacgagtgcagcgactgcggcaaggccttcggccggcgcgccaacctattcaagcaccaggcagtgcacggcgccaggcgccctgcgaaggcggagacggcgcggaggctagcgggccctgggagcaccggccctgggagcgcggtggcggccaccagccccccgcggccgagcacagccgccaggccttccaggcccagccgccgc

SEQ ID NO: 4125 - DNA, 1590 bp, Homo sapiens
  source 1..1590: mol_type = genomic DNA
atggtcaggccccaggatactgtggcgtatgaggacctgtctgaggactatactcagaagaaatggaaaggtctcgcactcagtcagagagccctgcactggaacatgatgctggaaaatgaccgtagcatggcttctttgggtaggaacatgatggagagttcagagctgactccgaagcaggaaatttttaaaggatcagagtcatctaatagcacatcagggggactctttggggtggttcctgggggaacagagactggagatgtttgtgaagataccttcaaagagttagaaggacaaccctcaaatgaagaagggagcagactagaaagtgatttcttggaaataatagatgaggataagaaaaaatccacaaaagacagatatgaggaatataaggaagttgaggaacatccacctctgtcttccagtcctgttgaacatgaaggagttttaaagggacagaaatcctatcgatgtgatgaatgtggcaaagctttttattggagttcgcacctcattggtcatcggagaatccacactggagagaaaccctatgagtgtaatgagtgtgggaagaccttcaggcaaacctcccagctcattgttcatctcagaacccacacaggggaaaagccctatgaatgcagtgagtgtggaaaggcctataggcacagctcccatctcattcaacaccagagactccataatggggagaaaccctataaatgtaatgaatgtgcaaaagcttttaatcagagctccaaactcttcgaccaccagagaacccatactggggagaaaccttatgaatgtaaggagtgtggggcggcctttagtcggagtaaaaatcttgttcgacatcagtttctgcacactggtaagaaaccttataagtgtaatgaatgtgggagagcattctgttccaatagaaatctcattgaccatcagagaacccacactggggagaagccttataaatgtaatgaatgtggcaaagccttcagtcggagtaaatgtcttattcgacatcagagcctccacactggggaaaagccatacaaatgtagtgaatgtgggaaagccttcaatcagatctctcaacttgttgaacatgagcgaattcatactggagaaaaaccatttaagtgtagtgagtgtggtaaggcattcggtctgagtaaatgtcttattcggcaccagaggcttcacacaagtgaaaagccctataaatgcaatgagtgtggaaaatccttcaatcaaaactcatacctcattatacaccagagaattcacactggtgagaaaccctatgaatgtaatgagtgtgggaaggtcttcagttataattctagtcttatggtacatcagagaacccatactggggaaaaaccctataaatgcaatagttgtgggaaagcctttagtgacagctcacagcttactgtgcaccagagagtccacactggagaaaaaccttatgaatgtattgagtgtgggaaagcctttagtcagcgttccacttttaatcaccaccagcgaactcatgctggagagaagccctcaggtctggctcggtcatcttct

SEQ ID NO: 4126 - DNA, 339 bp, Homo sapiens
  source 1..339: mol_type = genomic DNA
atggccccgaggcctccgaccgccgcgccccaggaatcagtgacattcaaagatgtgtctgtggacttcacccaggaagaatggtaccatgtcgaccctgctcagaggagcttatacagggatgtgatgctggagaactatagccacctggtttctcttggatatcaagtttccaagccagaggtgatcttcaaattggagcaaggagaagagccatggatatcagagggagaaatccaacgacctttctatccaggatttgtctgcctcctgccgctgtcgctaccatctgggagtaagggcgaaagaagacagaaacttccaagaaagaatcctgag

SEQ ID NO: 4127 - DNA, 1908 bp, Homo sapiens
  source 1..1908: mol_type = genomic DNA
atggccccgaggcctccgaccgccgcgccccaggaatcagtgacattcaaagatgtgtctgtggacttcacccaggaagaatggtaccatgtcgaccctgctcagaggagcttatacagggatgtgatgctggagaactatagccacctggtttctcttggatatcaagtttccaagccagaggtgatcttcaaattggagcaaggagaagagccatggatatcagagggagaaatccaacgacctttctatccagactggaagaccaggcctgaagtcaaatcatcacatttgcagcaggatgtatcagaagtatcccactgcacacatgatctcttacatgctacattagaagactcctgggatgttagcagccagttagacaggcaacaggaaaactggaagagacatctgggatcagaggcatccacccagaagaaaataattacaccacaagaaaattttgagcaaaataaatttggtgaaaattctagattgaacaccaatttggttacacaactgaacattcctgcaagaataaggcctagtgaatgtgagacccttggaagcaatttgggacataatgcagacttacttaatgagaataatattcttgcaaaaaagaaaccctataagtgtgataaatgtagaaaagcctttattcatagatcatcgcttactaaacatgagaaaacacataaaggagagggagctttccctaatggaacagatcaaggaatttatcctggaaagaaacaccatgaatgtaccgactgtgggaaaacctttctctggaagacacagcttactgagcatcagagaattcacactggggagaaaccctttgaatgcaatgtatgtggaaaggccttcaggcatagctcatctcttggtcagcatgagaatgctcataccggagagaaaccctatcagtgtagtctctgtgggaaagccttccagcgcagctcctcccttgttcaacaccagcgaattcacactggagagaaaccctatcgatgtaatctatgtgggaggtcctttaggcatggcacatccctcactcaacacgaggtcacacacagtggagagaagcccttccagtgtaaggaatgtgggaaagcctttagtcgatgttcttcccttgtccaacatgagaggactcatactggagagaaaccttttgaatgtagcatatgtgggagggcttttggtcagagcccatccctttataaacatatgaggattcataagagaggcaaaccttaccaaagcagtaactacagcatagatttcaagcacagcacatctctcactcaagatgaaagcactcttaccgaagtgaaatcctaccattgtaatgactgtggggaagactttagtcacattacagactttactgaccatcagaggatccatactgcagagaacccctatgattgtgagcaggcttttagtcagcaagctatttctcatcctggagagaaaccctatcaatgtaatgtatgtgggaaagctttcaaaaggagtacaagtttcatagagcatcacagaattcatactggagagaaaccctatgaatgtaatgagtgtggagaagcctttagtcgacgctcatcgcttactcaacatgagagaacccacactggagagaaaccctatgaatgtattgactgtgggaaagcctttagtcaaagttcatctctcattcagcatgagagaactcatactggagagaagccctatgaatgtaatgaatgtgggagagccttccgaaaaaaaaccaacctgcatgatcatcagagaattcatactggagaaaaaccctattcttgtaaggaatgtgggaaaaacttcagccgaagttcagctcttactaaacaccagagaattcatactcgaaataaactc

SEQ ID NO: 4128 - DNA, 279 bp, Homo sapiens
  source 1..279: mol_type = genomic DNA
atggccccgaggcctccgaccgccgcgccccaggaatcagtgacattcaaagatgtgtctgtggacttcacccaggaagaatggtaccatgtcgaccctgctcagaggagcttatacagggatgtgatgctggagaactatagccacctggtttctcttggatatcaagtttccaagccagaggtgatcttcaaattggagcaaggagaagagccatggatatcagagggagaaatccaacgacctttctatccagcagtgtatttcaacaggaaggaa

SEQ ID NO: 4129 - DNA, 1710 bp, Homo sapiens
  source 1..1710: mol_type = genomic DNA
atgccgggggagacggaagagccgagacccccggagcagcaggaccaggaagggggagaggcggccaaggcggctccggaggagccccaacaacggccccctgaggcggtcgcggcggcgcctgcagggaccactagcagccgcgtgctgaggggaggtcgggaccgaggccgggccgctgcggccgccgccgccgcagctgtgtcccgccggaggaaggccgagtatccccgccggcggaggagcagccccagcgccaggcctcccgacgtccccgggcagcagccccaggccgcgaagtccccgtctccagttcagggcaagaagagtccgcgactcctatgcatagaaaaagtaacaactgataaagatcccaaggaagaaaaagaggaagaagacgattctgccctccctcaggaagtttccattgctgcatctagacctagccggggctggcgtagtagtaggacatctgtttctcgccatcgtgatacagagaacacccgaagctctcggtccaagaccggttcattgcagctcatttgcaagtcagaaccaaatacagaccaacttgattatgatgttggagaagagcatcagtctccaggtggcattagtagtgaagaggaagaggaggaggaagaagagatgttaatcagtgaagaggagataccattcaaagatgatccaagagatgagacctacaaaccccacttagaaagggaaaccccaaagccacggagaaaatcagggaaggtaaaagaagagaaggagaagaaggaaattaaagtggaagtagaggtggaggtgaaagaagaggagaatgaaattagagaggatgaggaacctccaaggaagagaggaagaagacgaaaagatgacaaaagtccacgtttacccaaaaggagaaaaaagcctccaatccagtatgtccgttgtgagatggaaggatgtggaactgtccttgcccatcctcgctatttgcagcaccacattaaataccagcatttgctgaagaagaaatatgtatgtccccatccctcctgtggacgactcttcaggcttcagaagcaacttctgcgacatgccaaacatcatacagatcaaagggattatatctgtgaatattgtgctcgggccttcaagagttcccacaatctggcagtgcaccggatgattcacactggcgagaagccattacaatgtgagatctgtggatttacttgtcgacaaaaggcatctcttaattggcacatgaagaaacatgatgcagactccttctaccagttttcttgcaatatctgtggcaaaaaatttgagaagaaggacagcgtagtggcacacaaggcaaaaagccaccctgaggtgctgattgcagaagctctggctgccaatgcaggcgccctcatcaccagcacagatatcttgggcactaacccagagtccctgacgcagccttcagatggtcagggtcttcctcttcttcctgagcccttgggaaactcaacctctggagagtgcctactgttagaagctgaagggatgtcaaagtcatactgcagtgggacggaacgggtgagcctgatggctgatgggaagatctttgtgggaagcggcagcagtggaggcactgaagggctggttatgaactcagatatactcggtgctaccacagaggttctgattgaagattcagactctgccggacct

SEQ ID NO: 4130 - DNA, 1299 bp, Homo sapiens
  source 1..1299: mol_type = genomic DNA
atggctttagatctaagaaccatatttcagtgtgaaccatccgagaataatcttggatcagaaaattcagcgtttcaacaaagccaaggacctgctgttcagagagaagaagggatttctgagttctcaagaatggtgctcaattcatttcaagacagcaataattcatatgcaaggcaggaattgcaaagactttataggatctttcactcatggctgcaaccagaaaagcacagcaaggatgaaattatttctctattagtcctggagcagtttatgattggtggccactgcaatgacaaagccagtgtgaaagagaaatggaaatcaagtggcaaaaacttggagagattcatagaagacctgactgatgacagcataaatccacctgccttagtccacgtccacatgcagggacaggaagctctcttttctgaggatatgcccttaagagatgtcattgttcatctcacaaaacaagtgaatgcccaaaccacaagagaagcaaacatggggacaccctcccagacttcccaagatacttccttagaaacaggacaaggatatgaagatgaacaagatggctggaacagttcttcgaaaactactcgagtaaatgaaaatattactaatcaaggcaatcaaatagtttccctaatcatcatccaggaagagaacggtcctaggcctgaagagggaggtgtttcttctgacaacccatacaactcaaaaagagcagagctagtcactgctagatctcaggaagggtccataaatggaatcactttccaaggtgtccctatggtgatgggagcagggtgtatctctcaaccagagcagtcctcccctgagtctgcccttacccaccagagcaatgagggaaattccacatgtgaggtacatcagaaaggatcccatggagtccaaaaatcatacaaatgtgaagaatgccccaaggtctttaagtatctctgtcacttattagctcaccagagaagacacaggaatgagaggccatttgtttgtcccgagtgtcaaaaaggcttcttccagatatcagacctacgggtgcatcagataattcacacaggaaagaagcctttcacatgcagcatgtgtaaaaagtccttcagccacaaaaccaacctgcggtctcatgagagaatccacacaggagaaaagccttatacatgtcccttttgtaagacaagctaccgccagtcatccacataccaccgccatatgaggactcatgagaaaattaccctgccaagtgttccctccacaccagaagcttcc

SEQ ID NO: 4131 - DNA, 1224 bp, Homo sapiens
  source 1..1224: mol_type = genomic DNA
atgcttccacggcccaaagcccctgcctcccccagacgcccccagaccccaaccccgagtgagcaggacgcagaccctgggccagcaagccccagggacaccgaagcccagcgtctgcgcttccggcagttccagtaccacgtggcgagcgggccgcacctcgcgctgggccagctctggacgctgtgccgccagtggctgaggcccgaggcgcgctccaaggagcagatgctggagctgctggtgctggagcagttcctgggcgcgctgcccagcaagatgcggacctgggtgcagtcacagggcccccgaagctgcagggaggccgccagcctggtggaggacctcacacagatgtgccagcaggaagttctggtatctctggactcggtcgaaccccaggactggagtttcggtgaggaggaagatgggaagagtccaaggtcccagaaagaaccatcgcaggcgtctgagctgattctggatgcagtggcagcagccccagcactccccgaggaaagtgagtggctggagactacccagctccagcagagtctgcacaccagggcggaggccgaagcgccccgcgcccctggcttgctggggtcccgggcccgcttgcctctgaagccgagtatctgggacgagcctgaggaccttctcgcagggccctcctcagacctgcgggcagaagggactgtgatctcgagccccaagggtccaagtgctcagagaatcagtccccgaaggagaaacaggaacactgaccagagcggccgccaccagccatccctcaagcacaccaaaggtggtacccaagaggctgttgcaggcatctcggtagtgccgcgtgggccccgaggtgggcggcccttccagtgtgccgactgtgggatggtcttcacctgggtcacccacttcatcgagcaccagaagacccatcgcgaggaagggccctttccgtgccccgagtgtggcaaggtcttcctgcacaactccgtcctcactgagcatggcaagatccacctgctggagccaccgaggaagaaagccccccggagcaagggcccccgggagtccgtcccacccagggatggagcccagggcccagtggcccctcgcagccccaaaagacccttccagtgtagcgtctgcgggaaggccttcccctggatggtccacctcattgaccaccagaagctccacacggcccacggccacatg

SEQ ID NO: 4132 - DNA, 438 bp, Homo sapiens
  source 1..438: mol_type = genomic DNA
atgatggctgcagacatcccgagagtgaccactccgctgagctccttggtccaggtgcctcaagaggaagatagacaggaggaggaggtcaccaccatgatcctggaggatgactcctgggtgcaagaagctgtgctgcaggaggatggccctgagtctgagccctttccccagagtgctggcaagggcggcccccaggaggaggtgaccaggggaccacagggtgcactcggccgcctccgagagctctgccggcgctggctgagaccagaggtacacaccaaggagcagatgttaaccatgctgccaaaggaaattcaggcttggctgcaagagcatcggcctgaaagcagtgaggaggcagcggccctggtggaagacttgacccagacccttcaggacagtgaaacagcttcctgcgtacatggctgccctgtg

SEQ ID NO: 4133 - DNA, 1842 bp, Homo sapiens
  source 1..1842: mol_type = genomic DNA
atgatggctgcagacatcccgagagtgaccactccgctgagctccttggtccaggtgcctcaagaggaagatagacaggaggaggaggtcaccaccatgatcctggaggatgactcctgggtgcaagaagctgtgctgcaggaggatggccctgagtctgagccctttccccagagtgctggcaagggcggcccccaggaggaggtgaccaggggaccacagggtgcactcggccgcctccgagagctctgccggcgctggctgagaccagaggtacacaccaaggagcagatgttaaccatgctgccaaaggaaattcaggcttggctgcaagagcatcggcctgaaagcagtgaggaggcagcggccctggtggaagacttgacccagacccttcaggacagtgattttgagatacagagtgaaaatggggagaactgtaatcaagacatgtttgagaatgaatcacgtaagatattctcggaaatgcctgaaggtgaaagtgctcagcactccgatggggaaagtgactttgagagagatgctggcatccagaggctccagggacacagcccaggtgaggaccacggggaggtggtttctcaggacagggaagttggccagctcataggcctgcagggcacctacctaggggagaagccctacgaatgtccccagtgtgggaagaccttcagccggaaatcccacctcatcacacacgagaggacccacacaggagagaaatactacaaatgtgatgaatgtggaaaaagctttagtgatggttcaaattttagtagacaccaaaccactcacaccggggagaagccctacaaatgcagagactgtgggaagagctttagccggagtgccaacctcataacccaccagaggatccacacgggggaaaagcccttccagtgtgccgagtgtggcaagagcttcagcaggagtcccaacctcattgcacatcagcgcacccacacaggagagaaaccctactcgtgccccgagtgtggaaagagctttggcaaccgatccagccttaacacgcatcaggggatccacactggagaaaagccctacgaatgtaaagaatgcggcgaaagctttagttacaactccaatctaatcagacaccagagaatccacacaggagagaaaccctacaaatgtaccgactgtgggcagaggttcagccagagttcagccctcatcacccaccggagaacccacacaggagagaaaccctaccagtgcagcgagtgtgggaaaagcttcagccgcagctctaacctggccacacaccggagaacccacatggtggagaagccctataagtgtggggtgtgtgggaagagcttcagccagagctccagtctgattgcacaccagggcatgcacacaggggagaaaccctacgagtgcctgacatgtggggagagcttcagctggagctccaacctcctcaagcaccagaggatccacacgggagagaaaccctacaaatgcagcgagtgtgggaaatgcttcagccagcgctcccagctcgtagtgcaccagcggacccacacgggcgagaagccctacaaatgcctcatgtgcggcaagagcttcagccggggctccattctggtcatgcaccagagagcccatttgggagacaagccctacaggtgccctgagtgtgggaaaggctttagctggaactcagtcctcattatacatcagcgaatccacactggggagaagccctacaaatgccccgagtgtggcaaaggcttcagcaacagctctaactttatcacacatcagagaactcacatgaaagagaaactttat

SEQ ID NO: 4134 - DNA, 450 bp, Homo sapiens
  source 1..450: mol_type = genomic DNA
atgatggctgcagacatcccgagagtgaccactccgctgagctccttggtccaggtgcctcaagaggaagatagacaggaggaggaggtcaccaccatgatcctggaggatgactcctgggtgcaagaagctgtgctgcaggaggatggccctgagtctgagccctttccccagagtgctggcaagggcggcccccaggaggaggtgaccaggggaccacagggtgcactcggccgcctccgagagctctgccggcgctggctgagaccagaggtacacaccaaggagcagatgttaaccatgctgccaaaggaaattcaggcttggctgcaagagcatcggcctgaaagcagtgaggaggcagcggccctggtggaagacttgacccagacccttcaggacagtgctgtagctgtcgttgcttcccttccggtggaggtgaccagtttg

SEQ ID NO: 4135 - DNA, 1428 bp, Homo sapiens
  source 1..1428: mol_type = genomic DNA
atgatgaccgccaaggccgtagacaaaatcccagtaactctcagtggttttgtgcaccagctgtctgacaacatctacccggtggaggacctcgccgccacgtcggtgaccatctttcccaatgccgaactgggaggcccctttgaccagatgaacggagtggccggagatggcatgatcaacattgacatgactggagagaagaggtcgttggatctcccatatcccagcagctttgctcccgtctctgcacctagaaaccagaccttcacttacatgggcaagttctccattgaccctcagtaccctggtgccagctgctacccagaaggcataatcaatattgtgagtgcaggcatcttgcaaggggtcacttccccagcttcaaccacagcctcatccagcgtcacctctgcctcccccaacccactggccacaggacccctgggtgtgtgcaccatgtcccagacccagcctgacctggaccacctgtactctccgccaccgcctcctcctccttattctggctgtgcaggagacctctaccaggacccttctgcgttcctgtcagcagccaccacctccacctcttcctctctggcctacccaccacctccttcctatccatcccccaagccagccacggacccaggtctcttcccaatgatcccagactatcctggattctttccatctcagtgccagagagacctacatggtacagctggcccagaccgtaagccctttccctgcccactggacaccctgcgggtgccccctccactcactccactctctacaatccgtaactttaccctggggggccccagtgctggggtgaccggaccaggggccagtggaggcagcgagggaccccggctgcctggtagcagctcagcagcagcagcagccgccgccgccgccgcctataacccacaccacctgccactgcggcccattctgaggcctcgcaagtaccccaacagacccagcaagacgccggtgcacgagaggccctacccgtgcccagcagaaggctgcgaccggcggttctcccgctctgacgagctgacacggcacatccgaatccacactgggcataagcccttccagtgtcggatctgcatgcgcaacttcagccgcagtgaccacctcaccacccatatccgcacccacaccggtgagaagcccttcgcctgtgactactgtggccgaaagtttgcccggagtgatgagaggaagcgccacaccaagatccacctgagacagaaagagcggaaaagcagtgccccctctgcatcggtgccagccccctctacagcctcctgctctgggggcgtgcagcctgggggtaccctgtgcagcagtaacagcagcagtcttggcggagggccgctcgccccttgctcctctcggacccggacacct

SEQ ID NO: 4136 - DNA, 1278 bp, Homo sapiens
  source 1..1278: mol_type = genomic DNA
atgaacggagtggccggagatggcatgatcaacattgacatgactggagagaagaggtcgttggatctcccatatcccagcagctttgctcccgtctctgcacctagaaaccagaccttcacttacatgggcaagttctccattgaccctcagtaccctggtgccagctgctacccagaaggcataatcaatattgtgagtgcaggcatcttgcaaggggtcacttccccagcttcaaccacagcctcatccagcgtcacctctgcctcccccaacccactggccacaggacccctgggtgtgtgcaccatgtcccagacccagcctgacctggaccacctgtactctccgccaccgcctcctcctccttattctggctgtgcaggagacctctaccaggacccttctgcgttcctgtcagcagccaccacctccacctcttcctctctggcctacccaccacctccttcctatccatcccccaagccagccacggacccaggtctcttcccaatgatcccagactatcctggattctttccatctcagtgccagagagacctacatggtacagctggcccagaccgtaagccctttccctgcccactggacaccctgcgggtgccccctccactcactccactctctacaatccgtaactttaccctggggggccccagtgctggggtgaccggaccaggggccagtggaggcagcgagggaccccggctgcctggtagcagctcagcagcagcagcagccgccgccgccgccgcctataacccacaccacctgccactgcggcccattctgaggcctcgcaagtaccccaacagacccagcaagacgccggtgcacgagaggccctacccgtgcccagcagaaggctgcgaccggcggttctcccgctctgacgagctgacacggcacatccgaatccacactgggcataagcccttccagtgtcggatctgcatgcgcaacttcagccgcagtgaccacctcaccacccatatccgcacccacaccggtgagaagcccttcgcctgtgactactgtggccgaaagtttgcccggagtgatgagaggaagcgccacaccaagatccacctgagacagaaagagcggaaaagcagtgccccctctgcatcggtgccagccccctctacagcctcctgctctgggggcgtgcagcctgggggtaccctgtgcagcagtaacagcagcagtcttggcggagggccgctcgccccttgctcctctcggacccggacacct

SEQ ID NO: 4137 - DNA, 1161 bp, Homo sapiens
  source 1..1161: mol_type = genomic DNA
atgaccggcaaactcgccgagaagctgccggtgaccatgagcagtttgctaaaccaactgcctgacaatctgtaccccgaggagatccccagcgcgctcaacctcttctccggcagcagcgactcggtagtccattacaatcagatggctacagagaatgtaatggacatcggtctgaccaacgagaagcccaacccggaactctcttactccggctccttccagccagcccccggcaacaagaccgtgacctacttgggaaagttcgccttcgactccccttccaactggtgccaggacaacatcattagcctcatgagcgccggcatcttgggggtgcccccggcttcaggggcgctcagcacgcagacgtccacggccagcatggtgcagccaccgcagggtgacgtggaggccatgtatcccgcgctacccccctactccaactgcggcgacctctactcagagcccgtgtctttccacgacccccagggcaatcccgggctcgcctattccccccaggattaccaatcggccaagccggcgttggacagcaatctcttccccatgattcctgactacaacctctaccaccaccccaacgacatgggctccattccggagcacaagcccttccagggcatggaccccatccgggtcaacccgccccctattacccctctggagaccatcaaggcattcaaagacaagcagatccacccgggctttggcagcctgccccagccgccgctcaccctcaagcccatccggccccgcaagtaccccaaccggcctagcaagacaccgctccacgaacggccccacgcgtgcccggccgagggctgcgaccgccgtttcagccgttcggacgagctgacccggcacctgcgcatccacacgggccacaagcccttccagtgccggatctgcatgcggagcttcagccgcagcgaccacctcaccactcacatccgcactcatacgggcgagaagccctttgcctgcgagttctgcgggcgcaagtttgcgcgcagcgacgagcgcaagcgccacgccaagatccacctcaagcaaaaggagaagaaggcggagaagggcggtgcaccctctgcatcctcggcgccccccgtgtcgctggcccccgtggtcaccacctgcgcc

SEQ ID NO: 4138 - DNA, 1047 bp, Homo sapiens
  source 1..1047: mol_type = genomic DNA
atggagccatgtgcggcgtggagtccccgcggtgggagagagaatgtaatggacatcggtctgaccaacgagaagcccaacccggaactctcttactccggctccttccagccagcccccggcaacaagaccgtgacctacttgggaaagttcgccttcgactccccttccaactggtgccaggacaacatcattagcctcatgagcgccggcatcttgggggtgcccccggcttcaggggcgctcagcacgcagacgtccacggccagcatggtgcagccaccgcagggtgacgtggaggccatgtatcccgcgctacccccctactccaactgcggcgacctctactcagagcccgtgtctttccacgacccccagggcaatcccgggctcgcctattccccccaggattaccaatcggccaagccggcgttggacagcaatctcttccccatgattcctgactacaacctctaccaccaccccaacgacatgggctccattccggagcacaagcccttccagggcatggaccccatccgggtcaacccgccccctattacccctctggagaccatcaaggcattcaaagacaagcagatccacccgggctttggcagcctgccccagccgccgctcaccctcaagcccatccggccccgcaagtaccccaaccggcctagcaagacaccgctccacgaacggccccacgcgtgcccggccgagggctgcgaccgccgtttcagccgttcggacgagctgacccggcacctgcgcatccacacgggccacaagcccttccagtgccggatctgcatgcggagcttcagccgcagcgaccacctcaccactcacatccgcactcatacgggcgagaagccctttgcctgcgagttctgcgggcgcaagtttgcgcgcagcgacgagcgcaagcgccacgccaagatccacctcaagcaaaaggagaagaaggcggagaagggcggtgcaccctctgcatcctcggcgccccccgtgtcgctggcccccgtggtcaccacctgcgcc

SEQ ID NO: 4139 - DNA, 2013 bp, Homo sapiens
  source 1..2013: mol_type = genomic DNA
atgcctgacggcacccctccaccccaggaggcagaagagccgtctctacttaagaagctcttactggcaccagccaacactcagctaagttataatgaatgcagtggtctcagtacccagaaccatgcaaatcacaatcacaggatcagaacaaaccctgcaattgttaagactgagaattcatggagcaataaagcgaagagtatttgtcaacagcaaaagccacaaagacgtccctgctcggagcttctcaaatatctgaccacaaacgatgaccctcctcacaccaaacccacagagaacagaaacagcagcagagacaaatgcacctccaaaaagaagtcccacacacagtcgcagtcacaacacttacaagccaaaccaacaactttatctcttcctctgaccccagagtcaccaaatgaccccaagggttccccatttgagaacaagactattgaacgcaccttaagtgtggaactctctggaactgcaggcctaactccacccaccactcctcctcataaagccaaccaagataacccttttagggcttctccaaagctgaagtcctcttgcaagactgtggtgccaccaccatcaaagaagcccaggtacagtgagtcttctggtacacaaggcaataactccaccaagaaagggccggagcaatccgagttgtatgcacaactcagcaagtcctcagtcctcactggtggacacgaggaaaggaagaccaagcggcccagtctgcggctgtttggtgaccatgactattgccagtcaattaattccaaaacagaaatactcattaatatatcacaggagctccaagactctagacaactagaaaataaagatgtctcctctgattggcaggggcagatttgttcttccacagattcagaccagtgctacctgagagagactttggaggcaagcaagcaggtctctccttgcagcacaagaaaacagctccaagaccaggaaatccgagccgagctgaacaagcacttcggtcatcccagtcaagctgtttttgacgacgaagcagacaagaccggtgaactgagggacagtgatttcagtaatgaacaattctccaaactacctatgtttataaattcaggactagccatggatggcctgtttgatgacagcgaagatgaaagtgataaactgagctacccttgggatggcacgcaatcctattcattgttcaatgtgtctccttcttgttcttcttttaactctccatgtagagattctgtgtcaccacccaaatccttattttctcaaagaccccaaaggatgcgctctcgttcaaggtccttttctcgacacaggtcgtgttcccgatcaccatattccaggtcaagatcaaggtctccaggcagtagatcctcttcaagatcctgctattactatgagtcaagccactacagacaccgcacgcaccgaaattctcccttgtatgtgagatcacgttcaagatcgccctacagccgtcggcccaggtatgacagctacgaggaatatcagcacgagaggctgaagagggaagaatatcgcagagagtatgagaagcgagagtctgagagggccaagcaaagggagaggcagaggcagaaggcaattgaagagcgccgtgtgatttatgtcggtaaaatcagacctgacacaacacggacagaactgagggaccgttttgaagtttttggtgaaattgaggagtgcacagtaaatctgcgggatgatggagacagctatggtttcattacctaccgttatacctgtgatgcttttgctgctcttgaaaatggatacactttgcgcaggtcaaacgaaactgactttgagctgtacttttgtggacgcaagcaatttttcaagtctaactatgcagacctagattcaaactcagatgactttgaccctgcttccaccaagagcaagtatgactctctggattttgatagtttactgaaagaagctcagagaagcttgcgcagg

SEQ ID NO: 4140 - DNA, 2394 bp, Homo sapiens
  source 1..2394: mol_type = genomic DNA
atggcgtgggacatgtgcaaccaggactctgagtctgtatggagtgacatcgagtgtgctgctctggttggtgaagaccagcctctttgcccagatcttcctgaacttgatctttctgaactagatgtgaacgacttggatacagacagctttctgggtggactcaagtggtgcagtgaccaatcagaaataatatccaatcagtacaacaatgagccttcaaacatatttgagaagatagatgaagagaatgaggcaaacttgctagcagtcctcacagagacactagacagtctccctgtggatgaagacggattgccctcatttgatgcgctgacagatggagacgtgaccactgacaatgaggctagtccttcctccatgcctgacggcacccctccaccccaggaggcagaagagccgtctctacttaagaagctcttactggcaccagccaacactcagctaagttataatgaatgcagtggtctcagtacccagaaccatgcaaatcacaatcacaggatcagaacaaaccctgcaattgttaagactgagaattcatggagcaataaagcgaagagtatttgtcaacagcaaaagccacaaagacgtccctgctcggagcttctcaaatatctgaccacaaacgatgaccctcctcacaccaaacccacagagaacagaaacagcagcagagacaaatgcacctccaaaaagaagtcccacacacagtcgcagtcacaacacttacaagccaaaccaacaactttatctcttcctctgaccccagagtcaccaaatgaccccaagggttccccatttgagaacaagactattgaacgcaccttaagtgtggaactctctggaactgcaggcctaactccacccaccactcctcctcataaagccaaccaagataacccttttagggcttctccaaagctgaagtcctcttgcaagactgtggtgccaccaccatcaaagaagcccaggtacagtgagtcttctggtacacaaggcaataactccaccaagaaagggccggagcaatccgagttgtatgcacaactcagcaagtcctcagtcctcactggtggacacgaggaaaggaagaccaagcggcccagtctgcggctgtttggtgaccatgactattgccagtcaattaattccaaaacagaaatactcattaatatatcacaggagctccaagactctagacaactagaaaataaagatgtctcctctgattggcaggggcagatttgttcttccacagattcagaccagtgctacctgagagagactttggaggcaagcaagcaggtctctccttgcagcacaagaaaacagctccaagaccaggaaatccgagccgagctgaacaagcacttcggtcatcccagtcaagctgtttttgacgacgaagcagacaagaccggtgaactgagggacagtgatttcagtaatgaacaattctccaaactacctatgtttataaattcaggactagccatggatggcctgtttgatgacagcgaagatgaaagtgataaactgagctacccttgggatggcacgcaatcctattcattgttcaatgtgtctccttcttgttcttcttttaactctccatgtagagattctgtgtcaccacccaaatccttattttctcaaagaccccaaaggatgcgctctcgttcaaggtccttttctcgacacaggtcgtgttcccgatcaccatattccaggtcaagatcaaggtctccaggcagtagatcctcttcaagatcctgctattactatgagtcaagccactacagacaccgcacgcaccgaaattctcccttgtatgtgagatcacgttcaagatcgccctacagccgtcggcccaggtatgacagctacgaggaatatcagcacgagaggctgaagagggaagaatatcgcagagagtatgagaagcgagagtctgagagggccaagcaaagggagaggcagaggcagaaggcaattgaagagcgccgtgtgatttatgtcggtaaaatcagacctgacacaacacggacagaactgagggaccgttttgaagtttttggtgaaattgaggagtgcacagtaaatctgcgggatgatggagacagctatggtttcattacctaccgttatacctgtgatgcttttgctgctcttgaaaatggatacactttgcgcaggtcaaacgaaactgactttgagctgtacttttgtggacgcaagcaatttttcaagtctaactatgcagacctagattcaaactcagatgactttgaccctgcttccaccaagagcaagtatgactctctggattttgatagtttactgaaagaagctcagagaagcttgcgcagg

SEQ ID NO: 4141 - DNA, 1767 bp, Homo sapiens
  source 1..1767: mol_type = genomic DNA
atggcagtggcccggggagtcggaagcccggagccagcgccgccgcagctatataagtgggggggctgtgggctgggggagcccggcagcgctttggagaggcgaggagccgccgcccgaggccggtgcgggcgagcgagggcgccgcggctccccgactcctttcccagaggtgagtgcccgaagccaggagcccgggcgcctaggtctgtgcgctgcggggaacccctaccgccagcctccccgccacccgcgcgcccccaagcccagcgggcgaggccccgggcgccccacagccggcgccgcgccatgctccaccttagcgagttttccgaacccgacgcgctcctcgtcaagtccactgaaggctgttgcgccgaacccagcgctgaattgccccggctgcctgccagggacgctcccgcggccaccggctaccctggagcaggcgacttcttgagctgggctttgaacagctgcggcgcaagtggggacttagccgactcctgcttcctggaggggcctgcgcccacaccccctcccggcctcagctacagcggtagcttcttcattcaggcagtgcccgaacacccgcacgacccggaggcactcttcaacctcatgtcgggcatcttaggcctggcacccttccccggtccagaggcagcagcgtccagatccccgctggatgccccttttcctgcggggtccgatgccttgctgccgggtccgccggacctttactccccggatctgggcgctgcccctttcccagaggcgttctgggaggcctcgccttgcgcgggtgccccctcgcagtgcctgtatgagcctcagctctccccgcccgacgtcaagcccggcctccgggcgcctcccgcctcgccagcgctggacgctgtctctgccttcaagggtccctacgcgccctgggagctgctttctgtgggggccccagggaactgtgggtcacagggagactaccaggccgccccggaggctcgttttcccgtaatagggaccaagattgaggacttgctgtccatcagctgccctgcggaactgccggccgtcccagccaacagactctatcccagcggggcctatgacgctttcccgctggccccgggtgacttaggggagggggctgagggcctccctgggctcctgacccctcctagtggggagggagggagtagcggcgacggcggagagtttctggccagtacgcagcctcagctttccccgctgggccttcgcagcgccgccgcggcggacttccctaaacctctggtggcggacatccctggaagcagtggcgtggctgcaccacccgtgccgccgccgccgcccacccctttcccccaggccaaggcgcgacgcaaggggcgccgcggcggcaaatgcagcacgcgctgcttctgcccgcggccgcacgccaaggccttcgcttgcccggtggagagttgtgtgcggagctttgcgcgctccgacgagctcaatcgccacctgcgcatccacacgggccacaaacccttccagtgccgcatctgcctccgcaacttcagccgcagcgaccacctcaccacgcacgtgcgcacccacaccggcgagaagccttttgcttgcgacgtgtgcggccgccgcttcgcgcgcagcgatgagaagaaacggcacagcaaggtgcacctcaagcagaaggcgcgcgccgaggagcggctcaagggcctcggcttttactcgctgggcctctccttcgcttctctc

SEQ ID NO: 4142 - DNA, 537 bp, Homo sapiens
  source 1..537: mol_type = genomic DNA
ctgcctcgtgttgtctgttggcacactctcaagagtttgaacggatacaagaatctttcatctggtgccgaaacccgggaggggctccggtcttcgtcccccgtggacctacccctccgccccagaaagcaggccacagcagccggacaaaggaagctcctcagcctccagttgcttctctgtgcatgcacatcagtcactgatctcacctactggggccctgcaggccatggggccacagctccacacagaagcctcctagcaatccacctccacctggtgcctgcttcaagtgcggcaatgaaggccactggcccacacaatgcccaaacccaggtaaacccacgaggccatgccccctctgcggaggaccccactggaagttggactgtgagcggcccctgcaaggaccacccccatcccttcctgagccaatcaaaccctcctactcggatctcgtcagccttgccgctgaagactgatagtgccttggaacagacaccccagcaactaccatcgcttcatctgagccaaggg

SEQ ID NO: 4143 - DNA, 453 bp, Homo sapiens
  source 1..453: mol_type = genomic DNA
atggccgaggacctctctgcggccacgtcctacaccgaagatgatttctactgccccgtctgtcaggaggtgctcaaaacgcccgtgcggaccacggcctgtcagcacgtcaataggagtgaaacatccacatctgataacacagaaacttaccaagagaatacaagttcttctggtcatcctacttttaagtgtcccctgtgtcaagaatcaaattttaccagacagcgtttactggatcactgtaacagtaatcacctatttcagatagttcctgtgacatgtcctatttgtgtgtctcttccttggggagatcctagccagattaccagaaatttcgttagtcatctaaatcagagacatcaatttgattatggagaatttgtgaatcttcagctagatgaagaaacccaataccaaactgctgttgaagaatcttttcaagtaaacatc

SEQ ID NO: 4144 - DNA, 1557 bp, Homo sapiens
  source 1..1557: mol_type = genomic DNA
atggctcgtgatttggtgatgttcagagatgtggctgtagacttttctcaggaagaatgggaatgcctgaactcatatcagaggaatttgtacagagatgtgatattagagaactatagcaacttggtgtcactggcaggatgttctatttctaagccagatgtgatcaccctattggaacaagggaaagagccctggatggttgtgagggatgagaaaagaagatggactctagatttggaatccagatatgacactaaaaagttatttcaaggaaaggatatttatgaaatgaacttatctcagtggaaggtaatggaaagaattaaaagctgtggacttgaagaacaagaaagtcctcatgaggtgtgtttcaggcaagtgacaaaaaccacctctgaaaaaatgcctacttacagaaaactcacatctcttcctctgtatcagaaaagtcataacagagagaaaccctacgaatgtggggaatgtgggaaggcttttagagtacgacaacaacttactttccatcaaagaattcatactggtgagaaaccctatgaatgtaaagaatgtggaaaagcctttagacagtgtgcccacctcagtcgacatcagagaattcatacttctgacaaactctatgaatgtaaaaaatgtggaaagatcttcacatgtggctcagaccttcgagtacatcagagaattcatattggtgagaagccgtatgaatgtaaagaatgtgggaaagcctttagagttagaggacaacttaatctccatcaaaggattcacacgggtgagaaaccctatgaatgtaaagaatgtgggaaggcctttaggcagtatgcacaccttactcgacatcagagactgaacattgctgagaagtgctatgagtgtaaggaatgtggtcaggcctttctgtgtagtacaggccttcgactacatcacaaacttcatactggagaaaaaccctatgaatgtaaggagtgtggaaaggcctttagagtgcggcagcaacttactctccatcagagaattcacactggtgagaagccttatgattgtaaggaatgtgggaagactttcagtcgtggctatcatctaactctccatcagagaatacatactggtgaaaagccctatgaatgtaaggaatgtcagaagttctttcgtcgttactcagaacttatttcacatcagggtattcacattggagagaaaccttatgaatgtaaggaatgtgggaaggcatttaggctgttctcacagcttactcaacatcagagtattcattttggtgagaaaccctttaagtgtaaggaatgtgagaagacttttagactgctttcacaacttacccaacatcaaagtattcatactggtgaaaagccctatgactgtaaggaatgtggaaaggcctttagacttcattcatcactgattcaacatcagagaattcattctggtgagaaaccatacaaatgtaaggaatgtaaaaaggcatttagacaacattcacatcttacttaccatcagcgaattcataatgtaact

SEQ ID NO: 4145 - DNA, 714 bp, Homo sapiens
  source 1..714: mol_type = genomic DNA
atggagaacttccaaaaggtggaaaagatcggagagggcacgtacggagttgtgtacaaagccagaaacaagttgacgggagaggtggtggcgcttaagaaaatccgcctggacacgctgctggatgtcattcacacagaaaataaactctacctggtttttgaatttctgcaccaagatctcaagaaattcatggatgcctctgctctcactggcattcctcttcccctcatcaagagctatctgttccagctgctccagggcctagctttctgccattctcatcgggtcctccaccgagaccttaaacctcagaatctgcttattaacacagagggggccatcaagctagcagactttggactagccagagcttttggagtccctgttcgtacttacacccatgaggtgactcgccgggccctattccctggagattctgagattgaccagctcttccggatctttcggactctggggaccccagatgaggtggtgtggccaggagttacttctatgcctgattacaagccaagtttccccaagtgggcccggcaagattttagtaaagttgtacctcccctggatgaagatggacggagcttgttatcgcaaatgctgcactacgaccctaacaagcggatttcggccaaggcagccctggctcaccctttcttccaggatgtgaccaagccagtaccccatcttcgactc

SEQ ID NO: 4146 - DNA, 792 bp, Homo sapiens
  source 1..792: mol_type = genomic DNA
atggagaacttccaaaaggtggaaaagatcggagagggcacgtacggagttgtgtacaaagccagaaacaagttgacgggagaggtggtggcgcttaagaaaatccgcctggacactgagactgagggtgtgcccagtactgccatccgagagatctctctgcttaaggagcttaaccatcctaatattgtcaagctgctggatgtcattcacacagaaaataaactctacctggtttttgaatttctgcaccaagatctcaagaaattcatggatgcctctgctctcactggcattcctcttcccctcatcaagagctatctgttccagctgctccagggcctagctttctgccattctcatcgggtcctccaccgagaccttaaacctcagaatctgcttattaacacagagggggccatcaagctagcagactttggactagccagagcttttggagtccctgttcgtacttacacccatgaggtgactcgccgggccctattccctggagattctgagattgaccagctcttccggatctttcggactctggggaccccagatgaggtggtgtggccaggagttacttctatgcctgattacaagccaagtttccccaagtgggcccggcaagattttagtaaagttgtacctcccctggatgaagatggacggagcttgttatcgcaaatgctgcactacgaccctaacaagcggatttcggccaaggcagccctggctcaccctttcttccaggatgtgaccaagccagtaccccatcttcgactc

SEQ ID NO: 4147 - DNA, 1038 bp, Homo sapiens
  source 1..1038: mol_type = genomic DNA
atggagaacttccaaaaggtggaaaagatcggagagggcacgtacggagttgtgtacaaagccagaaacaagttgacgggagaggtggtggcgcttaagaaaatccgcctggacactgagactgagggtgtgcccagtactgccatccgagagatctctctgcttaaggagcttaaccatcctaatattgtcaagctgctggatgtcattcacacagaaaataaactctacctggtttttgaatttctgcaccaagatctcaagaaattcatggatgcctctgctctcactggcattcctcttcccctcatcaagagctatctgttccagctgctccagggcctagctttctgccattctcatcgggtcctccaccgagaccttaaacctcagaatctgcttattaacacagagggggccatcaagctagcagactttggactagccagagcttttggagtccctgttcgtacttacacccatgaggtggtgaccctgtggtaccgagctcctgaaatcctcctgggctgcaaatattattccacagctgtggacatctggagcctgggctgcatctttgctgagatgcacctagtgggtacccagcaccatgctaggtgctgtggggaacacagaagaaatggaagacagagtctctgcccgctgtgctcgtatctagaagtggctgcatcacaaggttgggggatgaccgcagtgtctaccccctaccccgtgactcgccgggccctattccctggagattctgagattgaccagctcttccggatctttcggactctggggaccccagatgaggtggtgtggccaggagttacttctatgcctgattacaagccaagtttccccaagtgggcccggcaagattttagtaaagttgtacctcccctggatgaagatggacggagcttgttatcgcaaatgctgcactacgaccctaacaagcggatttcggccaaggcagccctggctcaccctttcttccaggatgtgaccaagccagtaccccatcttcgactc

SEQ ID NO: 4148 - DNA, 3093 bp, Homo sapiens
  source 1..3093: mol_type = genomic DNA
atgatggctgctgcgttgctccattatacaggctacgcccaggaggaacagctgaaagaagaggaggaaataaaagaagaggaggaggaggaggacagcggttcagtagctcaactgcagggtggcaatgacacagggacggacgaggagctagaaacgggcccagagcaaaaaggctgcttcagctaccagaactctccaggaagtcatttgtccaatcaggatgccgagaacgagtctctgctgagtgacgccagtgatcaggtgtcggacatcaagagtgtctgcggcagagatgcctcagacaagaaagcacacactcacgtcaggcttccaaacgaagcacacaattgcatggataaaatgaccgctgtctacgccaacatcctgtcggattcctactggtcaggcctgggccttggcttcaagctgtccaatagtgagaggaggaactgtgacacccgaaacggcagcaacaagagtgattttgattggcaccaagacgctctgtccaaaagcctgcagcagaacttgccttctcggtccgtctcgaaacccagcctgttcagctcggtgcagttgtaccgacagagcagcaagatgtgcgggactgtgttcacaggggccagcagattccgatgccgacagtgcagcgcggcctatgacaccctagtcgagctgactgtgcacatgaatgaaacgggccactatcaagatgacaaccgcaaaaaggacaagctcagacccacgagctattcaaagcccaggaaaagggctttccaggatatggacaaagaggatgctcaaaaggttctgaaatgtatgttttgtggcgactcctttgattccctccaagatttgagcgtccacatgattaaaacaaaacattaccaaaaagtgcctttgaaggagccagtcccaaccatttcctcgaaaatggtcaccccggctaagaaacgcgtttttgatgtcaatcggccgtgttcccccgattcaaccacaggatcttttgcagattctttttcttctcagaagaacgccaacttgcagttgtcctccaacaaccgctatggctaccaaaatggagccagctacacctggcagtttgaggcctgcaagtcccagatcttaaagtgcatggagtgtgggagctcccatgacaccttgcagcagctcaccacccacatgatggtcacaggtcactttctcaaggtcaccagctctgcctccaagaaagggaagcagctggtattagacccgttagcagtggagaaaatgcagtcgttgtctgaggccccaaacagtgattctctggctcccaagccatccagtaactcagcatcagattgtacagcctctacaactgagttaaagaaagagagtaaaaaagaaaggccagaggaaaccagcaaggatgagaaagtcgtgaaaagcgaggactatgaagatcctctacaaaaacctttagaccctacaatcaaatatcaatacctaagggaggaagacttggaagatggctcaaagggtggaggggacattttgaaatctttggaaaatactgtcaccacagccatcaacaaagcccaaaacggggcccccagctggagtgcctaccccagcatccacgcagcctaccagctgtctgagggcaccaagccgcctttgcctatgggatcccaggtactgcagatccggcctaatctcaccaacaagctgaggcccattgcaccaaagtggaaagtgatgccactggtttctatgcccacacacctggccccttacactcaagtcaagaaagagtcagaagacaaagatgaagcggtgaaggagtgtgggaaagaaagtccccacgaagaggcctcatctttcagccacagtgagggcgattctttccgcaaaagtgaaacacctccagaagccaaaaagaccgagctgggtcccctgaaggaggaggagaagctgatgaaagagggcagcgagaaggagaaaccccagcccctggagcccacatctgctctgagcaatgggtgcgccctcgccaaccacgccccggccctgccatgcatcaacccactcagcgccctgcagtccgtcctgaacaatcacttgggcaaagccacggagcccttgcgctcaccttcctgctccagcccaagttcaagcacaatttccatgttccacaagtcgaatctcaatgtcatggacaagccggtcttgagtcctgcctccacaaggtcagccagcgtgtccaggcgctacctgtttgagaacagcgatcagcccattgacctgaccaagtccaaaagcaagaaagccgagtcctcgcaagcacaatcttgtatgtccccacctcagaagcacgctctgtctgacatcgccgacatggtcaaagtcctccccaaagccaccaccccaaagccagcctcctcctccagggtcccccccatgaagctggaaatggatgtcaggcgctttgaggatgtctccagtgaagtctcaactttgcataaaagaaaaggccggcagtccaactggaatcctcagcatcttctgattctacaagcccagtttgcctcgagcctcttccagacatcagagggcaaatacctgctgtctgatctgggcccacaagagcgtatgcaaatctctaagtttacgggactctcaatgaccactatcagtcactggctggccaacgtcaagtaccagcttaggaaaacgggcgggacaaaatttctgaaaaacatggacaaaggccaccccatcttttattgcagtgactgtgcctcccagttcagaaccccttctacctacatcagtcacttagaatctcacctgggtttccaaatgaaggacatgacccgcttgtcagtggaccagcaaagcaaggtggagcaagagatctcccgggtatcgtcggctcagaggtctccagaaacaatagctgccgaagaggacacagactctaaattcaagtgtaagttgtgctgtcggacatttgtgagcaaacatgcggtaaaactccacctaagcaaaacgcacagcaagtcacccgaacaccattcacagtttgtaacagacgtggatgaagaa

SEQ ID NO: 4149 - DNA, 3102 bp, Homo sapiens
  source 1..3102: mol_type = genomic DNA
atgccgaggagaaaacagcaggcacccaagcgggcggcaggctacgcccaggaggaacagctgaaagaagaggaggaaataaaagaagaggaggaggaggaggacagcggttcagtagctcaactgcagggtggcaatgacacagggacggacgaggagctagaaacgggcccagagcaaaaaggctgcttcagctaccagaactctccaggaagtcatttgtccaatcaggatgccgagaacgagtctctgctgagtgacgccagtgatcaggtgtcggacatcaagagtgtctgcggcagagatgcctcagacaagaaagcacacactcacgtcaggcttccaaacgaagcacacaattgcatggataaaatgaccgctgtctacgccaacatcctgtcggattcctactggtcaggcctgggccttggcttcaagctgtccaatagtgagaggaggaactgtgacacccgaaacggcagcaacaagagtgattttgattggcaccaagacgctctgtccaaaagcctgcagcagaacttgccttctcggtccgtctcgaaacccagcctgttcagctcggtgcagttgtaccgacagagcagcaagatgtgcgggactgtgttcacaggggccagcagattccgatgccgacagtgcagcgcggcctatgacaccctagtcgagctgactgtgcacatgaatgaaacgggccactatcaagatgacaaccgcaaaaaggacaagctcagacccacgagctattcaaagcccaggaaaagggctttccaggatatggacaaagaggatgctcaaaaggttctgaaatgtatgttttgtggcgactcctttgattccctccaagatttgagcgtccacatgattaaaacaaaacattaccaaaaagtgcctttgaaggagccagtcccaaccatttcctcgaaaatggtcaccccggctaagaaacgcgtttttgatgtcaatcggccgtgttcccccgattcaaccacaggatcttttgcagattctttttcttctcagaagaacgccaacttgcagttgtcctccaacaaccgctatggctaccaaaatggagccagctacacctggcagtttgaggcctgcaagtcccagatcttaaagtgcatggagtgtgggagctcccatgacaccttgcagcagctcaccacccacatgatggtcacaggtcactttctcaaggtcaccagctctgcctccaagaaagggaagcagctggtattagacccgttagcagtggagaaaatgcagtcgttgtctgaggccccaaacagtgattctctggctcccaagccatccagtaactcagcatcagattgtacagcctctacaactgagttaaagaaagagagtaaaaaagaaaggccagaggaaaccagcaaggatgagaaagtcgtgaaaagcgaggactatgaagatcctctacaaaaacctttagaccctacaatcaaatatcaatacctaagggaggaagacttggaagatggctcaaagggtggaggggacattttgaaatctttggaaaatactgtcaccacagccatcaacaaagcccaaaacggggcccccagctggagtgcctaccccagcatccacgcagcctaccagctgtctgagggcaccaagccgcctttgcctatgggatcccaggtactgcagatccggcctaatctcaccaacaagctgaggcccattgcaccaaagtggaaagtgatgccactggtttctatgcccacacacctggccccttacactcaagtcaagaaagagtcagaagacaaagatgaagcggtgaaggagtgtgggaaagaaagtccccacgaagaggcctcatctttcagccacagtgagggcgattctttccgcaaaagtgaaacacctccagaagccaaaaagaccgagctgggtcccctgaaggaggaggagaagctgatgaaagagggcagcgagaaggagaaaccccagcccctggagcccacatctgctctgagcaatgggtgcgccctcgccaaccacgccccggccctgccatgcatcaacccactcagcgccctgcagtccgtcctgaacaatcacttgggcaaagccacggagcccttgcgctcaccttcctgctccagcccaagttcaagcacaatttccatgttccacaagtcgaatctcaatgtcatggacaagccggtcttgagtcctgcctccacaaggtcagccagcgtgtccaggcgctacctgtttgagaacagcgatcagcccattgacctgaccaagtccaaaagcaagaaagccgagtcctcgcaagcacaatcttgtatgtccccacctcagaagcacgctctgtctgacatcgccgacatggtcaaagtcctccccaaagccaccaccccaaagccagcctcctcctccagggtcccccccatgaagctggaaatggatgtcaggcgctttgaggatgtctccagtgaagtctcaactttgcataaaagaaaaggccggcagtccaactggaatcctcagcatcttctgattctacaagcccagtttgcctcgagcctcttccagacatcagagggcaaatacctgctgtctgatctgggcccacaagagcgtatgcaaatctctaagtttacgggactctcaatgaccactatcagtcactggctggccaacgtcaagtaccagcttaggaaaacgggcgggacaaaatttctgaaaaacatggacaaaggccaccccatcttttattgcagtgactgtgcctcccagttcagaaccccttctacctacatcagtcacttagaatctcacctgggtttccaaatgaaggacatgacccgcttgtcagtggaccagcaaagcaaggtggagcaagagatctcccgggtatcgtcggctcagaggtctccagaaacaatagctgccgaagaggacacagactctaaattcaagtgtaagttgtgctgtcggacatttgtgagcaaacatgcggtaaaactccacctaagcaaaacgcacagcaagtcacccgaacaccattcacagtttgtaacagacgtggatgaagaa

SEQ ID NO: 4150 - DNA, 3243 bp, Homo sapiens
  source 1..3243: mol_type = genomic DNA
atgccgaggaggaagcagcaggcgccccggcgcgcagcagcctatgtttccgaagagttaaaggctgctgccctggtggacgaaggtttagacccagaggagcatacggcagatggagagccctcggccaagtacatgtgcccggagaaggagctcgccagggcctgccccagctaccagaactccccggccgccgagttttcctgccatgaaatggacagcgagtcacacatcagtgagaccagtgaccgaatggctgactttgaaagcggctccatcaagaacgaagaggagaccaaggaggtcacggtcccactggaagacacgactgtgtcggatagcctggagcagatgaaggccgtgtacaacaacttcctctccaactcctactggtccaacctcaacctcaacctgcaccagccctcctcggagaagaacaacggcagcagcagcagcagcagtagcagcagcagcagctgtggcagcgggagcttcgactggcaccagagcgccatggctaagacgctgcagcaggtgtcacagagccgcatgctcccggagcccagcctcttcagcaccgtgcagctgtaccggcagagcagcaagctctatggctccatcttcacgggggccagcaagttccgctgtaaggactgcagcgctgcctacgacaccctggtggagttgacggtgcacatgaacgagacggggcattaccgcgacgacaaccatgagaccgataacaacaaccccaagcgctggtccaagcctcgcaaacgctccttgctggaaatggaagggaaggaagacgcccagaaggtgctgaagtgcatgtactgtggccactcctttgagtccctgcaggatttgagtgtccatatgatcaaaacaaaacactaccaaaaagtgcctctgaaggaacccgtcactcctgtcgccgccaaaatcatccctgccactcggaagaaagcttccctggagctggagctccccagctccccagattccacaggtggaacccccaaagccaccatctcagacaccaacgatgcacttcagaagaactccaacccttacatcacgccaaataatcggtacggccaccagaatggggccagctatgcatggcactttgaggcccggaagtcgcagatcctgaagtgcatggagtgtgggagctcgcatgacaccctgcaggagctcactgcccacatgatggtcactggccacttcatcaaggtcaccaactctgctatgaaaaaggggaagcccattgtggagacgcctgtcacacctaccatcacaaccctgctggatgagaaggtccagtccgtgcccctggcagccaccaccttcacgtccccctccaatacacctgccagcatctccccaaaactgaatgtggaggtcaagaaggaagtcgacaaggagaaagcggtcactgacgagaaacctaagcaaaaagacaagcctggcgaagaagaggagaagtgtgacatctcttccaaataccattacttgactgaaaatgacttagaagagagtcccaagggggggcttgatatcctcaaatccttggaaaacacagtgacatccgcaatcaacaaggcccagaacggcactcctagctgggggggctatcccagcatccatgccgcctaccaacttcccaacatgatgaagttgtccctgggctcgtcggggaagagcacgcccctgaaacccatgtttggcaacagtgagattgtctccccgacgaaaaaccagaccctggtctctccacccagcagccagacgtcccccatgcccaagacaaactttcatgccatggaggagctggtgaaaaaggtcactgagaaagttgccaaagtggaggagaagatgaaggagccggatgggaagctttccccgcccaagcgggccactccctccccatgtagcagcgaagtcggggaacccatcaagatggaggcatccagcgatgggggcttccgcagccaggagaacagccccagccccccgcgggatgggtgcaaggatgggagccccctcgctgagccggtggagaatggcaaggagctggtgaagcccctagccagcagtttgagtggcagcacggccatcatcaccgaccacccgcctgaacagccttttgttaaccctttgagcgccctgcagtcagtcatgaacattcacctgggcaaggccgccaagccctccctgcctgccctggaccccatgagcatgcttttcaagatgagcaacagcctggcggagaaggctgctgtggccaccccgccgcccctgcagtccaagaaggcagaccacctcgaccgctatttctaccacgtcaacaacgaccagcccatagacttgacaaaagggaagagtgacaaaggctgctccttgggttcagtgcttctgtcacccacgtccacagccccggcaacctcctcatccacggtgacaacggcaaagacatctgccgtcgtatcattcatgtcaaactcgccgctacgcgagaatgccttgtcagatatatccgatatgctgaagaacttgacagagagccacacgtcaaaatcctccactccttccagcatctccgagaagtctgacattgacggggccactctggaggaggctgaggagtcgacgcccgcccagaagaggaagggccgccagtcaaactggaacccccagcacctcctgatcctccaggcccagtttgccgccagcctccggcagacctcagaagggaagtacatcatgtcagacctgagcccccaggagcggatgcatatctccaggttcaccgggctgtccatgaccaccatcagccactggctggccaacgtgaaataccagcttcgaaggacaggtggaacaaagttcctcaaaaacttggacactggccaccccgtcttcttttgtaacgattgtgcgtcccaaatcaggactccttccacgtacatcagtcacctagagtcacacttaggcttccggctacgggacttatccaaactgtccaccgaacagattaacagtcagatagcacaaaccaagtcaccgtcagaaaaaatggtgacgtcctcccccgaggaagacctggggacttcctatcagtgcaaactttgcaatcggacctttgccagcaagcacgctgttaaacttcaccttagcaaaacacacgggaaatctccggaagaccaccttctgtatgtctctgagttagagaagcag

SEQ ID NO: 4151 - DNA, 3096 bp, Homo sapiens
  source 1..3096: mol_type = genomic DNA
atgtgcaatgaagagacggagatcaaagaggcgcagagctaccagaactccccagtcagctctgcgactaaccaggacgccggctacgggtcgcccttcagtgagagcagcgaccagctagcccatttcaaaggctcttcctctcgagaagagaaggaggatccgcagtgtcccgacagcgtctcgtacccccaggacagcctggcacagatcaaagctgtgtatgcaaacttgttctccgagtcctgctggtccagcttagctctggatttaaagaagtcgggttccaccaccagcaccaacgatgccagccagaaggagagctccgcccccacccccacaccccccacctgccccgtcagcaccactggccccaccacgagcacgcccagcaccagctgcagctccagcaccagccacagcagtaccaccagtaccagcagcagctccgggtacgactggcaccaggctgcactggccaagacgctgcagcagacgtcctcgtatgggctgcttcctgagcccagcctgttcagcaccgtgcagctctaccgccagaacaacaagctctacggctccgtcttcacgggcgccagcaagttccggtgcaaagactgcagtgccgcgtacgacacgctggtggaactgacggtgcacatgaacgagacaggccactaccgtgacgacaacagggacaaggactccgagaagaccaagaggtggtccaagcccaggaagcgctccctgatggagatggaggggaaggaggatgcccagaaggtgctgaagtgcatgtactgtggacactcctttgagtccttgcaggacctcagcgtccacatgatcaaaaccaagcattaccagaaagtgcctctgaaggagccagtgccagccatcaccaaactggtcccctccaccaaaaagcgggcgcttcaggacctggcgcccccctgctcccctgagccagcaggaatggccgcagaggtggccctgagtgagtcagccaaggatcagaaagcagcgaacccgtacgtcacgcccaataaccgctatggctaccagaatggcgccagctacacctggcagtttgaggcccgcaaggcgcagatcctcaagtgcatggagtgtggcagctcccacgacacgctgcagcagctcaccgcccacatgatggtcaccgggcacttcctgaaagtgaccacctcggcttctaagaagggcaagcagttggtgctggaccctgtggtggaagagaagatccagtccatcccactaccgcccaccacccacacgcggctgccggcctccagcatcaaaaagcagcccgactctcccgcggggtccacgacttctgaagaaaagaaagagccagagaaggagaagccgcctgtggctggcgacgcggagaagatcaaggaggagagtgaggacagcttggagaaatttgagcccagcaccctgtacccgtacctgcgtgaggaggacctggacgacagccccaagggagggctggacattctcaagtccctggagaataccgtctccacggccattagcaaagctcagaatggtgcgccctcatggggtggctaccccagcatccatgcagcctaccagctcccgggcaccgtgaagccactgccggcggccgtgcagagcgtgcaggtgcagccgtcctatgctggcggcgtgaagtcgctgtcttccgccgagcacaacgccctcctgcactccccagggagcctcacgcccccaccgcacaagagcaacgtgtctgccatggaggagctggtggagaaggtcacgggcaaggtcaacatcaagaaggaggagagaccccctgagaaggagaagagctccctggccaaggctgcgtcccccatagcaaaagagaataaagatttcccgaaaacggaggaagtcagcggcaaaccacagaagaagggccctgaggccgagactgggaaggccaaaaaggagggaccgctggacgttcacaccccaaatggcacagagcctctcaaagcaaaggtcaccaacggctgtaacaacctggggatcatcatggaccactcaccggagccttccttcatcaacccgctgagcgctttgcagtccatcatgaacacccacctgggcaaggtgtccaagcccgtgagtccctcgctggacccgctggcgatgctgtacaagatcagcaacagcatgctggacaagccggtgtaccccgccacccctgtgaagcaggccgatgccatcgaccgctactattatgaaaacagcgaccagcccattgacttaaccaagtccaagaacaagccgctggtgtccagcgtggctgattcggtggcatcacctctgcgggagagcgcactcatggacatctccgacatggtgaaaaacctcacaggccgcctgacgcccaagtcctccacgccctccacagtttcagagaagtccgatgctgatggcagcagctttgaggaggcgttggacgagctgtcaccggtccacaagaggaagggccggcagtccaactggaacccgcagcaccttctcatcctgcaggcccagttcgcctcgagcttgcgggagaccacagagggcaagtacatcatgtcggacttgggcccgcaggagagggtgcacatctcgaagtttactgggctctccatgaccaccatcagccactggctggccaatgtgaagtaccagttgaggaggacagggggaacgaaattcctaaagaacctggacacagggcatcctgttttcttttgcaacgattgtgcctctcagttcagaactgcttctacatacataagtcatttggagacacacttgggcttcagcctgaaggatctctccaagctgccactcaatcagattcaagaacagcagaatgtttcgaaagtcctcaccaacaaaactctgggcccactgggggccaccgaggaagacttgggctccacattccaatgtaagctctgcaaccggacttttgcgagcaagcacgcagtcaaactgcaccttagtaagacccacggcaagtctcccgaggaccacctgatctatgtgactgagttggagaaacag

SEQ ID NO: 4152 - DNA, 3231 bp, Homo sapiens
  source 1..3231: mol_type = genomic DNA
atgccgaggaggaagcagcaggccccccggcgctcggcagcttatgttcctgaggaagaattgaaggcagcagaaatagatgaagagcacgtggaggatgacgggctgtctttggacattcaggaaagtgagtacatgtgcaatgaagagacggagatcaaagaggcgcagagctaccagaactccccagtcagctctgcgactaaccaggacgccggctacgggtcgcccttcagtgagagcagcgaccagctagcccatttcaaaggctcttcctctcgagaagagaaggaggatccgcagtgtcccgacagcgtctcgtacccccaggacagcctggcacagatcaaagctgtgtatgcaaacttgttctccgagtcctgctggtccagcttagctctggatttaaagaagtcgggttccaccaccagcaccaacgatgccagccagaaggagagctccgcccccacccccacaccccccacctgccccgtcagcaccactggccccaccacgagcacgcccagcaccagctgcagctccagcaccagccacagcagtaccaccagtaccagcagcagctccgggtacgactggcaccaggctgcactggccaagacgctgcagcagacgtcctcgtatgggctgcttcctgagcccagcctgttcagcaccgtgcagctctaccgccagaacaacaagctctacggctccgtcttcacgggcgccagcaagttccggtgcaaagactgcagtgccgcgtacgacacgctggtggaactgacggtgcacatgaacgagacaggccactaccgtgacgacaacagggacaaggactccgagaagaccaagaggtggtccaagcccaggaagcgctccctgatggagatggaggggaaggaggatgcccagaaggtgctgaagtgcatgtactgtggacactcctttgagtccttgcaggacctcagcgtccacatgatcaaaaccaagcattaccagaaagtgcctctgaaggagccagtgccagccatcaccaaactggtcccctccaccaaaaagcgggcgcttcaggacctggcgcccccctgctcccctgagccagcaggaatggccgcagaggtggccctgagtgagtcagccaaggatcagaaagcagcgaacccgtacgtcacgcccaataaccgctatggctaccagaatggcgccagctacacctggcagtttgaggcccgcaaggcgcagatcctcaagtgcatggagtgtggcagctcccacgacacgctgcagcagctcaccgcccacatgatggtcaccgggcacttcctgaaagtgaccacctcggcttctaagaagggcaagcagttggtgctggaccctgtggtggaagagaagatccagtccatcccactaccgcccaccacccacacgcggctgccggcctccagcatcaaaaagcagcccgactctcccgcggggtccacgacttctgaagaaaagaaagagccagagaaggagaagccgcctgtggctggcgacgcggagaagatcaaggaggagagtgaggacagcttggagaaatttgagcccagcaccctgtacccgtacctgcgtgaggaggacctggacgacagccccaagggagggctggacattctcaagtccctggagaataccgtctccacggccattagcaaagctcagaatggtgcgccctcatggggtggctaccccagcatccatgcagcctaccagctcccgggcaccgtgaagccactgccggcggccgtgcagagcgtgcaggtgcagccgtcctatgctggcggcgtgaagtcgctgtcttccgccgagcacaacgccctcctgcactccccagggagcctcacgcccccaccgcacaagagcaacgtgtctgccatggaggagctggtggagaaggtcacgggcaaggtcaacatcaagaaggaggagagaccccctgagaaggagaagagctccctggccaaggctgcgtcccccatagcaaaagagaataaagatttcccgaaaacggaggaagtcagcggcaaaccacagaagaagggccctgaggccgagactgggaaggccaaaaaggagggaccgctggacgttcacaccccaaatggcacagagcctctcaaagcaaaggtcaccaacggctgtaacaacctggggatcatcatggaccactcaccggagccttccttcatcaacccgctgagcgctttgcagtccatcatgaacacccacctgggcaaggtgtccaagcccgtgagtccctcgctggacccgctggcgatgctgtacaagatcagcaacagcatgctggacaagccggtgtaccccgccacccctgtgaagcaggccgatgccatcgaccgctactattatgaaaacagcgaccagcccattgacttaaccaagtccaagaacaagccgctggtgtccagcgtggctgattcggtggcatcacctctgcgggagagcgcactcatggacatctccgacatggtgaaaaacctcacaggccgcctgacgcccaagtcctccacgccctccacagtttcagagaagtccgatgctgatggcagcagctttgaggaggcgttggacgagctgtcaccggtccacaagaggaagggccggcagtccaactggaacccgcagcaccttctcatcctgcaggcccagttcgcctcgagcttgcgggagaccacagagggcaagtacatcatgtcggacttgggcccgcaggagagggtgcacatctcgaagtttactgggctctccatgaccaccatcagccactggctggccaatgtgaagtaccagttgaggaggacagggggaacgaaattcctaaagaacctggacacagggcatcctgttttcttttgcaacgattgtgcctctcagttcagaactgcttctacatacataagtcatttggagacacacttgggcttcagcctgaaggatctctccaagctgccactcaatcagattcaagaacagcagaatgtttcgaaagtcctcaccaacaaaactctgggcccactgggggccaccgaggaagacttgggctccacattccaatgtaagctctgcaaccggacttttgcgagcaagcacgcagtcaaactgcaccttagtaagacccacggcaagtctcccgaggaccacctgatctatgtgactgagttggagaaacag

SEQ ID NO: 4153 - DNA, 885 bp, Homo sapiens
  source 1..885: mol_type = genomic DNA
atggatttagagaaaaattatccgactcctcggaccagcaggacaggacatggaggagtgaatcagcttgggggggtttttgtgaatggacggccactcccggatgtagtccgccagaggatagtggaacttgctcatcaaggtgtcaggccctgcgacatctccaggcagcttcgggtcagccatggttgtgtcagcaaaattcttggcaggtattatgagacaggaagcatcaagcctggggtaattggaggatccaaaccaaaggtcgccacacccaaagtggtggaaaaaatcgctgaatataaacgccaaaatcccaccatgtttgcctgggagatcagggaccggctgctggcagagcgggtgtgtgacaatgacaccgtgcctagcgtcagttccatcaacaggatcatccggacaaaagtacagcagccacccaaccaaccagtcccagcttccagtcacagcatagtgtccactggctccgtgacgcaggtgtcctcggtgagcacggattcggccggctcgtcgtactccatcagcggcatcctgggcatcacgtcccccagcgccgacaccaacaagcgcaagagagacgaaggtattcaggagtctccggtgccgaacggccactcgcttccgggcagagacttcctccggaagcagatgcggggagacttgttcacacagcagcagctggaggtgctggaccgcgtgtttgagaggcagcactactcagacatcttcaccaccacagagcccatcaagcccgagcaggctccccctactattatagcgctgccgcccgaggagccgccccacctgcagccgccactgcctatgaccgtcactgacccttggagccaggcgggcaccaaacac

SEQ ID NO: 4154 - DNA, 957 bp, Homo sapiens
  source 1..957: mol_type = genomic DNA
atggatttagagaaaaattatccgactcctcggaccagcaggacaggacatggaggagtgaatcagcttgggggggtttttgtgaatggacggccactcccggatgtagtccgccagaggatagtggaacttgctcatcaaggtgtcaggccctgcgacatctccaggcagcttcgggtcagccatggttgtgtcagcaaaattcttggcaggtattatgagacaggaagcatcaagcctggggtaattggaggatccaaaccaaaggtcgccacacccaaagtggtggaaaaaatcgctgaatataaacgccaaaatcccaccatgtttgcctgggagatcagggaccggctgctggcagagcgggtgtgtgacaatgacaccgtgcctagcgtcagttccatcaacaggatcatccggacaaaagtacagcagccacccaaccaaccagtcccagcttccagtcacagcataggtattcaggagtctccggtgccgaacggccactcgcttccgggcagagacttcctccggaagcagatgcggggagacttgttcacacagcagcagctggaggtgctggaccgcgtgtttgagaggcagcactactcagacatcttcaccaccacagagcccatcaagcccgagcagaccacagagtattcagccatggcctcgctggctggtgggctggacgacatgaaggccaatctggccagccccacccctgctgacatcgggagcagtgtgccaggcccgcagtcctaccccattgtgacaggccgtgacttggcgagcacgaccctccccgggtaccctccacacgtcccccccgctggacagggcagctactcagcaccgacgctgacagggatggtgcctggctccccctactattatagcgctgccgcccgaggagccgccccacctgcagccgccactgcctatgaccgtcac

SEQ ID NO: 4155 - DNA, 1086 bp, Homo sapiens
  source 1..1086: mol_type = genomic DNA
atggatttagagaaaaattatccgactcctcggaccagcaggacaggacatggaggagtgaatcagcttgggggggtttttgtgaatggacggccactcccggatgtagtccgccagaggatagtggaacttgctcatcaaggtgtcaggccctgcgacatctccaggcagcttcgggtcagccatggttgtgtcagcaaaattcttggcaggtattatgagacaggaagcatcaagcctggggtaattggaggatccaaaccaaaggtcgccacacccaaagtggtggaaaaaatcgctgaatataaacgccaaaatcccaccatgtttgcctgggagatcagggaccggctgctggcagagcgggtgtgtgacaatgacaccgtgcctagcgtcagttccatcaacaggatcatccggacaaaagtacagcagccacccaaccaaccagtcccagcttccagtcacagcatagtgtccactggctccgtgacgcaggtgtcctcggtgagcacggattcggccggctcgtcgtactccatcagcggcatcctgggcatcacgtcccccagcgccgacaccaacaagcgcaagagagacgaaggtattcaggagtctccggtgccgaacggccactcgcttccgggcagagacttcctccggaagcagatgcggggagacttgttcacacagcagcagctggaggtgctggaccgcgtgtttgagaggcagcactactcagacatcttcaccaccacagagcccatcaagcccgagcagaccacagagtattcagccatggcctcgctggctggtgggctggacgacatgaaggccaatctggccagccccacccctgctgacatcgggagcagtgtgccaggcccgcagtcctaccccattgtgacaggccgtgacttggcgagcacgaccctccccgggtaccctccacacgtcccccccgctggacagggcagctactcagcaccgacgctgacagggatggtgcctggctccccctactattatagcgctgccgcccgaggagccgccccacctgcagccgccactgcctatgaccgtcac

SEQ ID NO: 4156 - DNA, 972 bp, Homo sapiens
  source 1..972: mol_type = genomic DNA
atggatttagagaaaaattatccgactcctcggaccagcaggacaggacatggaggagtgaatcagcttgggggggtttttgtgaatggacggccactcccggatgtagtccgccagaggatagtggaacttgctcatcaaggtgtcaggccctgcgacatctccaggcagcttcgggtcagccatggttgtgtcagcaaaattcttggcaggtattatgagacaggaagcatcaagcctggggtaattggaggatccaaaccaaaggtcgccacacccaaagtggtggaaaaaatcgctgaatataaacgccaaaatcccaccatgtttgcctgggagatcagggaccggctgctggcagagcgggtgtgtgacaatgacaccgtgcctagcgtcagttccatcaacaggatcatccggacaaaagtacagcagccacccaaccaaccagtcccagcttccagtcacagcatagtgtccactggctccgtgacgcaggtgtcctcggtgagcacggattcggccggctcgtcgtactccatcagcggcatcctgggcatcacgtcccccagcgccgacaccaacaagcgcaagagagacgaaggtattcaggagtctccggtgccgaacggccactcgcttccgggcagagacttcctccggaagcagatgcggggagacttgttcacacagcagcagctggaggtgctggaccgcgtgtttgagaggcagcactactcagacatcttcaccaccacagagcccatcaagcccgagcagggagtgagttttccgggagtccctacagccaccctcagtattcctcgtacaacgactcctggaggttccccaacccggggctgcttggctccccctactattatagcgctgccgcccgaggagccgccccacctgcagccgccactgcctatgaccgtcactgacccttggagccaggcgggcaccaaacac

SEQ ID NO: 4157 - DNA, 1173 bp, Homo sapiens
  source 1..1173: mol_type = genomic DNA
atggatttagagaaaaattatccgactcctcggaccagcaggacaggacatggaggagtgaatcagcttgggggggtttttgtgaatggacggccactcccggatgtagtccgccagaggatagtggaacttgctcatcaaggtgtcaggccctgcgacatctccaggcagcttcgggtcagccatggttgtgtcagcaaaattcttggcaggtattatgagacaggaagcatcaagcctggggtaattggaggatccaaaccaaaggtcgccacacccaaagtggtggaaaaaatcgctgaatataaacgccaaaatcccaccatgtttgcctgggagatcagggaccggctgctggcagagcgggtgtgtgacaatgacaccgtgcctagcgtcagttccatcaacaggatcatccggacaaaagtacagcagccacccaaccaaccagtcccagcttccagtcacagcatagtgtccactggctccgtgacgcaggtgtcctcggtgagcacggattcggccggctcgtcgtactccatcagcggcatcctgggcatcacgtcccccagcgccgacaccaacaagcgcaagagagacgaaggtattcaggagtctccggtgccgaacggccactcgcttccgggcagagacttcctccggaagcagatgcggggagacttgttcacacagcagcagctggaggtgctggaccgcgtgtttgagaggcagcactactcagacatcttcaccaccacagagcccatcaagcccgagcagaccacagagtattcagccatggcctcgctggctggtgggctggacgacatgaaggccaatctggccagccccacccctgctgacatcgggagcagtgtgccaggcccgcagtcctaccccattgtgacaggccgtgacttggcgagcacgaccctccccgggtaccctccacacgtcccccccgctggacagggcagctactcagcaccgacgctgacagggatggtgcctgggagtgagttttccgggagtccctacagccaccctcagtattcctcgtacaacgactcctggaggttccccaacccggggctgcttggctccccctactattatagcgctgccgcccgaggagccgccccacctgcagccgccactgcctatgaccgtcac

SEQ ID NO: 4158 - DNA, 1071 bp, Homo sapiens
  source 1..1071: mol_type = genomic DNA
atggatttagagaaaaattatccgactcctcggaccagcaggacaggacatggaggagtgaatcagcttgggggggtttttgtgaatggacggccactcccggatgtagtccgccagaggatagtggaacttgctcatcaaggtgtcaggccctgcgacatctccaggcagcttcgggtcagccatggttgtgtcagcaaaattcttggcaggtattatgagacaggaagcatcaagcctggggtaattggaggatccaaaccaaaggtcgccacacccaaagtggtggaaaaaatcgctgaatataaacgccaaaatcccaccatgtttgcctgggagatcagggaccggctgctggcagagcgggtgtgtgacaatgacaccgtgcctagcgtcagttccatcaacaggatcatccggacaaaagtacagcagccacccaaccaaccagtcccagcttccagtcacagcatagtgtccactggctccgtgacgcaggtgtcctcggtgagcacggattcggccggctcgtcgtactccatcagcggcatcctgggcatcacgtcccccagcgccgacaccaacaagcgcaagagagacgaaggtattcaggagtctccggtgccgaacggccactcgcttccgggcagagacttcctccggaagcagatgcggggagacttgttcacacagcagcagctggaggtgctggaccgcgtgtttgagaggcagcactactcagacatcttcaccaccacagagcccatcaagcccgagcagaccacagagtattcagccatggcctcgctggctggtgggctggacgacatgaaggccaatctggccagccccacccctgctgacatcgggagcagtgtgccaggcccgcagtcctaccccattgtgacagggagtgagttttccgggagtccctacagccaccctcagtattcctcgtacaacgactcctggaggttccccaacccggggctgcttggctccccctactattatagcgctgccgcccgaggagccgccccacctgcagccgccactgcctatgaccgtcac

SEQ ID NO: 4159 - DNA, 1044 bp, Homo sapiens
  source 1..1044: mol_type = genomic DNA
atggatttagagaaaaattatccgactcctcggaccagcaggacaggacatggaggagtgaatcagcttgggggggtttttgtgaatggacggccactcccggatgtagtccgccagaggatagtggaacttgctcatcaaggtgtcaggccctgcgacatctccaggcagcttcgggtcagccatggttgtgtcagcaaaattcttggcaggtattatgagacaggaagcatcaagcctggggtaattggaggatccaaaccaaaggtcgccacacccaaagtggtggaaaaaatcgctgaatataaacgccaaaatcccaccatgtttgcctgggagatcagggaccggctgctggcagagcgggtgtgtgacaatgacaccgtgcctagcgtcagttccatcaacaggatcatccggacaaaagtacagcagccacccaaccaaccagtcccagcttccagtcacagcataggtattcaggagtctccggtgccgaacggccactcgcttccgggcagagacttcctccggaagcagatgcggggagacttgttcacacagcagcagctggaggtgctggaccgcgtgtttgagaggcagcactactcagacatcttcaccaccacagagcccatcaagcccgagcagaccacagagtattcagccatggcctcgctggctggtgggctggacgacatgaaggccaatctggccagccccacccctgctgacatcgggagcagtgtgccaggcccgcagtcctaccccattgtgacaggccgtgacttggcgagcacgaccctccccgggtaccctccacacgtcccccccgctggacagggcagctactcagcaccgacgctgacagggatggtgcctgggagtgagttttccgggagtccctacagccaccctcagtattcctcgtacaacgactcctggaggttccccaacccggggctgcttggctccccctactattatagcgctgccgcccgaggagccgccccacctgcagccgccactgcctatgaccgtcac

SEQ ID NO: 4160 - DNA, 873 bp, Homo sapiens
  source 1..873: mol_type = genomic DNA
atggatttagagaaaaattatccgactcctcggaccagcaggacaggacatggaggagtgaatcagcttgggggggtttttgtgaatggacggccactcccggatgtagtccgccagaggatagtggaacttgctcatcaaggtgtcaggccctgcgacatctccaggcagcttcgggtcagccatggttgtgtcagcaaaattcttggcaggatcatccggacaaaagtacagcagccacccaaccaaccagtcccagcttccagtcacagcatagtgtccactggctccgtgacgcaggtgtcctcggtgagcacggattcggccggctcgtcgtactccatcagcggcatcctgggcatcacgtcccccagcgccgacaccaacaagcgcaagagagacgaaggtattcaggagtctccggtgccgaacggccactcgcttccgggcagagacttcctccggaagcagatgcggggagacttgttcacacagcagcagctggaggtgctggaccgcgtgtttgagaggcagcactactcagacatcttcaccaccacagagcccatcaagcccgagcagaccacagagtattcagccatggcctcgctggctggtgggctggacgacatgaaggccaatctggccagccccacccctgctgacatcgggagcagtgtgccaggcccgcagtcctaccccattgtgacagggagtgagttttccgggagtccctacagccaccctcagtattcctcgtacaacgactcctggaggttccccaacccggggctgcttggctccccctactattatagcgctgccgcccgaggagccgccccacctgcagccgccactgcctatgaccgtcac

SEQ ID NO: 4161 - DNA, 849 bp, Homo sapiens
  source 1..849: mol_type = genomic DNA
atgtttgcctgggagatcagggaccggctgctggcagagcgggtgtgtgacaatgacaccgtgcctagcgtcagttccatcaacaggatcatccggacaaaagtacagcagccacccaaccaaccagtcccagcttccagtcacagcatagtgtccactggctccgtgacgcaggtgtcctcggtgagcacggattcggccggctcgtcgtactccatcagcggcatcctgggcatcacgtcccccagcgccgacaccaacaagcgcaagagagacgaaggtattcaggagtctccggtgccgaacggccactcgcttccgggcagagacttcctccggaagcagatgcggggagacttgttcacacagcagcagctggaggtgctggaccgcgtgtttgagaggcagcactactcagacatcttcaccaccacagagcccatcaagcccgagcagaccacagagtattcagccatggcctcgctggctggtgggctggacgacatgaaggccaatctggccagccccacccctgctgacatcgggagcagtgtgccaggcccgcagtcctaccccattgtgacaggccgtgacttggcgagcacgaccctccccgggtaccctccacacgtcccccccgctggacagggcagctactcagcaccgacgctgacagggatggtgcctgggagtgagttttccgggagtccctacagccaccctcagtattcctcgtacaacgactcctggaggttccccaacccggggctgcttggctccccctactattatagcgctgccgcccgaggagccgccccacctgcagccgccactgcctatgaccgtcac

SEQ ID NO: 4162 - DNA, 660 bp, Homo sapiens
  source 1..660: mol_type = genomic DNA
atgtttgcctgggagatcagggaccggctgctggcagagcgggtgtgtgacaatgacaccgtgcctagcgtcagttccatcaacaggatcatccggacaaaagtacagcagccacccaaccaaccagtcccagcttccagtcacagcatagtgtccactggctccgtgacgcaggtgtcctcggtgagcacggattcggccggctcgtcgtactccatcagcggcatcctgggcatcacgtcccccagcgccgacaccaacaagcgcaagagagacgaaggtattcaggagtctccggtgccgaacggccactcgcttccgggcagagacttcctccggaagcagatgcggggagacttgttcacacagcagcagctggaggtgctggaccgcgtgtttgagaggcagcactactcagacatcttcaccaccacagagcccatcaagcccgagcagaccacagagtattcagccatggcctcgctggctggtgggctggacgacatgaaggccaatctggccagccccacccctgctgacatcgggagcagtgtgccaggcccgcagtcctaccccattgtgacaggctccccctactattatagcgctgccgcccgaggagccgccccacctgcagccgccactgcctatgaccgtcac

SEQ ID NO: 4163 - DNA, 984 bp, Homo sapiens
  source 1..984: mol_type = genomic DNA
atggatttagagaaaaattatccgactcctcggaccagcaggacaggacatggaggagtgaatcagcttgggggggtttttgtgaatggacggccactcccggatgtagtccgccagaggatagtggaacttgctcatcaaggtgtcaggccctgcgacatctccaggcagcttcgggtcagccatggttgtgtcagcaaaattcttggcaggtattatgagacaggaagcatcaagcctggggtaattggaggatccaaaccaaaggtcgccacacccaaagtggtggaaaaaatcgctgaatataaacgccaaaatcccaccatgtttgcctgggagatcagggaccggctgctggcagagcgggtgtgtgacaatgacaccgtgcctagcgtcagttccatcaacaggatcatccggacaaaagtacagcagccacccaaccaaccagtcccagcttccagtcacagcatagtgtccactggctccgtgacgcaggtgtcctcggtgagcacggattcggccggctcgtcgtactccatcagcggcatcctgggcatcacgtcccccagcgccgacaccaacaagcgcaagagagacgaaggtattcaggagtctccggtgccgaacggccactcgcttccgggcagagacttcctccggaagcagatgcggggagacttgttcacacagcagcagctggaggtgctggaccgcgtgtttgagaggcagcactactcagacatcttcaccaccacagagcccatcaagcccgagcagaccacagagtattcagccatggcctcgctggctggtgggctggacgacatgaaggccaatctggccagccccacccctgctgacatcgggagcagtgtgccaggcccgcagtcctaccccattgtgacaggctccccctactattatagcgctgccgcccgaggagccgccccacctgcagccgccactgcctatgaccgtcac

SEQ ID NO: 4164 - DNA, 1053 bp, Homo sapiens
  source 1..1053: mol_type = genomic DNA
atgcatcaggacgggatcagcagcatgaaccagcttggggggctctttgtgaatggccggcccctgcctctggatacccggcagcagattgtgcggctagcagtcagtggaatgcggccctgtgacatctcacggatccttaaggtatctaatggctgtgtgagcaagatcctagggcgttactaccgcacaggtgtcttggagccaaagggcattgggggaagcaagccacggctggctacaccccctgtggtggctcgaattgcccagctgaagggtgagtgtccagccctctttgcctgggaaatccaacgccagctttgtgctgaagggctttgcacccaggacaagactcccagtgtctcctccatcaaccgagtcctgcgggcattacaggaggaccagggactaccgtgcacacggctcaggtcaccagctgttttggctccagctgtcctcactccccatagtggctctgagactccccggggtacccacccagggaccggccaccggaatcggactatcttctccccaagccaagcagaggcactggagaaagagttccagcgtgggcagtatcctgattcagtggcccgtggaaagctggctactgccacctctctgcctgaggacacggtgagggtctggttttccaacagaagagccaaatggcgtcggcaagagaagctcaagtgggaaatgcagctgccaggtgcttcccaggggctgactgtaccaagggttgccccaggaatcatctctgcacagcagtcccctggcagtgtgcccacagcagccctgcctgccctggaaccactgggtccctcctgctatcagctgtgctgggcaacagcaccagaaaggtgtctgagtgacaccccacctaaagcctgtctcaagccctgctggggccacttgcccccacagccgaattccctggactcaggactgctttgccttccttgcccttcctcccactgtcacctggccagtcttagtggctctcaggccctgctctggcctggctgcccactactgtatggcttggaa

SEQ ID NO: 4165 - DNA, 1029 bp, Homo sapiens
  source 1..1029: mol_type = genomic DNA
atgaaccagcttggggggctctttgtgaatggccggcccctgcctctggatacccggcagcagattgtgcggctagcagtcagtggaatgcggccctgtgacatctcacggatccttaaggtatctaatggctgtgtgagcaagatcctagggcgttactaccgcacaggtgtcttggagccaaagggcattgggggaagcaagccacggctggctacaccccctgtggtggctcgaattgcccagctgaagggtgagtgtccagccctctttgcctgggaaatccaacgccagctttgtgctgaagggctttgcacccaggacaagactcccagtgtctcctccatcaaccgagtcctgcgggcattacaggaggaccagggactaccgtgcacacggctcaggtcaccagctgttttggctccagctgtcctcactccccatagtggctctgagactccccggggtacccacccagggaccggccaccggaatcggactatcttctccccaagccaagcagaggcactggagaaagagttccagcgtgggcagtatcctgattcagtggcccgtggaaagctggctactgccacctctctgcctgaggacacggtgagggtctggttttccaacagaagagccaaatggcgtcggcaagagaagctcaagtgggaaatgcagctgccaggtgcttcccaggggctgactgtaccaagggttgccccaggaatcatctctgcacagcagtcccctggcagtgtgcccacagcagccctgcctgccctggaaccactgggtccctcctgctatcagctgtgctgggcaacagcaccagaaaggtgtctgagtgacaccccacctaaagcctgtctcaagccctgctggggccacttgcccccacagccgaattccctggactcaggactgctttgccttccttgcccttcctcccactgtcacctggccagtcttagtggctctcaggccctgctctggcctggctgcccactactgtatggcttggaa

SEQ ID NO: 4166 - DNA, 1515 bp, Homo sapiens
  source 1..1515: mol_type = genomic DNA
atggcggcccttcccggcacggtaccgagaatgatgcggccggctccggggcagaactacccccgcacgggattccctttggaagtgtccaccccgcttggccaaggccgggtcaatcagctgggaggggtcttcatcaatgggcgacccctgcctaaccacatccgccacaagatagtggagatggcccaccatggcatccggccctgtgtcatctcccgacagctgcgtgtctcccacggctgcgtctccaagattctttgccgctaccaggagaccgggtccatccggcctggggccatcggcggcagcaagcccagacaggtggcgactccggatgtagagaaaaagattgaggagtacaagagggaaaacccaggcatgttcagctgggagatccgggacaggctgctgaaggatgggcactgtgaccgaagcactgtgccctcaggtttagtgagttcgattagccgcgtgctcagaatcaagttcgggaagaaagaggaggaggatgaagcggacaagaaggaggacgacggcgaaaagaaggccaaacacagcatcgacggcatcctgggcgacaaagggaaccggctggacgagggctcggatgtggagtcggaacctgacctcccactgaagcgcaagcagcgacgcagtcggaccacattcacggccgagcagctggaggagctggagaaggcctttgagaggacccactacccagacatatacacccgcgaggagctggcgcagaggaccaagctgacagaggcgcgtgtgcaggtctggttcagtaaccgccgcgcccgttggcgtaagcaggcaggagccaaccagctggcggcgttcaaccaccttctgccaggaggcttcccacccaccggcatgcccacgctgcccccctaccagctgccggactccacctaccccaccaccaccatctcccaagatgggggcagcactgtgcaccggcctcagcccctgccaccgtccaccatgcaccagggcgggctggctgcagcggctgcagccgccgacaccagctctgcctacggagcccgccacagcttctccagctactctgacagcttcatgaatccggcggcgccctccaaccacatgaacccggtcagcaacggcctgtctcctcaggtgatgagcatcttgggcaaccccagtgcggtgcccccgcagccacaggctgacttctccatctccccgctgcatggcggcctggactcggccacctccatctcagccagctgcagccagcgggccgactccatcaagccaggagacagcctgcccacctcccaggcctactgcccacccacctacagcaccaccggctacagcgtggaccccgtggccggctatcagtacggccagtacggccagactgctgttgattatctggccaaaaatgtgagcctctccacccagcgtcgcatgaagctcggggagcactctgctgtgctgggactcctgcctgtggaaactggccaggcctac

SEQ ID NO: 4167 - DNA, 1560 bp, Homo sapiens
  source 1..1560: mol_type = genomic DNA
atggcggcccttcccggcacggtaccgagaatgatgcggccggctccggggcagaactacccccgcacgggattccctttggaagtgtccaccccgcttggccaaggccgggtcaatcagctgggaggggtcttcatcaatgggcgacccctgcctaaccacatccgccacaagatagtggagatggcccaccatggcatccggccctgtgtcatctcccgacagctgcgtgtctcccacggctgcgtctccaagattctttgccgctaccaggagaccgggtccatccggcctggggccatcggcggcagcaagcccagacaggtggcgactccggatgtagagaaaaagattgaggagtacaagagggaaaacccaggcatgttcagctgggagatccgggacaggctgctgaaggatgggcactgtgaccgaagcactgtgccctcaggtttagtgagttcgattagccgcgtgctcagaatcaagttcgggaagaaagaggaggaggatgaagcggacaagaaggaggacgacggcgaaaagaaggccaaacacagcatcgacggcatcctgggcgacaaagggaaccggctggacgagggctcggatgtggagtcggaacctgacctcccactgaagcgcaagcagcgacgcagtcggaccacattcacggccgagcagctggaggagctggagaaggcctttgagaggacccactacccagacatatacacccgcgaggagctggcgcagaggaccaagctgacagaggcgcgtgtgcaggtctggttcagtaaccgccgcgcccgttggcgtaagcaggcaggagccaaccagctggcggcgttcaaccaccttctgccaggaggcttcccacccaccggcatgcccacgctgcccccctaccagctgccggactccacctaccccaccaccaccatctcccaagatgggggcagcactgtgcaccggcctcagcccctgccaccgtccaccatgcaccagggcgggctggctgcagcggctgcagccgccgacaccagctctgcctacggagcccgccacagcttctccagctactctgacagcttcatgaatccggcggcgccctccaaccacatgaacccggtcagcaacggcctgtctcctcaggtgatgagcatcttgggcaaccccagtgcggtgcccccgcagccacaggctgacttctccatctccccgctgcatggcggcctggactcggccacctccatctcagccagctgcagccagcgggccgactccatcaagccaggagacagcctgcccacctcccaggcctactgcccacccacctacagcaccaccggctacagcgtggaccccgtggccggctatcagtacggccagtacggccagagtgagtgcctggtgccctgggcgtcccccgtccccattccttctcccacccccagggcctcctgcttgtttatggagagctacaaggtggtgtcagggtggggaatgtccatttcacagatggaaaaattgaagtccagccagatggaacagttcacc

SEQ ID NO: 4168 - DNA, 1308 bp, Homo sapiens
  source 1..1308: mol_type = genomic DNA
atgcagaacagtcacagcggagtgaatcagctcggtggtgtctttgtcaacgggcggccactgccggactccacccggcagaagattgtagagctagctcacagcggggcccggccgtgcgacatttcccgaattctgcagacccatgcagatgcaaaagtccaagtgctggacaatcaaaacgtgtccaacggatgtgtgagtaaaattctgggcaggtattacgagactggctccatcagacccagggcaatcggtggtagtaaaccgagagtagcgactccagaagttgtaagcaaaatagcccagtataagcgggagtgcccgtccatctttgcttgggaaatccgagacagattactgtccgagggggtctgtaccaacgataacataccaagcgtgtcatcaataaacagagttcttcgcaacctggctagcgaaaagcaacagatgggcgcagacggcatgtatgataaactaaggatgttgaacgggcagaccggaagctggggcacccgccctggttggtatccggggacttcggtgccagggcaacctacgcaagatggctgccagcaacaggaaggagggggagagaataccaactccatcagttccaacggagaagattcagatgaggctcaaatgcgacttcagctgaagcggaagctgcaaagaaatagaacatcctttacccaagagcaaattgaggccctggagaaagagtttgagagaacccattatccagatgtgtttgcccgagaaagactagcagccaaaatagatctacctgaagcaagaatacaggtatggttttctaatcgaagggccaaatggagaagagaagaaaaactgaggaatcagagaagacaggccagcaacacacctagtcatattcctatcagcagtagtttcagcaccagtgtctaccaaccaattccacaacccaccacaccggtttcctccttcacatctggctccatgttgggccgaacagacacagccctcacaaacacctacagcgctctgccgcctatgcccagcttcaccatggcaaataacctgcctatgcaacccccagtccccagccagacctcctcatactcctgcatgctgcccaccagcccttcggtgaatgggcggagttatgatacctacacccccccacatatgcagacacacatgaacagtcagccaatgggcacctcgggcaccacttcaacaggactcatttcccctggtgtgtcagttccagttcaagttcccggaagtgaacctgatatgtctcaatactggccaagattacag

SEQ ID NO: 4169 - DNA, 858 bp, Homo sapiens
  source 1..858: mol_type = genomic DNA
atgggcgcagacggcatgtatgataaactaaggatgttgaacgggcagaccggaagctggggcacccgccctggttggtatccggggacttcggtgccagggcaacctacgcaagatggctgccagcaacaggaaggagggggagagaataccaactccatcagttccaacggagaagattcagatgaggctcaaatgcgacttcagctgaagcggaagctgcaaagaaatagaacatcctttacccaagagcaaattgaggccctggagaaagagtttgagagaacccattatccagatgtgtttgcccgagaaagactagcagccaaaatagatctacctgaagcaagaatacaggtatggttttctaatcgaagggccaaatggagaagagaagaaaaactgaggaatcagagaagacaggccagcaacacacctagtcatattcctatcagcagtagtttcagcaccagtgtctaccaaccaattccacaacccaccacaccggtttcctccttcacatctggctccatgttgggccgaacagacacagccctcacaaacacctacagcgctctgccgcctatgcccagcttcaccatggcaaataacctgcctatgcaacccccagtccccagccagacctcctcatactcctgcatgctgcccaccagcccttcggtgaatgggcggagttatgatacctacacccccccacatatgcagacacacatgaacagtcagccaatgggcacctcgggcaccacttcaacaggactcatttcccctggtgtgtcagttccagttcaagttcccggaagtgaacctgatatgtctcaatactggccaagattacag

SEQ ID NO: 4170 - DNA, 1203 bp, Homo sapiens
  source 1..1203: mol_type = genomic DNA
atgcagaacagtcacagcggagtgaatcagctcggtggtgtctttgtcaacgggcggccactgccggactccacccggcagaagattgtagagctagctcacagcggggcccggccgtgcgacatttcccgaattctgcaggtgtccaacggatgtgtgagtaaaattctgggcaggtattacgagactggctccatcagacccagggcaatcggtggtagtaaaccgagagtagcgactccagaagttgtaagcaaaatagcccagtataagcgggagtgcccgtccatctttgcttgggaaatccgagacagattactgtccgagggggtctgtaccaacgataacataccaagcgtgtcatcaataaacagagttcttcgcaacctggctagcgaaaagcaacagatgggcgcagacggcatgtatgataaactaaggatgttgaacgggcagaccggaagctggggcacccgccctggttggtatccggggacttcggtgccagggcaacctacgcaagatggctgccagcaacaggaaggagggggagagaataccaactccatcagttccaacggagaagattcagatgaggctcaaatgcgacttcagctgaagcggaagctgcaaagaaatagaacatcctttacccaagagcaaattgaggccctggagaaagagtttgagagaacccattatccagatgtgtttgcccgagaaagactagcagccaaaatagatctacctgaagcaagaatacaggtatggttttctaatcgaagggccaaatggagaagagaagaaaaactgaggaatcagagaagacaggccagcaacacacctagtcatattcctatcagcagtagtttcagcaccagtgtctaccaaccaattccacaacccaccacaccggtttcctccttcacatctggctccatgttgggccgaacagacacagccctcacaaacacctacagcgctctgccgcctatgcccagcttcaccatggcaaataacctgcctatgcaagtaagtgcggctggtggtggcctgcataacccaggccccagagaagtgaggagtggctcagggcctgcggacctcattggctgtgtctgcacccttgagagcttttcgcactacagtgattggcttgaccagtcaagtcggagacagtcaatcccatcacttttaagtgat

SEQ ID NO: 4171 - DNA, 1266 bp, Homo sapiens
  source 1..1266: mol_type = genomic DNA
atgcagaacagtcacagcggagtgaatcagctcggtggtgtctttgtcaacgggcggccactgccggactccacccggcagaagattgtagagctagctcacagcggggcccggccgtgcgacatttcccgaattctgcaggtgtccaacggatgtgtgagtaaaattctgggcaggtattacgagactggctccatcagacccagggcaatcggtggtagtaaaccgagagtagcgactccagaagttgtaagcaaaatagcccagtataagcgggagtgcccgtccatctttgcttgggaaatccgagacagattactgtccgagggggtctgtaccaacgataacataccaagcgtgtcatcaataaacagagttcttcgcaacctggctagcgaaaagcaacagatgggcgcagacggcatgtatgataaactaaggatgttgaacgggcagaccggaagctggggcacccgccctggttggtatccggggacttcggtgccagggcaacctacgcaagatggctgccagcaacaggaaggagggggagagaataccaactccatcagttccaacggagaagattcagatgaggctcaaatgcgacttcagctgaagcggaagctgcaaagaaatagaacatcctttacccaagagcaaattgaggccctggagaaagagtttgagagaacccattatccagatgtgtttgcccgagaaagactagcagccaaaatagatctacctgaagcaagaatacaggtatggttttctaatcgaagggccaaatggagaagagaagaaaaactgaggaatcagagaagacaggccagcaacacacctagtcatattcctatcagcagtagtttcagcaccagtgtctaccaaccaattccacaacccaccacaccggtttcctccttcacatctggctccatgttgggccgaacagacacagccctcacaaacacctacagcgctctgccgcctatgcccagcttcaccatggcaaataacctgcctatgcaacccccagtccccagccagacctcctcatactcctgcatgctgcccaccagcccttcggtgaatgggcggagttatgatacctacacccccccacatatgcagacacacatgaacagtcagccaatgggcacctcgggcaccacttcaacaggactcatttcccctggtgtgtcagttccagttcaagttcccggaagtgaacctgatatgtctcaatactggccaagattacag

SEQ ID NO: 4172 - DNA, 1602 bp, Homo sapiens
  source 1..1602: mol_type = genomic DNA
atgaagttcaccctgggcctggggtcgcgggcgtggagagtgtcctgggagggggcagcagcggcggcggcaggccctggagcgggcggcagcgcgctccgctgccgcgcacagcgcgtctccagcccgcggctgggccgccgcggctctcggctctcgggcgccctccctctatgcctctcacgcggcggcggcggcgcccaagctctcccggactgcgccgggcccagccccggccaccccggccaccccggcgccaggcagctggccggcccgctcgctatggagcagacgtatggcgaggtgaaccagctgggcggtgtgttcgtcaacggccgccccctgcccaacgccatccgcttgcgcattgtggagctggcgcagctgggcatccgaccctgtgacatcagtcggcagctccgcgtatcccacggctgcgtgagcaagatcctggcgcgctacaacgagaccggctccattctgcccggggccatcggggggagcaagccccgcgtcaccactcccaacgtggtcaagcacatccgggactacaagcaaggagaccctggcatctttgcctgggagatccgcgaccggctgctggccgacggcgtctgtgacaagtacaatgtgccttcggtgagctccatcagccgcatcctgcgcaacaagatcggcagcctggcgcagcccggaccgtacgaggcaagtaagcagccgccgtcgcagcctacgctgccctacaaccacatctaccagtacccctaccccagtcccgtgtcgcccacgggcgccaagatgggcagccaccccggggtcccgggcacggcgggccacgtcagcatcccgcgctcatggccctcggcacactcggtcagcaacatcctgggcatccggacgtttatggagcaaacaggggccctggctgggagcgaaggcaccgcttactctcccaagatggaagactgggccggcgtgaaccgcacggccttccccgccacccccgcagtgaatgggctagagaaacctgccttagaggcagacattaaatacactcagtcggcctccaccctctctgccgtgggcggctttctccccgcctgcgcctacccggcctccaaccagcacggcgtgtacagcgccccgggcggcggctacctcgccccgggcccgccgtggccgcctgcgcaaggtcctcctctggcgccccccggggccggcgtagctgtgcatggcggggaactcgcggcagcaatgaccttcaagcatcccagccgagaaggaagcctcccagctccggcagcaaggccccggacgccctcagtagcttacacggactgcccatcccggcctcgacctcctaggggcagctctccccggacccgagcccggagggaacggcaggcggacccgggcgcacaggtctgcgcggcggccccggcaatcggcacgggcaggatcggaggactcgcggaggaggaagccagtgccggcccgcggggtgcacgcccagccagcccccaggcccagccctgcctctggccggacccaccacacttcctttattggtctgggtttttaggcttctctgaacttgggttt

SEQ ID NO: 4173 - DNA, 1371 bp, Homo sapiens
  source 1..1371: mol_type = genomic DNA
atgaagttcaccctgggcctggggtcgcgggcgtggagagtgtcctgggagggggcagcagcggcggcggcaggccctggagcgggcggcagcgcgctccgctgccgcgcacagcgcgtctccagcccgcggctgggccgccgcggctctcggctctcgggcgccctccctctatgcctctcacgcggcggcggcggcgcccaagctctcccggactgcgccgggcccagccccggccaccccggccaccccggcgccaggcagctggccggcccgctcgctatggagcagacgtatggcgaggtgaaccagctgggcggtgtgttcgtcaacggccgccccctgcccaacgccatccgcttgcgcattgtggagctggcgcagctgggcatccgaccctgtgacatcagtcggcagctccgcgtatcccacggctgcgtgagcaagatcctggcgcgctacaacgagaccggctccattctgcccggggccatcggggggagcaagccccgcgtcaccactcccaacgtggtcaagcacatccgggactacaagcaaggagaccctggcatctttgcctgggagatccgcgaccggctgctggccgacggcgtctgtgacaagtacaatgtgccttcggtgagctccatcagccgcatcctgcgcaacaagatcggcagcctggcgcagcccggaccgtacgaggcaagtaagcagccgccgtcgcagcctacgctgccctacaaccacatctaccagtacccctaccccagtcccgtgtcgcccacgggcgccaagatgggcagccaccccggggtcccgggcacggcgggccacgtcagcatcccgcgctcatggccctcggcacactcggtcagcaacatcctgggcatccggacgtttatggagcaaacaggggccctggctgggagcgaaggcaccgcttactctcccaagatggaagactgggccggcgtgaaccgcacggccttccccgccacccccgcagtgaatgggctagagaaacctgccttagaggcagacattaaatacactcagtcggcctccaccctctctgccgtgggcggctttctccccgcctgcgcctacccggcctccaaccagcacggcgtgtacagcgccccgggcggcggctacctcgccccgggcccgccgtggccgcctgcgcaaggtcctcctctggcgccccccggggccggcgtagctgtgcatggcggggaactcgcggcagcaatgaccttcaagcatcccagccgagaagtggctgacaggaagcctcccagctccggcagcaaggccccggacgccctcagtagcttacacggactgcccatcccggcctcgacctcc

SEQ ID NO: 4174 - DNA, 435 bp, Homo sapiens
  source 1..435: mol_type = genomic DNA
atggccggggaggcggagggcttggtgatgtttgaggatgtgacggtatatttctccagggaggagtgggggctccttaatgtgacccagaagggcctataccgggatgtgatgctggagaactttgcactcgttagctcactgggacttgcaccttcgagatcccctgtgtttacccagctggaggatgatgaacagtcgtgggtgcccagctgggtggatgtgactccagtcagcagagcagaagccaggagaggttttggtcttggccccgcatgttcctgcctctctggcctgcgtctcctcattgcccttctctgtatctgtgcagagctgtctactgttggcgactcagtgcgtgtcttgaaatgtgcacatatccttaaacagatggtttgtgtagagtggaggatgagagagcccatcctgagcatc

SEQ ID NO: 4175 - DNA, 1263 bp, Homo sapiens
  source 1..1263: mol_type = genomic DNA
atggccggggaggcggaggctcagttggacccatcattgcagggcttggtgatgtttgaggatgtgacggtatatttctccagggaggagtgggggctccttaatgtgacccagaagggcctataccgggatgtgatgctggagaactttgcactcgttagctcactgggacttgcaccttcgagatcccctgtgtttacccagctggaggatgatgaacagtcgtgggtgcccagctgggtggatgtgactccagtcagcagagcagaagccaggagaggttttggtcttgatggtttgtgtagagtggaggatgagagagcccatcctgagcatctaaagagctacagagtcatccagcaccaggacactcatagtgaggggaaaccaagaaggcacactgagcatggggcagctttcccacctggttccagttgtgggcaacagcaagaagtccatgtggcagagaagctgttcaaatgcagtgactgtgggaaggtgttcttaaaggcctttgccctccttgaccatctgataacgcattctgaagagagacccttcagatgcccaacaggcagaagtgctttcaagaagtcagctcatattaacccccgaaaaattcacactggagaaacagcccatgtgtgtaatgaatgtgggaaggccttcagttacccgtctaagctgaggaaacaccagaaggttcacacaggcataaaaccttttaagtgtagtgactgtggtaaaaccttcaaccgcaaagacgcacttgttctacaccagaggattcacactggagaaaggccttacgagtgcagcaaatgtggtaaaaccttcagtgttctgtctaccctcattcggcaccggaaagtgcacattggagaaaggccctatgagtgtacagaatgtgggaagttctttaaatacaataatagcttcattcttcaccagagagttcacactggagaaaggccttttgaatgcaagcaatgtgggaaaggctacgtgacccgttcaggcctctatcagcactggaaagtccacactggggaacggccctatgaatgtagcctgtgtgggaaaaccttcactaccagatcctaccgcaatcggcaccagcagttccacactgaagagaggtcttatgaatgtacagagtgtgggaaggccttcaaacatagttccaccctccttcagcacaagaaagtccatactccagaaaggcgtcaggaggacagggcacatgggaaggtcgttagctgc

SEQ ID NO: 4176 - DNA, 1188 bp, Homo sapiens
  source 1..1188: mol_type = genomic DNA
atggatatgcactgcaaagcagaccccttctccgcgatgcacccagggcacgggggtgtgaaccagctcgggggggtgtttgtgaacggccggcccctacccgacgtggtgaggcagcgcatcgtggagctggcccaccagggtgtgcggccctgtgacatctcccggcagctgcgggtcagccacggctgtgtcagcaaaatcctgggcaggtactacgagaccggcagcatcaagccgggtgtgatcggtggctccaagcccaaagtggcgacgcccaaagtggtggacaagattgctgaatacaaacgacagaacccgactatgttcgcctgggagattcgagaccggctcctggccgagggcatctgtgacaatgacacagtgcccagcgtctcttccatcaacagaatcatccggaccaaagttcagcagcctttccacccaacgccggatggggctgggacaggagtgaccgcccctggccacaccattgttcccagcacggcctcccctcctgtttccagcgcctccaatgacccagtgggatcctactccatcaatgggatcctggggattcctcgctccaatggtgagaagaggaaacgtgatgaagatgtgtctgagggctcagtccccaatggagattcccagagtggtgtggacagtttgcggaagcacttgcgagctgacaccttcacccagcagcagctggaagctttggatcgggtctttgagcgtccttcctaccctgacgtcttccaggcatcagagcacatcaaatcagaacaggggaacgagtactccctcccagccctgacccctgggcttgatgaagtcaagtcgagtctatctgcatccaccaaccctgagctgggcagcaacgtgtcaggcacacagacatacccagttgtgactggtcgtgacatggcgagcaccactctgcctggttacccccctcacgtgccccccactggccagggaagctaccccacctccaccctggcaggaatggtgcctgaggctgcagttggtccctcatcctccctcatgagcaagccggggaggaagcttgcagaagtgcccccttgtgtgcaacccactggagcgagttctccggcaacccgtacagccacccccagtacacggcctacaacgaggcttggagattcagcaaccccgccttac

SEQ ID NO: 4177 - DNA, 1251 bp, Homo sapiens
  source 1..1251: mol_type = genomic DNA
atggatatgcactgcaaagcagaccccttctccgcgatgcacccagggcacgggggtgtgaaccagctcgggggggtgtttgtgaacggccggcccctacccgacgtggtgaggcagcgcatcgtggagctggcccaccagggtgtgcggccctgtgacatctcccggcagctgcgggtcagccacggctgtgtcagcaaaatcctgggcaggtactacgagaccggcagcatcaagccgggtgtgatcggtggctccaagcccaaagtggcgacgcccaaagtggtggacaagattgctgaatacaaacgacagaacccgactatgttcgcctgggagattcgagaccggctcctggccgagggcatctgtgacaatgacacagtgcccagcgtctcttccatcaacagaatcatccggaccaaagttcagcagcctttccacccaacgccggatggggctgggacaggagtgaccgcccctggccacaccattgttcccagcacggcctcccctcctgtttccagcgcctccaatgacccagtgggatcctactccatcaatgggatcctggggattcctcgctccaatggtgagaagaggaaacgtgatgaagttgaggtatacactgatcctgcccacattagaggaggtggaggtttgcatctggtctggactttaagagatgtgtctgagggctcagtccccaatggagattcccagagtggtgtggacagtttgcggaagcacttgcgagctgacaccttcacccagcagcagctggaagctttggatcgggtctttgagcgtccttcctaccctgacgtcttccaggcatcagagcacatcaaatcagaacaggggaacgagtactccctcccagccctgacccctgggcttgatgaagtcaagtcgagtctatctgcatccaccaaccctgagctgggcagcaacgtgtcaggcacacagacatacccagttgtgactggtcgtgacatggcgagcaccactctgcctggttacccccctcacgtgccccccactggccagggaagctaccccacctccaccctggcaggaatggtgcctgggagcgagttctccggcaacccgtacagccacccccagtacacggcctacaacgaggcttggagattcagcaaccccgccttactaagttccccttattattatagtgccgccccccggggctccgcccctgccgctgctgccgctgcctatgaccgccac

SEQ ID NO: 4178 - DNA, 1182 bp, Homo sapiens
  source 1..1182: mol_type = genomic DNA
atggatatgcactgcaaagcagaccccttctccgcgatgcacccagggcacgggggtgtgaaccagctcgggggggtgtttgtgaacggccggcccctacccgacgtggtgaggcagcgcatcgtggagctggcccaccagggtgtgcggccctgtgacatctcccggcagctgcgggtcagccacggctgtgtcagcaaaatcctgggcaggtactacgagaccggcagcatcaagccgggtgtgatcggtggctccaagcccaaagtggcgacgcccaaagtggtggacaagattgctgaatacaaacgacagaacccgactatgttcgcctgggagattcgagaccggctcctggccgagggcatctgtgacaatgacacagtgcccagcgtctcttccatcaacagaatcatccggaccaaagttcagcagcctttccacccaacgccggatggggctgggacaggagtgaccgcccctggccacaccattgttcccagcacggcctcccctcctgtttccagcgcctccaatgacccagtgggatcctactccatcaatgggatcctggggattcctcgctccaatggtgagaagaggaaacgtgatgaagatgtgtctgagggctcagtccccaatggagattcccagagtggtgtggacagtttgcggaagcacttgcgagctgacaccttcacccagcagcagctggaagctttggatcgggtctttgagcgtccttcctaccctgacgtcttccaggcatcagagcacatcaaatcagaacaggggaacgagtactccctcccagccctgacccctgggcttgatgaagtcaagtcgagtctatctgcatccaccaaccctgagctgggcagcaacgtgtcaggcacacagacatacccagttgtgactggtcgtgacatggcgagcaccactctgcctggttacccccctcacgtgccccccactggccagggaagctaccccacctccaccctggcaggaatggtgcctgggagcgagttctccggcaacccgtacagccacccccagtacacggcctacaacgaggcttggagattcagcaaccccgccttactaagttccccttattattatagtgccgccccccggggctccgcccctgccgctgctgccgctgcctatgaccgccac

SEQ ID NO: 4179 - DNA, 1092 bp, Homo sapiens
  source 1..1092: mol_type = genomic DNA
atgtgggccccgcgggagcagctactgggctggactgcggaagctctgcctgccaaggattctgcctggccctgggaagagaagcctagatatctgggaccagtgactttcgaggatgtggctgtgcttttcactgaggcagagtggaagagactgagccttgagcagaggaacctatacaaagaagtgatgctggaaaatctcaggaatctggtctcattggcagaatcaaagccagaagtccatacctgcccttcttgccctctggcctttggcagtcagcagttcctcagccaagatgagctacacaatcatcctattccaggtttccatgcaggaaatcaactccacccaggaaatccctgcccagaggatcagccacagtcacaacatccttctgataaaaatcacaggggggctgaagcagaagatcaacgagtggaaggaggcgtcagacccttgttttggagtacaaatgaaaggggggctttagtgggtttctctagcctgttccagagaccaccaataagctcttggggaggcaacagaatattagagatacagctcagtccagcccagaatgcaagctctgaggaagtagacagaatttccaagagggcagaaaccccagggtttggagcagtcacgtttggggagtgtgcactagcttttaaccagaagtcaaacctgttcagacagaaggcagtcacagcagaaaaatcttcagacaaaaggcagtcacaggtgtgcagggagtgtgggcgaggctttagcaggaagtcacagctcatcatacaccagaggacacacacaggagaaaagccttatgtctgcggagagtgtgggcgaggctttatagttgagtcagtcctccgcaaccacctgagtacacactccggggagaaaccttatgtgtgcagccattgtgggcgaggctttagctgcaagccatacctcatcagacatcagaggacacacacaagggagaaatcgtttatgtgcacagtgtgtgggcgaggctttcgtgaaaagtcagagctcattaagcaccagagaattcacacgggggataagccttatgtgtgcagagat

SEQ ID NO: 4180 - DNA, 2343 bp, Homo sapiens
  source 1..2343: mol_type = genomic DNA
atggctcacaggccgaaaaggacttttcggcagcgcgcggctgattccagcgacagcgatggcgccgaggagtcgcctgctgagcctggggcgccgagggaacttccggtcccgggttctgcggaggaagagccgccctctggaggaggccgcgcgcaggtggcgggactgccccaccgggttcggggccctcgtggccggggccgggtctgggcgagctcccggcgtgccaccaaagcggctccccgcgcggacgaaggctcagaatccagaacccttgatgtgtccacagatgaagaggataaaatacatcactcctcagaaagtaaggatgatcagggtttgtcttctgacagttctagctctcttggagaaaaagaactttcatcaacagttaagatcccagatgcagcttttattcaggcagcccgcagaaaacgtgaattggccagggcccaagatgactatatttctttggatgtacaacatacctcctccatctctggtatgaagagagagagcgaagatgaccctgagagtgagcctgatgaccatgaaaagagaataccatttactctaagacctcaaacacttagacaaaggatggctgaggaatcaataagcagaaatgaagaaacaagtgaagaaagtcaggaagatgaaaagcaagatacttgggaacaacagcaaatgaggaaagcagttaaaatcatagaggaaagagacatagatctttcctgtggcaatggatcttcaaaagtgaagaaatttgatacttccatttcatttccgccagtaaatttagaaattataaagaagcaattaaatactagattaacattactacaggaaactcaccgctcacacctgagggagtatgaaaaatacgtacaagatgtcaaaagctcaaagagtaccatccagaacctagagagttcatcaaatcaagctctaaattgtaaattctataaaagcatgaaaatttatgtggaaaatttaattgactgccttaatgaaaagattatcaacatccaagaaatagaatcatccatgcatgcactccttttaaaacaagctatgacctttatgaaacgcaggcaagatgaattaaaacatgaatcaacgtatttacaacagttatcacgcaaagatgagacatccacaagtggaaacttctcagtagatgaaaaaactcagtggattttagaagagattgaatctcgaaggacaaaaagaagacaagcaagggtgctttctgggaattgtaaccatcaggaaggaacatctagtgatgatgaactgccttcagcagagatgattgacttccaaaaaagccaaggtgacattttacagaaacagaagaaagtttttgaagaagtgcaagatgatttttgtaacatccagaatattttgttgaaatttcagcaatggcgagaaaagtttcctgactcctattatgaagctttcattagtttatgcataccaaagcttttaaatcccctaatacgagttcagttgattgattggaatcctcttaagttggaatccacaggtttaaaagagatgccatggttcaaatctgtagaagaatttatggatagcagtgtggaagattcaaagaaggaaagtagttcagataaaaaagtcttgtctgcaatcatcaacaaaacaattattccccgacttacagactttgtagaattcctttgggatcctttgtcaacctcacagacaacaagtttaataacacattgcagagtgattcttgaagaacattccacttgtgaaaatgaagttagtaaaagcagacaggatttacttaaatccattgtttcaagaatgaaaaaggcagtagaagatgatgtttttattcctctgtatccaaagagtgctgtagaaaacaaaacatcacctcattcaaagttccaagaaagacagttctggtcaggcctaaagctcttccgcaatattcttctttggaatggactccttacagatgacaccttgcaagaactaggactagggaagctgctaaatcgttaccttattatagcacttctcaatgccacacctgggccagatgtggttaaaaagtgcaaccaggtagcagcatgtctaccagaaaaatggtttgaaaattctgccatgaggacatctattccacagctagaaaacttcattcagtttttattgcagtctgcacataaattatctagaagtgaattcagggatgaagtcgaagaaataattcttattttggtgaaaataaaagctttgaatcaagcagaatccttcataggagagcatcacctagaccatcttaaatcactaattaaagaagat

SEQ ID NO: 4181 - DNA, 645 bp, Homo sapiens
  source 1..645: mol_type = genomic DNA
atggctcacaggccgaaaaggacttttcggcagcgcgcggctgattccagcgacagcgatggcgccgaggagtcgcctgctgagcctggggcgccgagggaacttccggtcccgggttctgcggaggaagagccgccctctggaggaggccgcgcgcaggtggcgggactgccccaccgggttcggggccctcgtggccggggccgggtctgggcgagctcccggcgtgccaccaaagcggctccccgcgcggacgaaggctcagaatccagaacccttgatgtgtccacagatgaagaggataaaatacatcactcctcagaaagtaaggatgatcagggtttgtcttctgacagttctagctctcttggagaaaaagaactttcatcaacagttaagatcccagatgcagcttttattcaggcagcccgcagaaaacgtgaattggccagggcccaagatgactatatttctttggatgtacaacatacctcctccatctctggtatgaagagagagagcgaagatgaccctgagagtgagcctgatgaccatgaaaagagaataccatttactctaagacctcaaacacttagacaaaggatggctgaggaatcaagtatggatttaccaatatatgaagat

SEQ ID NO: 4182 - DNA, 3693 bp, Homo sapiens
  source 1..3693: mol_type = genomic DNA
atgtgtaaatgttgtaacctcttctcaccaaatcagtcggaactcctctcccacgtttcagagaagcacatggaagaaggggttaatgttgatgagattattattccccttaggcctctgagtacacctgaaccccccaactcaagcaaaaccggagatgagtttttggtcatgaagaggaagagaggcaggcctaaggggtccacgaagaagtccagcacagaagaggagctggcagaaaacatcgtgagtccgactgaggacagcccgctggctccggaggaagggaacagcctgcctccaagcagcttggagtgtagcaagtgctgtcggaagttctccaacacgcgccagctgcggaagcacatctgcattatcgtgctgaatttgggtgaggaggaaggagaagcaggtaacgagtctgaccttgaactagaaaagaagtgtaaggaagatgatcgggaaaaagcctcgaaaagaccacggtcacagaaaacagagaaagtccagaagatctcaggaaaggaggccagacagctttctggggcgaagaaacccatcataagtgtggttttaactgcacacgaagcaattccaggtgctaccaagattgtgccagtggaggctgggccccctgaaacaggagctacaaattctgagaccacttcagcagacctggtgcctcggagaggctaccaggaatacgccattcagcagacaccttatgagcaaccaatgaagtcaagcaggctaggtcccactcagctcaaaatcttcacttgtgaatactgcaacaaggtcttcaagttcaagcactcgctgcaggcccacctgaggatccacaccaatgaaaagccatacaagtgcccccagtgcagctatgccagtgccatcaaggccaacctcaatgtgcacctgcgcaagcacactggagagaagttcgcctgcgactattgctcgttcacctgcctgagcaagggccacctcaaggtgcacatcgagcgagtgcacaagaagatcaagcagcactgccgcttctgcaagaagaagtactctgacgtcaagaacctcatcaagcacatccgagacgcgcatgacccacaggacaagaaggtcaaagaggccttggacgagctctgcctgatgacgagggagggcaagcggcagctgctctatgactgccacatctgtgagcgcaagttcaagaacgagctggaccgtgaccgccatatgctggtccacggagacaagtggccttttgcctgtgagctctgtggccatggggccaccaagtaccaggcgctggaactgcatgtcaggaagcaccccttcgtgtacgtctgtgccgtctgccgcaagaagttcgtcagctccatcaggctgcgcacccacatcaaagaggtgcacggggctgcccaggaggccttggtcttcaccagttccatcaaccagagcttctgcctcctggaacctggtggggacatccagcaagaagctctgggggaccagctacagctggtggaagaggagtttgccctccagggcgtgaatgcactcaaggaagaggcctgtcctggggacactcagctggaggagggccggaaggagccggaggcccctggggaaatgcctgccccagctgtgcacctggcctccccgcaggccgaaagcacagccctgccaccctgtgagctggaaaccaccgtggtctcctcctcagacctgcattctcaagaggtggtttcagatgattttttgttgaaaaatgatacctcctccgcagaggctcatgctgctcctgagaagcccccagacatgcagcacagaagctcagtccagacgcaaggtgaagtgatcacactactgctgtccaaggcccagagtgctgggtcagatcaggaaagccatggcgcccagagccccctaggggaagggcagaacatggctgtgctttcagctggtgacccagatcccagcaggtgtctcaggtcaaacccagctgaggcctcagacctcctccctccagtagctggtggtggggacaccatcacacatcagcctgactcttgcaaagctgcccctgagcaccggtcaggcatcaccgctttcatgaaggtcctgaacagtttacagaagaagcaaatgaacaccagcttgtgtgagcggatccggaaggtttatggagacctggagtgtgaatactgtggcaaacttttttggtaccaagtgcattttgatatgcatgtccgcacccacacccgggaacatctgtattattgctctcagtgtcattattcttccatcaccaaaaactgccttaaacgccacgtaattcagaaacacagtaacatcttgctgaagtgtcccaccgatggctgtgactactcaactccagataaatataagctacaggcacatcttaaagttcacacagcactggacaaaaggagttattcttgtcctgtttgtgaaaagtctttttcagaggatcgattgataaagtcacatatcaagaccaaccatcctgaggtctccatgagcaccatttctgaggttctcgggaggagggttcagctgaaagggctaattggaaagagagccatgaaatgcccatattgtgacttttatttcatgaagaatggctcagaccttcagcgtcatatttgggctcatgaaggtgtgaagcccttcaagtgttctttgtgtgagtatgcaactcgtagcaagagtaacctcaaggctcatatgaatcgtcacagcactgagaaaacccacctatgtgacatgtgtggcaagaaattcaaatcaaaagggacactgaaaagtcacaaactccttcacactgcagatgggaagcagtttaagtgcacggtgtgtgactacacagcggcccagaagccacagctgctgcggcacatggaacagcatgtctccttcaagcctttccgctgtgcccattgccattactcctgcaacatatctggctctctgaagcggcactacaacaggaagcaccctaatgaggagtatgccaacgtgggcaccggggagctggcagcggaggtgctcatccagcaaggtggtttgaagtgtcctgtttgcagctttgtatatggcaccaaatgggagttcaataggcacttgaagaacaaacatggcttgaaggtggtggaaattgatggagaccccaagtgggagacagcaacagaagctcctgaggagccctccacccagtatctccacatcacagaggccgaagaagacgttcaagggacacaggcagcggtggccgcgctccaggacctgagatacacctctgagagtggcgaccgactggaccccacggccgtgaacatcctgcagcagatcattgagctgggcgccgagacccatgacgccactgcccttgcctcggtggttgccatggcaccagggacggtgactgtggttaagcaggtcaccgaggaggagcccagctccaaccacacggtcatgatccaggagacggtccagcaagcgtccgtggagcttgccgagcagcaccacctggtggtgtcctccgacgacgtggagggcattgagacggtgactgtctacacgcagggcggggaggcctcggagttcatcgtctacgtgcaggaggccatgcagcctgtggaggagcaggctgtggagcagccggcccaggaactc

SEQ ID NO: 4183 - DNA, 3435 bp, Homo sapiens
  source 1..3435: mol_type = genomic DNA
atgtgtaaatgttgtaacctcttctcaccaaatcagtcggaactcctctcccacgtttcagagaagcacatggaagaaggggttaatgttgatgagattattattccccttaggcctctgagtacacctgaaccccccaactcaagcaaaaccggagatgagtttttggtcatgaagaggaagagaggcaggcctaaggggtccacgaagaagtccagcacagaagaggagctggcagaaaacatcgtgagtccgactgaggacagcccgctggctccggaggaagggaacagcctgcctccaagcagcttggagtgtagcaagtgctgtcggaagttctccaacacgcgccagctgcggaagcacatctgcattatcgtgctgaatttgggtgaggaggaaggagaagcaggtaacgagtctgaccttgaactagaaaagaagtgtaaggaagatgatcgggaaaaagcctcgaaaagaccacggtcacagaaaacagagaaagtccagaagatctcaggaaaggaggccagacagctttctggggcgaagaaacccatcataagtgtggttttaactgcacacgaagcaattccaggtgctaccaagattgtgccagtggaggctgggccccctgaaacaggagctacaaattctgagaccacttcagcagacctggtgcctcggagaggctaccaggaatacgccattcagcagacaccttatgagcaaccaatgaagtcaagcaggctaggtcccactcagctcaaaatcttcacttgtgaatactgcaacaaggtcttcaagttcaagcactcgctgcaggcccacctgaggatccacaccaatgaaaagccatacaagtgcccccagtgcagctatgccagtgccatcaaggccaacctcaatgtgcacctgcgcaagcacactggagagaagttcgcctgcgactattgctcgttcacctgcctgagcaagggccacctcaaggtgcacatcgagcgagtgcacaagaagatcaagcagcactgccgcttctgcaagaagaagtactctgacgtcaagaacctcatcaagcacatccgagacgcgcatgacccacaggacaagaaggtcaaagaggccttggacgagctctgcctgatgacgagggagggcaagcggcagctgctctatgactgccacatctgtgagcgcaagttcaagaacgagctggaccgtgaccgccatatgctggtccacggagacaagtggccttttgcctgtgagctctgtggccatggggccaccaagtaccaggcgctggaactgcatgtcaggaagcaccccttcgtgtacgtctgtgccgtctgccgcaagaagttcgtcagctccatcaggctgcgcacccacatcaaagaggtgcacggggctgcccaggaggccttggtcttcaccagttccatcaaccagagcttctgcctcctggaacctggtggggacatccagcaagaagctctgggggaccagctacagctggtggaagaggagtttgccctccagggcgtgaatgcactcaaggaagaggcctgtcctggggacactcagctggaggagggccggaaggagccggaggcccctggggaaatgcctgccccagctgtgcacctggcctccccgcaggccgaaagcacagccctgccaccctgtgagctggaaaccaccgtggtctcctcctcagacctgcattctcaagaggtggtttcagatgattttttgttgaaaaatgatacctcctccgcagaggctcatgctgctcctgagaagcccccagacatgcagcacagaagctcagtccagacgcaaggtgaagtgatcacactactgctgtccaaggcccagagtgctgggtcagatcaggaaagccatggcgcccagagccccctaggggaagggcagaacatggctgtgctttcagctggtgacccagatcccagcaggtgtctcaggtcaaacccagctgaggcctcagacctcctccctccagtagctggtggtggggacaccatcacacatcagcctgactcttgcaaagctgcccctgagcaccggtcaggcatcaccgctttcatgaaggtcctgaacagtttacagaagaagcaaatgaacaccagcttgtgtgagcggatccggaaggtttatggagacctggagtgtgaatactgtggcaaacttttttggtaccaagtgcattttgatatgcatgtccgcacccacacccgggaacatctgtattattgctctcagtgtcattattcttccatcaccaaaaactgccttaaacgccacgtaattcagaaacacagtaacatcttgctgaagtgtcccaccgatggctgtgactactcaactccagataaatataagctacaggcacatcttaaagttcacacagcactggacaaaaggagttattcttgtcctgtttgtgaaaagtctttttcagaggatcgattgataaagtcacatatcaagaccaaccatcctgaggtctccatgagcaccatttctgaggttctcgggaggagggttcagctgaaagggctaattggaaagagagccatgaaatgcccatattgtgacttttatttcatgaagaatggctcagaccttcagcgtcatatttgggctcatgaaggtgtgaagcccttcaagtgttctttgtgtgagtatgcaactcgtagcaagagtaacctcaaggctcatatgaatcgtcacagcactgagaaaacccacctatgtgacatgtgtggcaagaaattcaaatcaaaagggacactgaaaagtcacaaactccttcacactgcagatgggaagcagtttaagtgcacggtgtgtgactacacagcggcccagaagccacagctgctgcggcacatggaacagcatgtctccttcaagcctttccgctgtgcccattgccattactcctgcaacatatctggctctctgaagcggcactacaacaggaagcaccctaatgaggagtatgccaacgtgggcaccggggagctggcagcggaggtgctcatccagcaaggtggtttgaagtgtcctgtttgcagctttgtatatggcaccaaatgggagttcaataggcacttgaagaacaaacatggcttgaaggtggtggaaattgatggagaccccaagtgggaggtcaccgaggaggagcccagctccaaccacacggtcatgatccaggagacggtccagcaagcgtccgtggagcttgccgagcagcaccacctggtggtgtcctccgacgacgtggagggcattgagacggtgactgtctacacgcagggcggggaggcctcggagttcatcgtctacgtgcaggaggccatgcagcctgtggaggagcaggctgtggagcagccggcccaggaactc

SEQ ID NO: 4184 - DNA, 3468 bp, Homo sapiens
  source 1..3468: mol_type = genomic DNA
atgtgtaaatgttgtaacctcttctcaccaaatcagtcggaactcctctcccacgtttcagagaagcacatggaagaaggggttaatgttgatgagattattattccccttaggcctctgagtacacctgaaccccccaactcaagcaaaaccggagatgagtttttggtcatgaagaggaagagaggcaggcctaaggggtccacgaagaagtccagcacagaagaggagctggcagaaaacatcgtgagtccgactgaggacagcccgctggctccggaggaagggaacagcctgcctccaagcagcttggagtgtagcaagtgctgtcggaagttctccaacacgcgccagctgcggaagcacatctgcattatcgtgctgaatttgggtgaggaggaaggagaagcaggtaacgagtctgaccttgaactagaaaagaagtgtaaggaagatgatcgggaaaaagcctcgaaaagaccacggtcacagaaaacagagaaagtccagaagatctcaggaaaggaggccagacagctttctggggcgaagaaacccatcataagtgtggttttaactgcacacgaagcaattccaggtgctaccaagattgtgccagtggaggctgggccccctgaaacaggagctacaaattctgagaccacttcagcagacctggtgcctcggagaggctaccaggaatacgccattcagcagacaccttatgagcaaccaatgaagtcaagcaggctaggtcccactcagctcaaaatcttcacttgtgaatactgcaacaaggtcttcaagttcaagcactcgctgcaggcccacctgaggatccacaccaatgaaaagccatacaagtgcccccagtgcagctatgccagtgccatcaaggccaacctcaatgtgcacctgcgcaagcacactggagagaagttcgcctgcgactattgctcgttcacctgcctgagcaagggccacctcaaggtgcacatcgagcgagtgcacaagaagatcaagcagcactgccgcttctgcaagaagaagtactctgacgtcaagaacctcatcaagcacatccgagacgcgcatgacccacaggacaagaaggtcaaagaggccttggacgagctctgcctgatgacgagggagggcaagcggcagctgctctatgactgccacatctgtgagcgcaagttcaagaacgagctggaccgtgaccgccatatgctggtccacggagacaagtggccttttgcctgtgagctctgtggccatggggccaccaagtaccaggcgctggaactgcatgtcaggaagcaccccttcgtgtacgtctgtgccgtctgccgcaagaagttcgtcagctccatcaggctgcgcacccacatcaaagaggtgcacggggctgcccaggaggccttggtcttcaccagttccatcaaccagagcttctgcctcctggaacctggtggggacatccagcaagaagctctgggggaccagctacagctggtggaagaggagtttgccctccagggcgtgaatgcactcaaggaagaggcctgtcctggggacactcagctggaggagggccggaaggagccggaggcccctggggaaatgcctgccccagctgtgcacctggcctccccgcaggccgaaagcacagccctgccaccctgtgagctggaaaccaccgtggtctcctcctcagacctgcattctcaagaggtggtttcagatgattttttgttgaaaaatgatacctcctccgcagaggctcatgctgctcctgagaagcccccagacatgcagcacagaagctcagtccagacgcaaggtgaagtgatcacactactgctgtccaaggcccagagtgctgggtcagatcaggaaagccatggcgcccagagccccctaggggaagggcagaacatggctgtgctttcagctggtgacccagatcccagcaggtgtctcaggtcaaacccagctgaggcctcagacctcctccctccagtagctggtggtggggacaccatcacacatcagcctgactcttgcaaagctgcccctgagcaccggtcaggcatcaccgctttcatgaaggtcctgaacagtttacagaagaagcaaatgaacaccagcttgtgtgagcggatccggaaggtttatggagacctggagtgtgaatactgtggcaaacttttttggtaccaagtgcattttgatatgcatgtccgcacccacacccgggaacatctgtattattgctctcagtgtcattattcttccatcaccaaaaactgccttaaacgccacgtaattcagaaacacagtaacatcttgctgaagtgtcccaccgatggctgtgactactcaactccagataaatataagctacaggcacatcttaaagttcacacagcactggacaaaaggagttattcttgtcctgtttgtgaaaagtctttttcagaggatcgattgataaagtcacatatcaagaccaaccatcctgaggtctccatgagcaccatttctgaggttctcgggaggagggttcagctgaaagggctaattggaaagagagccatgaaatgcccatattgtgacttttatttcatgaagaatggctcagaccttcagcgtcatatttgggctcatgaaggtgtgaagcccttcaagtgttctttgtgtgagtatgcaactcgtagcaagagtaacctcaaggctcatatgaatcgtcacagcactgagaaaacccacctatgtgacatgtgtggcaagaaattcaaatcaaaagggacactgaaaagtcacaaactccttcacactgcagatgggaagcagtttaagtgcacggtgtgtgactacacagcggcccagaagccacagctgctgcggcacatggaacagcatgtctccttcaagcctttccgctgtgcccattgccattactcctgcaacatatctggctctctgaagcggcactacaacaggaagcaccctaatgaggagtatgccaacgtgggcaccggggagctggcagcggaggtgctcatccagcaaggtggtttgaagtgtcctgtttgcagctttgtatatggcaccaaatgggagttcaataggcacttgaagaacaaacatggcttgaaggtggtggaaattgatggagaccccaagtgggagacagcaacagaagctcctgaggagccctccacccagtatctccacatcacagaggccgaagaagacgttcaagggacacaggcagcggtggccgcgctccaggacctgagatacacctctgagagtggcgaccgactggaccccacggccgtgaacatcctgcagcagctccaaccacacggtcatgatccaggagacggtccagcaagcgtccgtggagcttgccgagcagcaccacctggtggtgtcctccgacgacgtggagggcat

SEQ ID NO: 4185 - DNA, 3729 bp, Homo sapiens
  source 1..3729: mol_type = genomic DNA
atggagacgcgggcggcagaaaacacggccatctttatgtgtaaatgttgtaacctcttctcaccaaatcagtcggaactcctctcccacgtttcagagaagcacatggaagaaggggttaatgttgatgagattattattccccttaggcctctgagtacacctgaaccccccaactcaagcaaaaccggagatgagtttttggtcatgaagaggaagagaggcaggcctaaggggtccacgaagaagtccagcacagaagaggagctggcagaaaacatcgtgagtccgactgaggacagcccgctggctccggaggaagggaacagcctgcctccaagcagcttggagtgtagcaagtgctgtcggaagttctccaacacgcgccagctgcggaagcacatctgcattatcgtgctgaatttgggtgaggaggaaggagaagcaggtaacgagtctgaccttgaactagaaaagaagtgtaaggaagatgatcgggaaaaagcctcgaaaagaccacggtcacagaaaacagagaaagtccagaagatctcaggaaaggaggccagacagctttctggggcgaagaaacccatcataagtgtggttttaactgcacacgaagcaattccaggtgctaccaagattgtgccagtggaggctgggccccctgaaacaggagctacaaattctgagaccacttcagcagacctggtgcctcggagaggctaccaggaatacgccattcagcagacaccttatgagcaaccaatgaagtcaagcaggctaggtcccactcagctcaaaatcttcacttgtgaatactgcaacaaggtcttcaagttcaagcactcgctgcaggcccacctgaggatccacaccaatgaaaagccatacaagtgcccccagtgcagctatgccagtgccatcaaggccaacctcaatgtgcacctgcgcaagcacactggagagaagttcgcctgcgactattgctcgttcacctgcctgagcaagggccacctcaaggtgcacatcgagcgagtgcacaagaagatcaagcagcactgccgcttctgcaagaagaagtactctgacgtcaagaacctcatcaagcacatccgagacgcgcatgacccacaggacaagaaggtcaaagaggccttggacgagctctgcctgatgacgagggagggcaagcggcagctgctctatgactgccacatctgtgagcgcaagttcaagaacgagctggaccgtgaccgccatatgctggtccacggagacaagtggccttttgcctgtgagctctgtggccatggggccaccaagtaccaggcgctggaactgcatgtcaggaagcaccccttcgtgtacgtctgtgccgtctgccgcaagaagttcgtcagctccatcaggctgcgcacccacatcaaagaggtgcacggggctgcccaggaggccttggtcttcaccagttccatcaaccagagcttctgcctcctggaacctggtggggacatccagcaagaagctctgggggaccagctacagctggtggaagaggagtttgccctccagggcgtgaatgcactcaaggaagaggcctgtcctggggacactcagctggaggagggccggaaggagccggaggcccctggggaaatgcctgccccagctgtgcacctggcctccccgcaggccgaaagcacagccctgccaccctgtgagctggaaaccaccgtggtctcctcctcagacctgcattctcaagaggtggtttcagatgattttttgttgaaaaatgatacctcctccgcagaggctcatgctgctcctgagaagcccccagacatgcagcacagaagctcagtccagacgcaaggtgaagtgatcacactactgctgtccaaggcccagagtgctgggtcagatcaggaaagccatggcgcccagagccccctaggggaagggcagaacatggctgtgctttcagctggtgacccagatcccagcaggtgtctcaggtcaaacccagctgaggcctcagacctcctccctccagtagctggtggtggggacaccatcacacatcagcctgactcttgcaaagctgcccctgagcaccggtcaggcatcaccgctttcatgaaggtcctgaacagtttacagaagaagcaaatgaacaccagcttgtgtgagcggatccggaaggtttatggagacctggagtgtgaatactgtggcaaacttttttggtaccaagtgcattttgatatgcatgtccgcacccacacccgggaacatctgtattattgctctcagtgtcattattcttccatcaccaaaaactgccttaaacgccacgtaattcagaaacacagtaacatcttgctgaagtgtcccaccgatggctgtgactactcaactccagataaatataagctacaggcacatcttaaagttcacacagcactggacaaaaggagttattcttgtcctgtttgtgaaaagtctttttcagaggatcgattgataaagtcacatatcaagaccaaccatcctgaggtctccatgagcaccatttctgaggttctcgggaggagggttcagctgaaagggctaattggaaagagagccatgaaatgcccatattgtgacttttatttcatgaagaatggctcagaccttcagcgtcatatttgggctcatgaaggtgtgaagcccttcaagtgttctttgtgtgagtatgcaactcgtagcaagagtaacctcaaggctcatatgaatcgtcacagcactgagaaaacccacctatgtgacatgtgtggcaagaaattcaaatcaaaagggacactgaaaagtcacaaactccttcacactgcagatgggaagcagtttaagtgcacggtgtgtgactacacagcggcccagaagccacagctgctgcggcacatggaacagcatgtctccttcaagcctttccgctgtgcccattgccattactcctgcaacatatctggctctctgaagcggcactacaacaggaagcaccctaatgaggagtatgccaacgtgggcaccggggagctggcagcggaggtgctcatccagcaaggtggtttgaagtgtcctgtttgcagctttgtatatggcaccaaatgggagttcaataggcacttgaagaacaaacatggcttgaaggtggtggaaattgatggagaccccaagtgggagacagcaacagaagctcctgaggagccctccacccagtatctccacatcacagaggccgaagaagacgttcaagggacacaggcagcggtggccgcgctccaggacctgagatacacctctgagagtggcgaccgactggaccccacggccgtgaacatcctgcagcagatcattgagctgggcgccgagacccatgacgccactgcccttgcctcggtggttgccatggcaccagggacggtgactgtggttaagcaggtcaccgaggaggagcccagctccaaccacacggtcatgatccaggagacggtccagcaagcgtccgtggagcttgccgagcagcaccacctggtggtgtcctccgacgacgtggagggcattgagacggtgactgtctacacgcagggcggggaggcctcggagttcatcgtctacgtgcaggaggccatgcagcctgtggaggagcaggctgtggagcagccggcccaggaactc

SEQ ID NO: 4186 - DNA, 3543 bp, Homo sapiens
  source 1..3543: mol_type = genomic DNA
atggagacgcgggcggcagaaaacacggccatctttatgtgtaaatgttgtaacctcttctcaccaaatcagtcggaactcctctcccacgtttcagagaagcacatggaagaaggggttaatgttgatgagattattattccccttaggcctctgagtacacctgaaccccccaactcaagcaaaaccggagatgagtttttggtcatgaagaggaagagaggcaggcctaaggggtccacgaagaagtccagcacagaagaggagctggcagaaaacatcgtgagtccgactgaggacagcccgctggctccggaggaagggaacagcctgcctccaagcagcttggagtgtagcaagtgctgtcggaagttctccaacacgcgccagctgcggaagcacatctgcattatcgtgctgaatttgggtgaggaggaaggagaagcaggtgctaccaagattgtgccagtggaggctgggccccctgaaacaggagctacaaattctgagaccacttcagcagacctggtgcctcggagaggctaccaggaatacgccattcagcagacaccttatgagcaaccaatgaagtcaagcaggctaggtcccactcagctcaaaatcttcacttgtgaatactgcaacaaggtcttcaagttcaagcactcgctgcaggcccacctgaggatccacaccaatgaaaagccatacaagtgcccccagtgcagctatgccagtgccatcaaggccaacctcaatgtgcacctgcgcaagcacactggagagaagttcgcctgcgactattgctcgttcacctgcctgagcaagggccacctcaaggtgcacatcgagcgagtgcacaagaagatcaagcagcactgccgcttctgcaagaagaagtactctgacgtcaagaacctcatcaagcacatccgagacgcgcatgacccacaggacaagaaggtcaaagaggccttggacgagctctgcctgatgacgagggagggcaagcggcagctgctctatgactgccacatctgtgagcgcaagttcaagaacgagctggaccgtgaccgccatatgctggtccacggagacaagtggccttttgcctgtgagctctgtggccatggggccaccaagtaccaggcgctggaactgcatgtcaggaagcaccccttcgtgtacgtctgtgccgtctgccgcaagaagttcgtcagctccatcaggctgcgcacccacatcaaagaggtgcacggggctgcccaggaggccttggtcttcaccagttccatcaaccagagcttctgcctcctggaacctggtggggacatccagcaagaagctctgggggaccagctacagctggtggaagaggagtttgccctccagggcgtgaatgcactcaaggaagaggcctgtcctggggacactcagctggaggagggccggaaggagccggaggcccctggggaaatgcctgccccagctgtgcacctggcctccccgcaggccgaaagcacagccctgccaccctgtgagctggaaaccaccgtggtctcctcctcagacctgcattctcaagaggtggtttcagatgattttttgttgaaaaatgatacctcctccgcagaggctcatgctgctcctgagaagcccccagacatgcagcacagaagctcagtccagacgcaaggtgaagtgatcacactactgctgtccaaggcccagagtgctgggtcagatcaggaaagccatggcgcccagagccccctaggggaagggcagaacatggctgtgctttcagctggtgacccagatcccagcaggtgtctcaggtcaaacccagctgaggcctcagacctcctccctccagtagctggtggtggggacaccatcacacatcagcctgactcttgcaaagctgcccctgagcaccggtcaggcatcaccgctttcatgaaggtcctgaacagtttacagaagaagcaaatgaacaccagcttgtgtgagcggatccggaaggtttatggagacctggagtgtgaatactgtggcaaacttttttggtaccaagtgcattttgatatgcatgtccgcacccacacccgggaacatctgtattattgctctcagtgtcattattcttccatcaccaaaaactgccttaaacgccacgtaattcagaaacacagtaacatcttgctgaagtgtcccaccgatggctgtgactactcaactccagataaatataagctacaggcacatcttaaagttcacacagcactggacaaaaggagttattcttgtcctgtttgtgaaaagtctttttcagaggatcgattgataaagtcacatatcaagaccaaccatcctgaggtctccatgagcaccatttctgaggttctcgggaggagggttcagctgaaagggctaattggaaagagagccatgaaatgcccatattgtgacttttatttcatgaagaatggctcagaccttcagcgtcatatttgggctcatgaaggtgtgaagcccttcaagtgttctttgtgtgagtatgcaactcgtagcaagagtaacctcaaggctcatatgaatcgtcacagcactgagaaaacccacctatgtgacatgtgtggcaagaaattcaaatcaaaagggacactgaaaagtcacaaactccttcacactgcagatgggaagcagtttaagtgcacggtgtgtgactacacagcggcccagaagccacagctgctgcggcacatggaacagcatgtctccttcaagcctttccgctgtgcccattgccattactcctgcaacatatctggctctctgaagcggcactacaacaggaagcaccctaatgaggagtatgccaacgtgggcaccggggagctggcagcggaggtgctcatccagcaaggtggtttgaagtgtcctgtttgcagctttgtatatggcaccaaatgggagttcaataggcacttgaagaacaaacatggcttgaaggtggtggaaattgatggagaccccaagtgggagacagcaacagaagctcctgaggagccctccacccagtatctccacatcacagaggccgaagaagacgttcaagggacacaggcagcggtggccgcgctccaggacctgagatacacctctgagagtggcgaccgactggaccccacggccgtgaacatcctgcagcagatcattgagctgggcgccgagacccatgacgccactgcccttgcctcggtggttgccatggcaccagggacggtgactgtggttaagcaggtcaccgaggaggagcccagctccaaccacacggtcatgatccaggagacggtccagcaagcgtccgtggagcttgccgagcagcaccacctggtggtgtcctccgacgacgtggagggcattgagacggtgactgtctacacgcagggcggggaggcctcggagttcatcgtctacgtgcaggaggccatgcagcctgtggaggagcaggctgtggagcagccggcccaggaactc

SEQ ID NO: 4187 - DNA, 1023 bp, Homo sapiens
  source 1..1023: mol_type = genomic DNA
atggagccagccttcggggaggtgaaccagctgggaggagtgttcgtgaacgggaggccgctgcccaacgccatccggcttcgcatcgtggaactggcccaactgggcatccgaccgtgtgacatcagccgccagctacgggtctcgcacggctgcgtcagcaagatcctggcgcgatacaacgagacgggctcgatcttgccaggagccatcgggggcagcaagccccgggtcactacccccaccgtggtgaaacacatccggacctacaagcagagagaccccggcatcttcgcctgggagatccgggaccgcctgctggcggacggcgtgtgcgacaagtacaatgtgccctccgtgagctccatcagccgcattctgcgcaacaagatcggcaacttggcccagcagggtcattacgactcatacaagcagcaccagccgacgccgcagccagcgctgccctacaaccacatctactcgtaccccagccctatcacggcggcggccgccaaggtgcccacgccacccggggtgcctgccatccccggttcggtggccatgccgcgcacctggccctcctcgcactccgtcaccgacatcctgggcatccgctccatcaccgaccaagtgagcgacagctccccctaccacagccccaaggtggaggagtggagcagcctgggccgcaacaacttccccgccgccgccccgcacgcggtgaacgggttggagaagggagccctggagcaggaagccaagtacggtcaggcaccaaatggtctcccagctgtgggcagttttgtgtcagcatccagcatggctccttaccctaccccagcccaagtgtcgccttacatgacctacagtgctgctccttctggttatgttgctggacatgggtggcaacatgctgggggcacctcattgtctccccacaactgtgacattccggcatcgctggcgttcaagggaatgcaggcagccagagaaggtagtcattctgtcacggcttccgcgctc

SEQ ID NO: 4188 - DNA, 1194 bp, Homo sapiens
  source 1..1194: mol_type = genomic DNA
atgcctcacaactccatcagatctggccatggagggctgaaccagctgggaggggcctttgtgaatggcagacctctgccggaagtggtccgccagcgcatcgtagacctggcccaccagggtgtaaggccctgcgacatctctcgccagctccgcgtcagccatggctgcgtcagcaagatccttggcaggtactacgagactggcagcatccggcctggagtgatagggggctccaagcccaaggtggccacccccaaggtggtggagaagattggggactacaaacgccagaaccctaccatgtttgcctgggagatccgagaccggctcctggctgagggcgtctgtgacaatgacactgtgcccagtgtcagctccattaatagaatcatccggaccaaagtgcagcaaccattcaacctccctatggacagctgcgtggccaccaagtccctgagtcccggacacacgctgatccccagctcagctgtaactcccccggagtcaccccagtcggattccctgggctccacctactccatcaatgggctcctgggcatcgctcagcctggcagcgacaagaggaaaatggatgacagtgatcaggatagctgccgactaagcattgactcacagagcagcagcagcggaccccgaaagcaccttcgcacggatgccttcagccagcaccacctcgagccgctcgagtgcccatttgagcggcagcactacccagaggcctatgcctcccccagccacaccaaaggcgagcagggcctctacccgctgcccttgctcaacagcaccctggacgacgggaaggccaccctgaccccttccaacacgccactggggcgcaacctctcgactcaccagacctaccccgtggtggcagctccgcctttttggatctgcagcaagtcggctccggggtcccgcccttcaatgcctttccccatgctgcctccgtgtacgggcagttcacgggccaggccctcctctcagggcgagagatggtggggcccacgctgcccggatacccaccccacatccccaccagcggacagggcagctatgcctcctctgccatcgcaggcatggtggcaggaagtgaatactctggcaatgcctatggccacaccccctactcctcctacagcgaggcctggcgcttccccaactccagcttgc

SEQ ID NO: 4189 - DNA, 861 bp, Homo sapiens
  source 1..861: mol_type = genomic DNA
atgcctcacaactccatcagatctggccatggagggctgaaccagctgggaggggcctttgtgaatggcagacctctgccggaagtggtccgccagcgcatcgtagacctggcccaccagggtgtaaggccctgcgacatctctcgccagctccgcgtcagccatggctgcgtcagcaagatccttggcaggtactacgagactggcagcatccggcctggagtgatagggggctccaagcccaaggtggccacccccaaggtggtggagaagattggggactacaaacgccagaaccctaccatgtttgcctgggagatccgagaccggctcctggctgagggcgtctgtgacaatgacactgtgcccagtgtcagctccattaatagaatcatccggaccaaagtgcagcaaccattcaacctccctatggacagctgcgtggccaccaagtccctgagtcccggacacacgctgatccccagctcagctgtaactcccccggagtcaccccagtcggattccctgggctccacctactccatcaatgggctcctgggcatcgctcagcctggcagcgacaagaggaaaatggatgacagtgatcaggatagctgccgactaagcattgactcacagagcagcagcagcggaccccgaaagcaccttcgcacggatgccttcagccagcaccacctcgagccgctcgagtgcccatttgagcggcagcactacccagaggcctatgcctcccccagccacaccaaaggcgagcaggaagtgaatactctggcaatgcctatggccacaccccctactcctcctacagcgaggcctggcgcttccccaactccagcttgc

SEQ ID NO: 4190 - DNA, 963 bp, Homo sapiens
  source 1..963: mol_type = genomic DNA
atgcctcacaactccatcagatctggccatggagggctgaaccagctgggaggggcctttgtgaatggcagacctctgccggaagtggtccgccagcgcatcgtagacctggcccaccagggtgtaaggccctgcgacatctctcgccagctccgcgtcagccatggctgcgtcagcaagatccttggcaggtactacgagactggcagcatccggcctggagtgatagggggctccaagcccaaggtggccacccccaaggtggtggagaagattggggactacaaacgccagaaccctaccatgtttgcctgggagatccgagaccggctcctggctgagggcgtctgtgacaatgacactgtgcccagtgtcagctccattaatagaatcatccggaccaaagtgcagcaaccattcaacctccctatggacagctgcgtggccaccaagtccctgagtcccggacacacgctgatccccagctcagctgtaactcccccggagtcaccccagtcggattccctgggctccacctactccatcaatgggctcctgggcatcgctcagcctggcagcgacaagaggaaaatggatgacagtgatcaggatagctgccgactaagcattgactcacagagcagcagcagcggaccccgaaagcaccttcgcacggatgccttcagccagcaccacctcgagccgctcgagtgcccatttgagcggcagcactacccagaggcctatgcctcccccagccacaccaaaggcgagcagggcgagagatggtggggcccacgctgcccggatacccaccccacatccccaccagcggacagggcagctatgcctcctctgccatcgcaggcatggtggcaggaagtgaatactctggcaatgcctatggccacaccccctactcctcctacagcgaggcctggcgcttccccaactccagcttgc

SEQ ID NO: 4191 - DNA, 2115 bp, Homo sapiens
  source 1..2115: mol_type = genomic DNA
atgttacgtgaggaagcagctcagaagaggaaaggaaaggagccaggcatggctcttcctcagggacgcttgactttccgggatgtggctatagaattctcattggcagagtggaaatgcctgaacccttcacagagggctttgtacagggaagtgatgttggagaactacaggaacctggaggctgtggatatctcttccaaatgcatgatgaaggaggtcttgtcaacagggcaaggcaatacagaagtgatccacacagggacattgcaaagacatgaaagtcatcacattggagatttttgcttccaggaaattgagaaagaaattcatgacattgagtttcagtgtcaagaagatgaaagaaatggccttgaagcacccatgacaaaaataaaaaagttgactggtagcacagaccaacatgatcacaggcatgctggaaacaagcctattaaagatcagcttggatcaagcttttattcacatctgcctgaactccacatatttcagatcaaaggtgaaattggtaatcaacttgagaagtctactaatgatgctccctcagtttcaacattccaaagaatttcctgtaggccccaaacccagatttctaataactatgggaataatcccctgaattcttcattactcccacaaaaacaggaagtacacatgagagaaaaatctttccaatgtaataagagtggcaaagcctttaattgtagctcactcttaaggaaacaccagataccccatttaggagacaaacaatataaatgtgatgtatgtggcaagctctttaatcacgagcaataccttgcatgccatgatagatgtcacactgttgagaaaccttacaagtgtaaagagtgtggcaagaccttcagtcaggagtcatcccttacctgccatcgtagacttcatactggagtaaaacgttacaattgtaatgagtgtggcaagatctttggtcaaaattcagcccttctaattgataaggcaattgatactggagaaaatccttacaagtgtaatgaatgtgacaaggcttttaatcaacaatcacaactttcacatcatagaattcatactggagagaaaccttacaaatgtgaagaatgtgacaaagttttcagtcggaaatcaaccattgagacacataagagaattcatactggagagaaaccatacagatgtaaggtttgtgacacagctttcacgtggcattcacagctggctcgacatagaagaattcatactgcaaagaaaacttataaatgtaatgagtgtggcaagaccttcagtcacaagtcatcccttgtatgccatcatagacttcatggtggagagaaatcttacaaatgtaaggtttgtgacaaggcttttgtgtggagttcacaactggcaaaacatactagaattgactgtggagaaaaaccttacaagtgtaatgaatgtgggaagacctttggtcaaaattcagatcttttaattcataagtcaattcatactggggagcaaccttacaaatgtgatgaatgtgaaaaggttttcagtcgtaaatcaagccttgagacacataagataggtcatactggagagaaaccatacaaatgtaaggtttgtgacaaggcttttgcgtgtcattcctatctggcaaaacatactagaattcatagtggagagaaaccttacaagtgtaatgagtgcagcaagaccttcagtcacaggtcataccttgtatgccatcatagagttcatagtggtgagaaaccttacaagtgtaatgagtgcagcaagaccttcagtcgcaggtcatcccttcattgccatcgtagacttcatagtggtgagaaaccttacaagtgtaatgagtgtggcaataccttccgtcactgctcatcccttatataccatcgtagacttcatactggagagaaatcttacaaatgtacaatttgtgacaaggctttcgtgcgtaattcactcctgtcaagacataccagaattcacactgcagagaaaccttacaagtgtaatgaatgtgggaaggcttttaatcaacaatcacacctttcacgtcatcatagaattcatactggagagaaacct

SEQ ID NO: 4192 - DNA, 1908 bp, Homo sapiens
  source 1..1908: mol_type = genomic DNA
atgatgaaggaggtcttgtcaacagggcaaggcaatacagaagtgatccacacagggacattgcaaagacatgaaagtcatcacattggagatttttgcttccaggaaattgagaaagaaattcatgacattgagtttcagtgtcaagaagatgaaagaaatggccttgaagcacccatgacaaaaataaaaaagttgactggtagcacagaccaacatgatcacaggcatgctggaaacaagcctattaaagatcagcttggatcaagcttttattcacatctgcctgaactccacatatttcagatcaaaggtgaaattggtaatcaacttgagaagtctactaatgatgctccctcagtttcaacattccaaagaatttcctgtaggccccaaacccagatttctaataactatgggaataatcccctgaattcttcattactcccacaaaaacaggaagtacacatgagagaaaaatctttccaatgtaataagagtggcaaagcctttaattgtagctcactcttaaggaaacaccagataccccatttaggagacaaacaatataaatgtgatgtatgtggcaagctctttaatcacgagcaataccttgcatgccatgatagatgtcacactgttgagaaaccttacaagtgtaaagagtgtggcaagaccttcagtcaggagtcatcccttacctgccatcgtagacttcatactggagtaaaacgttacaattgtaatgagtgtggcaagatctttggtcaaaattcagcccttctaattgataaggcaattgatactggagaaaatccttacaagtgtaatgaatgtgacaaggcttttaatcaacaatcacaactttcacatcatagaattcatactggagagaaaccttacaaatgtgaagaatgtgacaaagttttcagtcggaaatcaaccattgagacacataagagaattcatactggagagaaaccatacagatgtaaggtttgtgacacagctttcacgtggcattcacagctggctcgacatagaagaattcatactgcaaagaaaacttataaatgtaatgagtgtggcaagaccttcagtcacaagtcatcccttgtatgccatcatagacttcatggtggagagaaatcttacaaatgtaaggtttgtgacaaggcttttgtgtggagttcacaactggcaaaacatactagaattgactgtggagaaaaaccttacaagtgtaatgaatgtgggaagacctttggtcaaaattcagatcttttaattcataagtcaattcatactggggagcaaccttacaaatgtgatgaatgtgaaaaggttttcagtcgtaaatcaagccttgagacacataagataggtcatactggagagaaaccatacaaatgtaaggtttgtgacaaggcttttgcgtgtcattcctatctggcaaaacatactagaattcatagtggagagaaaccttacaagtgtaatgagtgcagcaagaccttcagtcacaggtcataccttgtatgccatcatagagttcatagtggtgagaaaccttacaagtgtaatgagtgcagcaagaccttcagtcgcaggtcatcccttcattgccatcgtagacttcatagtggtgagaaaccttacaagtgtaatgagtgtggcaataccttccgtcactgctcatcccttatataccatcgtagacttcatactggagagaaatcttacaaatgtacaatttgtgacaaggctttcgtgcgtaattcactcctgtcaagacataccagaattcacactgcagagaaaccttacaagtgtaatgaatgtgggaaggcttttaatcaacaatcacacctttcacgtcatcatagaattcatactggagagaaacct

SEQ ID NO: 4193 - DNA, 1257 bp, Homo sapiens
  source 1..1257: mol_type = genomic DNA
atgctatgtgatgaagaagcccagaagaggaaagcaaaggagtcagggatggctcttcctcagggacgcttgacattcatggacgtggccatcgaattctctcaggaggagtggaaatccctggaccctggacagagggctttatacagggacgtgatgttggagaactacaggaacctggtctttctggggaggagctgtgtattgggaagcaatgcagaaaacaagcctattaaaaatcaacttggattaacccttgaggcacatctgtctgaattgcagctgtttcaagccggaaggaaaatttacagaagtaatcaagttgaaaagtttacaaaccatcgttcctcagtttcaccacttcaaaaaatttcttctagtttcacaacacacatttttaataaatatagaaatgatcttattgatttcccattactcccacaagaagagaaagcatacattagaggaaaatcttatgaatatgaatgtagtgaagatggtgaagtttttagagtccgtgcaagccttactaaccatcaagtaatccatactgcagagaaaccttacaaatgtactgaatgtggcaaggtcttcagtcgcaattcacaccttgtagaacattggagaattcatactggacagaagccttacaaatgtagtgaatgtgacaaggtgtttaatcgcaattcaaaccttgcacgacatcaaagaattcatactggagagaagcctcacaaatgtaacgaatgtggcaaagcttttagagagtgttcgggacttactacccatcttgtaatccatactggagagaaaccttacaaatgtaatgagtgtggcaagaacttcaggcacaaattttctctaaccaatcatcagagaagtcacacggcggaaaaaccttacaaatgtaatgaatgtggcaaggtctttagtctgctttcataccttgcacggcatcaaataattcatagtacagagaagccctacaaatgtaacgaatgtggaagagcatttcacaagcgtccgggccttatggcccatcttctaatccatactggagagaaaccttacaaatgtaatgaatgtgacaaagtctttgggcgcaaattatacctaaccaaccatcagagaattcatactggagagagaccttacaagtgtaatgcatgtggcaaggtcttcaatcaaaatccacacctttcacgacatcggaaaattcatgctggagagaattcactgcgtaccttacagatggaa

SEQ ID NO: 4194 - DNA, 1386 bp, Homo sapiens
  source 1..1386: mol_type = genomic DNA
atgctatgtgatgaagaagcccagaagaggaaagcaaaggagtcagggatggctcttcctcagggacgcttgacattcatggacgtggccatcgaattctctcaggaggagtggaaatccctggaccctggacagagggctttatacagggacgtgatgttggagaactacaggaacctggtctttctgggaatctgtcttcctgacctaagtattatttccatgttgaagcaaaggagagagcccttgattctgcaaagtcaagttaaaatagtaaaaaatacagatggaagggaatgtgtcagaagcgtgaacacagggaggagctgtgtattgggaagcaatgcagaaaacaagcctattaaaaatcaacttggattaacccttgaggcacatctgtctgaattgcagctgtttcaagccggaaggaaaatttacagaagtaatcaagttgaaaagtttacaaaccatcgttcctcagtttcaccacttcaaaaaatttcttctagtttcacaacacacatttttaataaatatagaaatgatcttattgatttcccattactcccacaagaagagaaagcatacattagaggaaaatcttatgaatatgaatgtagtgaagatggtgaagtttttagagtccgtgcaagccttactaaccatcaagtaatccatactgcagagaaaccttacaaatgtactgaatgtggcaaggtcttcagtcgcaattcacaccttgtagaacattggagaattcatactggacagaagccttacaaatgtagtgaatgtgacaaggtgtttaatcgcaattcaaaccttgcacgacatcaaagaattcatactggagagaagcctcacaaatgtaacgaatgtggcaaagcttttagagagtgttcgggacttactacccatcttgtaatccatactggagagaaaccttacaaatgtaatgagtgtggcaagaacttcaggcacaaattttctctaaccaatcatcagagaagtcacacggcggaaaaaccttacaaatgtaatgaatgtggcaaggtctttagtctgctttcataccttgcacggcatcaaataattcatagtacagagaagccctacaaatgtaacgaatgtggaagagcatttcacaagcgtccgggccttatggcccatcttctaatccatactggagagaaaccttacaaatgtaatgaatgtgacaaagtctttgggcgcaaattatacctaaccaaccatcagagaattcatactggagagagaccttacaagtgtaatgcatgtggcaaggtcttcaatcaaaatccacacctttcacgacatcggaaaattcatgctggagagaattcactgcgtaccttacagatggaa

SEQ ID NO: 4195 - DNA, 1743 bp, Homo sapiens
  source 1..1743: mol_type = genomic DNA
atgttggagaactatagcaacctcgtgtcagtggggtatcaagccagcaaaccagatgcactcttcaagttggaacaaggagagccatggacagtagaaaatgaaatccacagccaaatctgtccagaaatcaagaaagttgacaatcatctacagatgcactcacaaaagcaaagatgtctgaagagagtggaacaatgccataaacataatgcatttggaaacatcattcatcagaggaaaagtgattttcctttaaggcaaaatcatgatacatttgacttacatgggaaaatactgaaatcaaatttaagtttagtcaaccagaacaaaaggtatgaaatcaagaattctgtgggggttaatggagatgggaaatccttccttcatgccaagcatgaacaatttcataatgaaatgaacttccccgaaggtggaaattctgtgaatacaaattcacaattcattaagcatcagcgaactcaaaacatagataaaccccatgtatgcactgagtgtgggaaggctttcctcaagaagtctcgcctcatctatcatcagagagttcacactggggagaaacctcatggatgcagtatatgtgggaaagccttctccagaaagtccgggctcactgaacaccagagaaaccacacaggagagaaaccctatgaatgcactgaatgtgacaaagcattccgctggaaatcacagctcaatgcacaccagaaaattcatacaggagagaagtcatatatatgcagtgattgtggaaaaggcttcatcaagaagtctcggctcattaatcatcagagagttcatacaggagagaaaccacatggatgcagcctgtgtgggaaggccttctccaaaaggtccaggctcactgaacaccagagaactcatacaggagagaaaccctatgaatgcactgaatgtgacaaagcattccgctggaaatcacagctcaatgcacatcagaaagctcacacaggagagaagtcatatatatgccgtgattgtggaaaaggcttcattcagaagggaaatctcattgtacatcagcgaattcatactggagaaaaaccctatatatgcaatgaatgtggaaaaggcttcatccaaaagggcaacctccttattcatcgacgtactcacactggagagaaaccctatgtatgcaatgaatgtgggaaaggcttcagccagaagacatgtttaatatcccatcagagatttcacacaggaaagacaccctttgtatgtactgagtgtggaaaatcctgctcacacaagtcaggtctcattaaccaccagagaattcacacaggagagaaaccctatacatgcagtgactgtgggaaagctttcagagataaatcatgtctcaacagacatcggagaactcatacaggggagagaccgtatggatgctctgattgtgggaaagctttctcccacttgtcatgccttgtttatcataagggaatgctgcatgcaagagagaaatgtgtaggttcagtcaaattggaaaatccttgctcagagagtcatagcttatcacatacacgtgatctcatacaggataaagactctgttaacatggtgactctgcagatgccttctgtggcagctcagacctcattaactaacagtgcgttccaagcagagagcaaagtagccattgtgagccagcctgttgccagaagttcagtctcagcagatagtagaatttgcacagaa

SEQ ID NO: 4196 - DNA, 1851 bp, Homo sapiens
  source 1..1851: mol_type = genomic DNA
atgatcaagtcccaggaatcactgaccctggaggatgtggctgtggagttcacttgggaggagtggcagctcctcggccctgctcagaaggacctgtaccgagacgtgatgttggagaactatagcaacctcgtgtcagtggggtatcaagccagcaaaccagatgcactcttcaagttggaacaaggagagccatggacagtagaaaatgaaatccacagccaaatctgtccagaaatcaagaaagttgacaatcatctacagatgcactcacaaaagcaaagatgtctgaagagagtggaacaatgccataaacataatgcatttggaaacatcattcatcagaggaaaagtgattttcctttaaggcaaaatcatgatacatttgacttacatgggaaaatactgaaatcaaatttaagtttagtcaaccagaacaaaaggtatgaaatcaagaattctgtgggggttaatggagatgggaaatccttccttcatgccaagcatgaacaatttcataatgaaatgaacttccccgaaggtggaaattctgtgaatacaaattcacaattcattaagcatcagcgaactcaaaacatagataaaccccatgtatgcactgagtgtgggaaggctttcctcaagaagtctcgcctcatctatcatcagagagttcacactggggagaaacctcatggatgcagtatatgtgggaaagccttctccagaaagtccgggctcactgaacaccagagaaaccacacaggagagaaaccctatgaatgcactgaatgtgacaaagcattccgctggaaatcacagctcaatgcacaccagaaaattcatacaggagagaagtcatatatatgcagtgattgtggaaaaggcttcatcaagaagtctcggctcattaatcatcagagagttcatacaggagagaaaccacatggatgcagcctgtgtgggaaggccttctccaaaaggtccaggctcactgaacaccagagaactcatacaggagagaaaccctatgaatgcactgaatgtgacaaagcattccgctggaaatcacagctcaatgcacatcagaaagctcacacaggagagaagtcatatatatgccgtgattgtggaaaaggcttcattcagaagggaaatctcattgtacatcagcgaattcatactggagaaaaaccctatatatgcaatgaatgtggaaaaggcttcatccaaaagggcaacctccttattcatcgacgtactcacactggagagaaaccctatgtatgcaatgaatgtgggaaaggcttcagccagaagacatgtttaatatcccatcagagatttcacacaggaaagacaccctttgtatgtactgagtgtggaaaatcctgctcacacaagtcaggtctcattaaccaccagagaattcacacaggagagaaaccctatacatgcagtgactgtgggaaagctttcagagataaatcatgtctcaacagacatcggagaactcatacaggggagagaccgtatggatgctctgattgtgggaaagctttctcccacttgtcatgccttgtttatcataagggaatgctgcatgcaagagagaaatgtgtaggttcagtcaaattggaaaatccttgctcagagagtcatagcttatcacatacacgtgatctcatacaggataaagactctgttaacatggtgactctgcagatgccttctgtggcagctcagacctcattaactaacagtgcgttccaagcagagagcaaagtagccattgtgagccagcctgttgccagaagttcagtctcagcagatagtagaatttgcacagaa

SEQ ID NO: 4197 - DNA, 2226 bp, Homo sapiens
  source 1..2226: mol_type = genomic DNA
atgatgcaggcccaggaatccctaacactggaggatgtggctgtggacttcacctgggaggagtggcagttcctgagccctgctcagaaggacctgtaccgggacgtgatgttggagaactacagcaacctggtggcagtggggtatcaagccagcaaaccagatgcactctccaaattggaacgaggagaagaaacttgcacaacagaagatgaaatctactctcgaatctgttctgattcaggaggtgcatcaggaggtgcatatgcagaaatcaggaaaattgatgatcctctgcagcatcacttgcaaaatcaaagtattcagaagagtgtgaaacagtgccatgaacagaatatgtttggaaatattgttaatcagaacaaaggtcatttcctgctgaagcaagattgtgatacgtttgacttacatgaaaaacctttaaaatcaaatttaagttttgaaaaccagaaaaggagctctggcctaaagaactctgctgagtttaatagagatgggaaatccctttttcatgctaaccataaacaattttatactgaaatgaagtttcctgcaattgcaaaacctattaataagtcccagttcattaagcaacagagaactcacaacatagagaatgcccatgtatgcagtgaatgtgggaaagccttcctcaagttgtctcagtttattgatcatcagagagttcacactggagaaaaacctcatgtatgcagtatgtgtgggaaagctttctccagaaaatccagactaatggaccatcagagaactcatacagaactgaaacattatgaatgcactgaatgtgacaaaaccttcctcaagaaatcacagctcaatatacatcagaaaactcatatgggagggaaaccttacacatgtagccaatgtgggaaagccttcatcaagaagtgtcggctcatttatcatcaacgaactcatacaggagagaaaccccatggatgcagtgtatgtgggaaggccttctctacaaagttcagtctcactacacatcagaaaactcatacaggagaaaaaccttatatatgtagtgaatgtggaaaaggcttcattgagaagaggcgtcttactgcacatcatcgaactcatactggtgagaaaccctttatatgcaataaatgtgggaaaggcttcaccttgaagaacagtcttatcacacatcagcaaactcatacaggagagaaattatatacatgtagtgaatgtggaaaaggcttttcaatgaagcactgtctcatggtacatcaacgaactcatactggagagaaaccttataaatgcaatgagtgtggaaagggcttcgctttgaagagcccactcatcagacatcagcgaacacatactggagagaaaccctatgtatgcaccgaatgtcgaaaaggtttcaccatgaagagtgacctcattgtacatcagcgaactcatactgcagagaagccatatatatgcaatgattgtggaaaaggcttcactgtgaagagccgccttattgtgcatcagcgaactcatactggagaaaaaccctatgtatgtggtgagtgtggaaaaggctttccagcaaagatccggctaatgggacatcaacgaactcatacaggagagaaaccttatatttgcaatgagtgtggaaaaggcttcactgagaagagtcatctcaatgtacatcggcgcactcatacaggagagaaaccctatgtatgcagtgaatgtggcaaaggcttaactgggaaaagcatgctcattgcacatcagcgaactcatactggggagaaaccttatatatgcaatgaatgtggaaagggcttcaccatgaagagtactctcagtatacatcagcaaactcatactggagagaagccatacaaatgcaatgaatgtgataaaaccttcaggaagaagacatgcctcatacaacatcagcgatttcacacaggaaagacttcctttgcatgtactgaatgtggaaaattctctttgcgcaaaaatgatcttattacacatcagagaattcacacaggagagaaaccgtacaaatgcagtgactgcgggaaagccttcactacaaaatcagggctcaatgttcatcaaagaaaacatacaggagagaggccctatggatgtagtgattgtgggaaagcttttgcgcacttgtctatccttgttaaacacaggagaattcacagg

SEQ ID NO: 4198 - DNA, 2208 bp, Homo sapiens
  source 1..2208: mol_type = genomic DNA
atgaggccggagcccaccaagttctgggaagaatccctaacactggaggatgtggctgtggacttcacctgggaggagtggcagttcctgagccctgctcagaaggacctgtaccgggacgtgatgttggagaactacagcaacctggtggcagtggggtatcaagccagcaaaccagatgcactctccaaattggaacgaggagaagaaacttgcacaacagaagatgaaatctactctcgaatctgttctgaaatcaggaaaattgatgatcctctgcagcatcacttgcaaaatcaaagtattcagaagagtgtgaaacagtgccatgaacagaatatgtttggaaatattgttaatcagaacaaaggtcatttcctgctgaagcaagattgtgatacgtttgacttacatgaaaaacctttaaaatcaaatttaagttttgaaaaccagaaaaggagctctggcctaaagaactctgctgagtttaatagagatgggaaatccctttttcatgctaaccataaacaattttatactgaaatgaagtttcctgcaattgcaaaacctattaataagtcccagttcattaagcaacagagaactcacaacatagagaatgcccatgtatgcagtgaatgtgggaaagccttcctcaagttgtctcagtttattgatcatcagagagttcacactggagaaaaacctcatgtatgcagtatgtgtgggaaagctttctccagaaaatccagactaatggaccatcagagaactcatacagaactgaaacattatgaatgcactgaatgtgacaaaaccttcctcaagaaatcacagctcaatatacatcagaaaactcatatgggagggaaaccttacacatgtagccaatgtgggaaagccttcatcaagaagtgtcggctcatttatcatcaacgaactcatacaggagagaaaccccatggatgcagtgtatgtgggaaggccttctctacaaagttcagtctcactacacatcagaaaactcatacaggagaaaaaccttatatatgtagtgaatgtggaaaaggcttcattgagaagaggcgtcttactgcacatcatcgaactcatactggtgagaaaccctttatatgcaataaatgtgggaaaggcttcaccttgaagaacagtcttatcacacatcagcaaactcatacaggagagaaattatatacatgtagtgaatgtggaaaaggcttttcaatgaagcactgtctcatggtacatcaacgaactcatactggagagaaaccttataaatgcaatgagtgtggaaagggcttcgctttgaagagcccactcatcagacatcagcgaacacatactggagagaaaccctatgtatgcaccgaatgtcgaaaaggtttcaccatgaagagtgacctcattgtacatcagcgaactcatactgcagagaagccatatatatgcaatgattgtggaaaaggcttcactgtgaagagccgccttattgtgcatcagcgaactcatactggagaaaaaccctatgtatgtggtgagtgtggaaaaggctttccagcaaagatccggctaatgggacatcaacgaactcatacaggagagaaaccttatatttgcaatgagtgtggaaaaggcttcactgagaagagtcatctcaatgtacatcggcgcactcatacaggagagaaaccctatgtatgcagtgaatgtggcaaaggcttaactgggaaaagcatgctcattgcacatcagcgaactcatactggggagaaaccttatatatgcaatgaatgtggaaagggcttcaccatgaagagtactctcagtatacatcagcaaactcatactggagagaagccatacaaatgcaatgaatgtgataaaaccttcaggaagaagacatgcctcatacaacatcagcgatttcacacaggaaagacttcctttgcatgtactgaatgtggaaaattctctttgcgcaaaaatgatcttattacacatcagagaattcacacaggagagaaaccgtacaaatgcagtgactgcgggaaagccttcactacaaaatcagggctcaatgttcatcaaagaaaacatacaggagagaggccctatggatgtagtgattgtgggaaagcttttgcgcacttgtctatccttgttaaacacaggagaattcacagg

SEQ ID NO: 4199 - DNA, 2193 bp, Homo sapiens
  source 1..2193: mol_type = genomic DNA
atgatgcaggcccaggaatccctaacactggaggatgtggctgtggacttcacctgggaggagtggcagttcctgagccctgctcagaaggacctgtaccgggacgtgatgttggagaactacagcaacctggtggcagtggggtatcaagccagcaaaccagatgcactctccaaattggaacgaggagaagaaacttgcacaacagaagatgaaatctactctcgaatctgttctgaaatcaggaaaattgatgatcctctgcagcatcacttgcaaaatcaaagtattcagaagagtgtgaaacagtgccatgaacagaatatgtttggaaatattgttaatcagaacaaaggtcatttcctgctgaagcaagattgtgatacgtttgacttacatgaaaaacctttaaaatcaaatttaagttttgaaaaccagaaaaggagctctggcctaaagaactctgctgagtttaatagagatgggaaatccctttttcatgctaaccataaacaattttatactgaaatgaagtttcctgcaattgcaaaacctattaataagtcccagttcattaagcaacagagaactcacaacatagagaatgcccatgtatgcagtgaatgtgggaaagccttcctcaagttgtctcagtttattgatcatcagagagttcacactggagaaaaacctcatgtatgcagtatgtgtgggaaagctttctccagaaaatccagactaatggaccatcagagaactcatacagaactgaaacattatgaatgcactgaatgtgacaaaaccttcctcaagaaatcacagctcaatatacatcagaaaactcatatgggagggaaaccttacacatgtagccaatgtgggaaagccttcatcaagaagtgtcggctcatttatcatcaacgaactcatacaggagagaaaccccatggatgcagtgtatgtgggaaggccttctctacaaagttcagtctcactacacatcagaaaactcatacaggagaaaaaccttatatatgtagtgaatgtggaaaaggcttcattgagaagaggcgtcttactgcacatcatcgaactcatactggtgagaaaccctttatatgcaataaatgtgggaaaggcttcaccttgaagaacagtcttatcacacatcagcaaactcatacaggagagaaattatatacatgtagtgaatgtggaaaaggcttttcaatgaagcactgtctcatggtacatcaacgaactcatactggagagaaaccttataaatgcaatgagtgtggaaagggcttcgctttgaagagcccactcatcagacatcagcgaacacatactggagagaaaccctatgtatgcaccgaatgtcgaaaaggtttcaccatgaagagtgacctcattgtacatcagcgaactcatactgcagagaagccatatatatgcaatgattgtggaaaaggcttcactgtgaagagccgccttattgtgcatcagcgaactcatactggagaaaaaccctatgtatgtggtgagtgtggaaaaggctttccagcaaagatccggctaatgggacatcaacgaactcatacaggagagaaaccttatatttgcaatgagtgtggaaaaggcttcactgagaagagtcatctcaatgtacatcggcgcactcatacaggagagaaaccctatgtatgcagtgaatgtggcaaaggcttaactgggaaaagcatgctcattgcacatcagcgaactcatactggggagaaaccttatatatgcaatgaatgtggaaagggcttcaccatgaagagtactctcagtatacatcagcaaactcatactggagagaagccatacaaatgcaatgaatgtgataaaaccttcaggaagaagacatgcctcatacaacatcagcgatttcacacaggaaagacttcctttgcatgtactgaatgtggaaaattctctttgcgcaaaaatgatcttattacacatcagagaattcacacaggagagaaaccgtacaaatgcagtgactgcgggaaagccttcactacaaaatcagggctcaatgttcatcaaagaaaacatacaggagagaggccctatggatgtagtgattgtgggaaagcttttgcgcacttgtctatccttgttaaacacaggagaattcacagg

SEQ ID NO: 4200 - DNA, 1755 bp, Homo sapiens
  source 1..1755: mol_type = genomic DNA
atgatcaagacccaggaatcactgaccctggaggatgtggctgtggaattcagctgggaggagtggcagctcctggacactgctcagaagaacctgtaccgggatgtgatggtggagaactataaccacctagtatcactggggtatcaaactagcaaaccagatgtactctccaagttggcacatggacaagaaccatggacaacagatgctaaaattcagaataaaaattgtccaggaatcgggaaagttgacagtcatctgcaagagcactctccaaaccaaagacttctgaagagcgtgcagcaatgcaatggacagaatacacttagaaatattgtacatctcagcaagacacattttcctatagtgcaaaatcatgatacatttgacttgtacagaaaaaatttgaaatcaagtttaagtttaatcaaccagaagagaagacatggaataaataaccctgttgagtttattggaggtgagaaaacacttctacatggtaagcatgaacgtacgcatactaaaactagattttctgaaaatgcaaaatgtatccatactaaattccaagtcttcaagcatcagaggactcagaaaattgagaaaccccatgcatgcattgaatgtgagcaaaccttccttaggaagtctcagctcatttaccatgagaacatttgtatacaagagaatcctggaagtggtcaatgtgagaaattatccagaagtgtcctgttcactaagcatctgaaaactaatacaacagacaaaatctgtatacccaatgaatatagaaaaggctctactgtgaagagtagtctcattacacatcaacaaacccatacagaagagaaatcctatatgtgcagtgagtgtggaaagggctttacaatgaagcgctatctaattgctcatcagcgaactcatagtggagagaaaccttatgtgtgcaaagaatgtggaaaaggtttcactgtgaagagcaatctcattgtacatcagcgaactcatacaggggagaaaccctatatatgcagtgaatgtggaaaaggcttcaccatgaagcgctatcttgttgtacatcagcgaactcatactggagagaaaccctatatgtgcagtgaatgtggaaaaggctttaccgtgaagagcaatctcattgtacatcagcgctcccacacaggagaaaaatcttacatatgcagcgaatgtggaaaaggcttcactgtcaaacgcactctcgttatacatcagcgaactcatacaggagagaaatcttacatatgcaatgaatgtggtaaaggcttcaccacaaagcgcactcttattatacatcagcgaactcatacaggagaaaaaccctatgaatgcaatgaatgtggtaaagccttcagccagaaaatatgcctcatacaacatgagagatgtcatacaggaaagactccctttgtatgtaccgagtgcggaaaatcctattcacacaaatatggcctcattacccatcagagaattcacacaggagagaaaccttatgagtgcaatgaatgtggaaaagccttcaccacaaagtcagtactcaatgtacatcaaagaacgcatacaggagagaggccgtatggatgcagtgattgtgagaaagccttctcccacttatcaaaccttgtcaaacataagaaaatgcacacaagagaaatgggtagaatcagtcaagttgaaaactcctgtaatggagagtcacagctccttccttataag

SEQ ID NO: 4201 - DNA, 2343 bp, Homo sapiens
  source 1..2343: mol_type = genomic DNA
atggctactcaggggcatttgacattcaaggatgtagccatagaattctctcaggaggagtggaaatgcctggagcctgtgcagaaagctttgtacaaggatgtgatgttggagaactataggaacctggtcttcctaggtatctctcctaaatgtgtgatcaaggaattaccaccaacagagaacagtaatacaggagaaaggttccaaacagtggcactggaaagacatcaaagctatgatattgaaaatttatacttcagggaaatacagaaacatctacatgaccttgaatttcaatggaaagatggtgaaacaaatgataaagaagtgccagtgccccatgaaaacaatcttactggtaaaagagatcaacatagtcaaggggatgtagaaaacaatcatattgaaaaccagcttacatcaaactttgagtcacgtctggctgaactgcagaaagttcaaactgaagggagactttatgaatgtaatgaaacggagaagacaggtaataatggttgtttagtttctccacacattagggaaaaaacgtatgtatgtaatgaatgtggcaaagcctttaaagcgtcttccagccttattaatcatcagaggatacatactacagagaaaccttacaaatgcaatgagtgtggcaaagcctttcatcgggcctcactactaactgtacacaaggtagtccatacaagagggaaatcatatcaatgtgatgtatgtggcaagatcttcagaaaaaattcatattttgtaagacaccaaaggagtcacactggacagaaaccctacatatgtaatgaatgtggcaagtcctttagtaaaagttcccaccttgcagttcatcagagaattcataccggtgaaaaaccttacaaatgtaatctgtgtgggaaatcctttagtcagcgtgtccatcttagacttcatcagacagttcatactggagagagacccttcaaatgtaatgagtgtggcaaaacctttaaacggagctcaaacctcactgtacatcaggtaatccatgcaggaaagaaaccatataaatgtgatgtatgtggcaaggcattcagacatagatcaaatcttgtatgtcaccggagaatccacagtggagagaaacaatacaaatgcaatgaatgtggcaaggtcttcagtaaacgttcaagtcttgcagtgcatcgacgaattcacactgtagagaaaccttgcaaatgcaatgaatgtggcaaggtcttcagtaaacgttcaagtcttgcagtgcatcagagaattcatactggacagaaaacttacaaatgcaataaatgtggcaaggtgtacagtaagcattcacatcttgcagtgcattggagaattcataccggcgagaaagcttataaatgcaatgaatgtggcaaagttttcagcatacattcacgacttgcagctcatcagagaattcatactggagagaaaccttacaaatgcaatgaatgtggcaaggtcttcagtcaacattcacgtcttgcagtgcatcggagaattcatactggagagaaaccttacaaatgcaaagaatgtggcaaggtcttcagtgaccgttcagcttttgcaaggcatcggagaattcatactggagagaagccttacaaatgcaaagaatgtggcaaggtcttcagtcaatgttcacgtcttacagtgcatcggagaattcatagtggagagaaaccttacaaatgcaatgaatgcggcaaggtctacagtcagtattcacatcttgtagggcatcgaagagttcatactggagagaaaccatacaaatgtcatgaatgtggcaaagcctttaatcagggctccacactcaatagacatcagagaattcataccggagagaaaccttacaaatgcaatcagtgtgggaattcctttagtcagcgtgtccatcttagacttcatcagactgttcatactggagacagaccttacaaatgtaatgagtgtggcaaaacctttaaacggagctcaaacctcactgcacatcagataattcatgcaggaaagaaaccatataaatgtgatgaatgtggcaaggtattcaggcatagttcacatcttgtaagtcaccagagaatccacactggagagaaaagatacaaatgtattgaatgtggcaaagcctttgggcggttgttttccctcagcaaacaccaaagaattcattctggcaaaaaaccttataaatgtaatgagtgtgggaaatcttttatttgtcgctcaggcctcactaaacatcgaataagacatactggagagagccttacaactaaactcaatgtgacaaggcct

SEQ ID NO: 4202 - DNA, 1596 bp, Homo sapiens
  source 1..1596: mol_type = genomic DNA
atgaagccaggggtcatcagccatgctccagacagtgtggttccagcagcatttccattccccaaaccagatctgatattccagctggagcaaggagaagcagcatggggcccagatccctggacacttgctgggggagaggccctgagaggcatgtgcacaggtggtaaaaccaagactgagaatgaggaaaaaactgcacagctaaacatttctaaagaatcagagtcccacagactgatagtggagggactgctgatggacgttccccagcaccctgacttcaaggacaggttagagaagtcacagctacatgatacagggaataaaacaaagataggggattgcacagatttgacagtccaggatcatgaatcttccaccactgaaagggaggagatagccaggaaattggaagaaagtagtgtcagcacacatctcattacaaagcagggttttgccaaagaacaggtgttttataaatgtggtgagtgtggcagttactacaacccacattcagactttcacctgcatcagagagttcacactaatgagaagccctacacatgcaaagaatgtgggaaaaccttcagatataactcaaaactgtcacggcatcagaaaatccacactggagagaaaccatactcatgtgaggaatgtggacaagccttcagtcaaaattcccaccttcttcagcatcagaagctccatggtggacagaggccctatgaatgtactgactgtggtaaaaccttcagttataattcaaaactgattcggcatcagagaatccatactggggagaagccctttaaatgtaaggaatgtgggaaagccttcagttgtagctatgactgcatcatccatgaacgaattcacaatggggagaagccctatgaatgtaaggagtgtgggaagagtttgagttctaattcagttctgattcagcatcagagaatccacactggggagaaaccttatgaatgtaaagagtgtggcaaggccttccaccgcagttcggtatttcttcagcaccagaggttccacactggggaacaactctacaaatgtaatgaatgttggaaaactttcagctgtagctcccgcttcatagtgcatcagagaatccacaatggggagaaaccctatgaatgccaggaatgtgggaagacattcagtcaaaagatcactctggttcagcatcagcgagttcacactggggagaaaccttatgagtgtaaggagtgcgggaaagccttcagatggaatgcaagtttcatccagcatcagaagtggcatactaggaagaaactcatcaatggaacagggctatccgcagttaagccctactgtccctgcgccatcctctctcctctgcctccccaacatacctgctctgccctagccccaccagggcctcccttatcttcttcacatgcagtggtacttcctccctctgtgcctttcttcctgctgcttccctcatctgaaaaggccaacccttcacctgtccaaatagcacatttttttcaggatctcgcttttcctgggaagtcatcccttcagagcccgaatcctttgtctcactccctg

SEQ ID NO: 4203 - DNA, 1728 bp, Homo sapiens
  source 1..1728: mol_type = genomic DNA
atgctccagacagtgtggttccagggcttgggcaggaacctgttgtttcaggagccagtaacctttgaggatgtggctgtgtacttcacccagaatgaatgggccagcctgcaccctacgcagagggccctatacagggaggtgatgctggagaattatgcaaatgtgacttccttgtcagcatttccattccccaaaccagatctgatattccagctggagcaaggagaagcagcatggggcccagatccctggacacttgctgggggagaggccctgagaggcatgtgcacaggtggtaaaaccaagactgagaatgaggaaaaaactgcacagctaaacatttctaaagaatcagagtcccacagactgatagtggagggactgctgatggacgttccccagcaccctgacttcaaggacaggttagagaagtcacagctacatgatacagggaataaaacaaagataggggattgcacagatttgacagtccaggatcatgaatcttccaccactgaaagggaggagatagccaggaaattggaagaaagtagtgtcagcacacatctcattacaaagcagggttttgccaaagaacaggtgttttataaatgtggtgagtgtggcagttactacaacccacattcagactttcacctgcatcagagagttcacactaatgagaagccctacacatgcaaagaatgtgggaaaaccttcagatataactcaaaactgtcacggcatcagaaaatccacactggagagaaaccatactcatgtgaggaatgtggacaagccttcagtcaaaattcccaccttcttcagcatcagaagctccatggtggacagaggccctatgaatgtactgactgtggtaaaaccttcagttataattcaaaactgattcggcatcagagaatccatactggggagaagccctttaaatgtaaggaatgtgggaaagccttcagttgtagctatgactgcatcatccatgaacgaattcacaatggggagaagccctatgaatgtaaggagtgtgggaagagtttgagttctaattcagttctgattcagcatcagagaatccacactggggagaaaccttatgaatgtaaagagtgtggcaaggccttccaccgcagttcggtatttcttcagcaccagaggttccacactggggaacaactctacaaatgtaatgaatgttggaaaactttcagctgtagctcccgcttcatagtgcatcagagaatccacaatggggagaaaccctatgaatgccaggaatgtgggaagacattcagtcaaaagatcactctggttcagcatcagcgagttcacactggggagaaaccttatgagtgtaaggagtgcgggaaagccttcagatggaatgcaagtttcatccagcatcagaagtggcatactaggaagaaactcatcaatggaacagggctatccgcagttaagccctactgtccctgcgccatcctctctcctctgcctccccaacatacctgctctgccctagccccaccagggcctcccttatcttcttcacatgcagtggtacttcctccctctgtgcctttcttcctgctgcttccctcatctgaaaaggccaacccttcacctgtccaaatagcacatttttttcaggatctcgcttttcctgggaagtcatcccttcagagcccgaatcctttgtctcactccctg

SEQ ID NO: 4204 - DNA, 1701 bp, Homo sapiens
  source 1..1701: mol_type = genomic DNA
atgggccagcctgcaccctacgcagagggccctatacagggaggtgatgctggagaattatgcaaatgtgacttccttgtcagcatttccattccccaaaccagatctgatattccagctggagcaaggagaagcagcatggggcccagatccctggacacttgctgggggagaggccctgagaggcatgtgcacagagtttcacttttgttgcccaggctggagtgcaatggcgtgatcttcactcaccgcaacctctgccttccaggtggtaaaaccaagactgagaatgaggaaaaaactgcacagctaaacatttctaaagaatcagagtcccacagactgatagtggagggactgctgatggacgttccccagcaccctgacttcaaggacaggttagagaagtcacagctacatgatacagggaataaaacaaagataggggattgcacagatttgacagtccaggatcatgaatcttccaccactgaaagggaggagatagccaggaaattggaagaaagtagtgtcagcacacatctcattacaaagcagggttttgccaaagaacaggtgttttataaatgtggtgagtgtggcagttactacaacccacattcagactttcacctgcatcagagagttcacactaatgagaagccctacacatgcaaagaatgtgggaaaaccttcagatataactcaaaactgtcacggcatcagaaaatccacactggagagaaaccatactcatgtgaggaatgtggacaagccttcagtcaaaattcccaccttcttcagcatcagaagctccatggtggacagaggccctatgaatgtactgactgtggtaaaaccttcagttataattcaaaactgattcggcatcagagaatccatactggggagaagccctttaaatgtaaggaatgtgggaaagccttcagttgtagctatgactgcatcatccatgaacgaattcacaatggggagaagccctatgaatgtaaggagtgtgggaagagtttgagttctaattcagttctgattcagcatcagagaatccacactggggagaaaccttatgaatgtaaagagtgtggcaaggccttccaccgcagttcggtatttcttcagcaccagaggttccacactggggaacaactctacaaatgtaatgaatgttggaaaactttcagctgtagctcccgcttcatagtgcatcagagaatccacaatggggagaaaccctatgaatgccaggaatgtgggaagacattcagtcaaaagatcactctggttcagcatcagcgagttcacactggggagaaaccttatgagtgtaaggagtgcgggaaagccttcagatggaatgcaagtttcatccagcatcagaagtggcatactaggaagaaactcatcaatggaacagggctatccgcagttaagccctactgtccctgcgccatcctctctcctctgcctccccaacatacctgctctgccctagccccaccagggcctcccttatcttcttcacatgcagtggtacttcctccctctgtgcctttcttcctgctgcttccctcatctgaaaaggccaacccttcacctgtccaaatagcacatttttttcaggatctcgcttttcctgggaagtcatcccttcagagcccgaatcctttgtctcactccctg

SEQ ID NO: 4205 - DNA, 1848 bp, Homo sapiens
  source 1..1848: mol_type = genomic DNA
atgctccagacagtgtggttccagggcttgggcaggaacctgttgtttcaggagccagtaacctttgaggatgtggctgtgtacttcacccagaatgaatgggccagcctgcaccctacgcagagggccctatacagggaggtgatgctggagaattatgcaaatgtgacttccttgtacccaactgcagggggctttcctctggatacagagagaactgagaaggttcctggtgcactgtcttcattccttccatcttccagttccctggagctgatcttggccctattgcctatgtcagcatttccattccccaaaccagatctgatattccagctggagcaaggagaagcagcatggggcccagatccctggacacttgctgggggagaggccctgagaggcatgtgcacaggtggtaaaaccaagactgagaatgaggaaaaaactgcacagctaaacatttctaaagaatcagagtcccacagactgatagtggagggactgctgatggacgttccccagcaccctgacttcaaggacaggttagagaagtcacagctacatgatacagggaataaaacaaagataggggattgcacagatttgacagtccaggatcatgaatcttccaccactgaaagggaggagatagccaggaaattggaagaaagtagtgtcagcacacatctcattacaaagcagggttttgccaaagaacaggtgttttataaatgtggtgagtgtggcagttactacaacccacattcagactttcacctgcatcagagagttcacactaatgagaagccctacacatgcaaagaatgtgggaaaaccttcagatataactcaaaactgtcacggcatcagaaaatccacactggagagaaaccatactcatgtgaggaatgtggacaagccttcagtcaaaattcccaccttcttcagcatcagaagctccatggtggacagaggccctatgaatgtactgactgtggtaaaaccttcagttataattcaaaactgattcggcatcagagaatccatactggggagaagccctttaaatgtaaggaatgtgggaaagccttcagttgtagctatgactgcatcatccatgaacgaattcacaatggggagaagccctatgaatgtaaggagtgtgggaagagtttgagttctaattcagttctgattcagcatcagagaatccacactggggagaaaccttatgaatgtaaagagtgtggcaaggccttccaccgcagttcggtatttcttcagcaccagaggttccacactggggaacaactctacaaatgtaatgaatgttggaaaactttcagctgtagctcccgcttcatagtgcatcagagaatccacaatggggagaaaccctatgaatgccaggaatgtgggaagacattcagtcaaaagatcactctggttcagcatcagcgagttcacactggggagaaaccttatgagtgtaaggagtgcgggaaagccttcagatggaatgcaagtttcatccagcatcagaagtggcatactaggaagaaactcatcaatggaacagggctatccgcagttaagccctactgtccctgcgccatcctctctcctctgcctccccaacatacctgctctgccctagccccaccagggcctcccttatcttcttcacatgcagtggtacttcctccctctgtgcctttcttcctgctgcttccctcatctgaaaaggccaacccttcacctgtccaaatagcacatttttttcaggatctcgcttttcctgggaagtcatcccttcagagcccgaatcctttgtctcactccctg

SEQ ID NO: 4206 - DNA, 2763 bp, Homo sapiens
  source 1..2763: mol_type = genomic DNA
atgaaccagccgggcggcgcggcggctccgcaggctgacggagccagtgcagccggaaggaaaagcactgcgagcagggagcgcttgaagcgcagccagaagagcaccaaggtggagggcccagagccagtgccagccgaggcctcgctgagtgccgagcaaggaacgatgacggaggtgaaggtgaagacagagctgcccgatgactacatccaggaggtgatctggcagggcgaggccaaggaggagaagaaggcggtcagcaaggatgggaccagcgacgtgcctgccgagatctgcgtggtgatcggcggcgtccgcaaccagcagacccttgggtcttacgaatgcggaatctgtggcaagaagtacaagtattacaactgcttccagacccacgtgcgggcgcaccgagacaccgaagccacctcaggggagggagcctcccaaagcaacaatttcaggtacacatgtgatatctgcgggaagaagtacaaatactacagctgtttccaagagcaccgagacctgcacgcagtggatgtgtttagtgtggaaggggcccctgagaaccgggcagaccccttcgaccaaggtgtcgtggccacggacgaggtgaaggaggagcccccggagccattccagaaaatcgggccaaaaactggcaattacacctgtgaattctgcggcaaacagtacaagtactacactccctaccaggagcatgtggccttacacgcccccatcagtactgcccccgggtgggagccaccggatgatccagacacgggctctgagtgttcacatccagaggtctccccatctccacgcttcgtggcagcgaagacccagacgaaccagtcggggaaaaaagctccggcctccgtggtccgatgtgccaccctcttacaccgcacccctccagccacccaaacccagacgttccgcactccaaattcgggatctccggcgagcaaggcaaccgcagaaagcgctttcagtcggagagtagaaggcaaagcacaaaaccactttgaagagacgaacagcagttcgcagaactccagcgaaccctacacctgcggcgcctgtgggatccagttccagttctacaacaacctgttggagcacatgcagtcccatgcagctgacaatgaaaacaacattgcctccaaccagtcccgatcgccacctgctgttgtagaagagaagtggaaacctcaggcccagaggaacagtgccaataacaccactaccagtggtttaacacccaacagcatgatccccgaaaaggagcggcagaacatcgcagagcggctgttgagggtcatgtgtgccgacctgggtgcactgagcgtggtcagcgggaaggagttcctgaagttggcccagaccttagtagacagtggtgcccgctatggggccttctcggtcactgaaatcctgggcaacttcaacacgctggcgctgaagcacctgccacgcatgtacaaccaggtgaaggtgaaagtgacctgtgccttgggcagcaatgcctgcctaggcatcggtgtcacctgccactcccagagtgttggccctgactcctgctacatcctcacagcctaccaggccgagggcaaccacatcaagagctatgtgcttggtgtgaagggtgcggacattcgcgacagcggtgaccttgtgcaccactgggtgcagaacgtgctgtcggagttcgtgatgtcggagatcaggacagtgtacgtgacggattgccgggtgagcacgtccgccttctccaaggccggcatgtgccttcgctgctcagcctgtgccttgaactcggtggtgcagagcgtgctgagcaagcggacactgcaggcccgcagcatgcacgaggtcatcgagctgctcaacgtgtgcgaggacctggcgggctccacgggcctggccaaggagaccttcgggtcgctggaggagacgtctccaccaccctgctggaactcggtgacggactcactgttgctggtgcatgagcgctatgagcagatctgcgagttctacagccgggccaagaagatgaacctcatccagagcctcaacaagcacctgctcagcaacctggcggccatcctgacgccggtgaagcaggcagtcatcgagctgagcaacgagagccagcccaccctgcagctggtgctgcccacctacgtcaggctggagaagctgttcacggccaaggccaacgacgcaggcactgtcagcaagctctgccacctcttcctggaggcgctcaaggagaacttcaaggtgcacccggcccacaaggtggccatgatcctggacccgcagcagaagctgcggcctgtgccaccctaccagcacgaggagatcatcggcaaggtctgtgagctcatcaacgaggtgaaggagtcctgggccgaggaggccgacttcgagcccgctgccaagaagccccgctctgctgccgtcgagaaccccgcagctcaggaagatgatcggctaggcaaaaatgaagtgtacgattacctgcaggagcccctcttccaggctacccctgatctcttccagtactggtcgtgcgttacccaaaagcacacaaaactcgccaagctcgccttctggctcctggcggttccggccgtgggcgccagaagcgggtgtgtaaatatgtgtgaacaagcgcttctaatcaaacggaggcggctgctcagtccagaagatatgaataaactcatgtttctgaaatccaacatgctt

SEQ ID NO: 4207 - DNA, 2583 bp, Homo sapiens
  source 1..2583: mol_type = genomic DNA
atgaaccagccgggcggcgcggcggctccgcaggctgacggagccagtgcagccggaaggaaaagcactgcgagcagggagcgcttgaagcgcagccagaagagcaccaaggtggagggcccagagccagtgccagccgaggcctcgctgagtgccgagcaaggaacgatgacggaggtgaaggtgaagacagagctgcccgatgactacatccaggaggtgatctggcagggcgaggccaaggaggagaagaaggcggtcagcaaggatgggaccagcgacgtgcctgccgagatctgcgtggtgatcggcggcgtccgcaaccagcagacccttgggtcttacgaatgcggaatctgtggcaagaagtacaagtattacaactgcttccagacccacgtgcgggcgcaccgagacaccgaagccacctcaggggagggagcctcccaaagcaacaatttcaggtacacatgtgatatctgcgggaagaagtacaaatactacagctgtttccaagagcaccgagacctgcacgcagtggatgtgtttagtgtggaaggggcccctgagaaccgggcagaccccttcgaccaaggtgtcgtggccacggacgaggtgaaggaggagcccccggagccattccagaaaatcgggccaatgaacaatattacatcagacatttttaagaagaaagaagttaggcagtgccaaaagagagaaactggcaattacacctgtgaattctgcggcaaacagtacaagtactacactccctaccaggagcatgtggccttacacgcccccatcaaaagcgctttcagtcggagagtagaaggcaaagcacaaaaccactttgaagagacgaacagcagttcgcagaactccagcgaaccctacacctgcggcgcctgtgggatccagttccagttctacaacaacctgttggagcacatgcagtcccatgcagctgacaatgaaaacaacattgcctccaaccagtcccgatcgccacctgctgttgtagaagagaagtggaaacctcaggcccagaggaacagtgccaataacaccactaccagtggtttaacacccaacagcatgatccccgaaaaggagcggcagaacatcgcagagcggctgttgagggtcatgtgtgccgacctgggtgcactgagcgtggtcagcgggaaggagttcctgaagttggcccagaccttagtagacagtggtgcccgctatggggccttctcggtcactgaaatcctgggcaacttcaacacgctggcgctgaagcacctgccacgcatgtacaaccaggtgaaggtgaaagtgacctgtgccttgggcagcaatgcctgcctaggcatcggtgtcacctgccactcccagagtgttggccctgactcctgctacatcctcacagcctaccaggccgagggcaaccacatcaagagctatgtgcttggtgtgaagggtgcggacattcgcgacagcggtgaccttgtgcaccactgggtgcagaacgtgctgtcggagttcgtgatgtcggagatcaggacagtgtacgtgacggattgccgggtgagcacgtccgccttctccaaggccggcatgtgccttcgctgctcagcctgtgccttgaactcggtggtgcagagcgtgctgagcaagcggacactgcaggcccgcagcatgcacgaggtcatcgagctgctcaacgtgtgcgaggacctggcgggctccacgggcctggccaaggagaccttcgggtcgctggaggagacgtctccaccaccctgctggaactcggtgacggactcactgttgctggtgcatgagcgctatgagcagatctgcgagttctacagccgggccaagaagatgaacctcatccagagcctcaacaagcacctgctcagcaacctggcggccatcctgacgccggtgaagcaggcagtcatcgagctgagcaacgagagccagcccaccctgcagctggtgctgcccacctacgtcaggctggagaagctgttcacggccaaggccaacgacgcaggcactgtcagcaagctctgccacctcttcctggaggcgctcaaggagaacttcaaggtgcacccggcccacaaggtggccatgatcctggacccgcagcagaagctgcggcctgtgccaccctaccagcacgaggagatcatcggcaaggtctgtgagctcatcaacgaggtgaaggagtcctgggccgaggaggccgacttcgagcccgctgccaagaagccccgctctgctgccgtcgagaaccccgcagctcaggaagatgatcggctaggcaaaaatgaagtgtacgattacctgcaggagcccctcttccaggctacccctgatctcttccagtactggtcgtgcgttacccaaaagcacacaaaactcgccaagctcgccttctggctcctggcggttccggccgtgggcgccagaagcgggtgtgtaaatatgtgtgaacaagcgcttctaatcaaacggaggcggctgctcagtccagaagatatgaataaactcatgtttctgaaatccaacatgctt

SEQ ID NO: 4208 - DNA, 2862 bp, Homo sapiens
  source 1..2862: mol_type = genomic DNA
atgaaccagccgggcggcgcggcggctccgcaggctgacggagccagtgcagccggaaggaaaagcactgcgagcagggagcgcttgaagcgcagccagaagagcaccaaggtggagggcccagagccagtgccagccgaggcctcgctgagtgccgagcaaggaacgatgacggaggtgaaggtgaagacagagctgcccgatgactacatccaggaggtgatctggcagggcgaggccaaggaggagaagaaggcggtcagcaaggatgggaccagcgacgtgcctgccgagatctgcgtggtgatcggcggcgtccgcaaccagcagacccttgatggaaaagcgcccgaaggcagcccccacggtggatctgtgcgaagccggtattcagggacctggatttttgaccaagcattgagatatgcatctgggtcttacgaatgcggaatctgtggcaagaagtacaagtattacaactgcttccagacccacgtgcgggcgcaccgagacaccgaagccacctcaggggagggagcctcccaaagcaacaatttcaggtacacatgtgatatctgcgggaagaagtacaaatactacagctgtttccaagagcaccgagacctgcacgcagtggatgtgtttagtgtggaaggggcccctgagaaccgggcagaccccttcgaccaaggtgtcgtggccacggacgaggtgaaggaggagcccccggagccattccagaaaatcgggccaaaaactggcaattacacctgtgaattctgcggcaaacagtacaagtactacactccctaccaggagcatgtggccttacacgcccccatcagtactgcccccgggtgggagccaccggatgatccagacacgggctctgagtgttcacatccagaggtctccccatctccacgcttcgtggcagcgaagacccagacgaaccagtcggggaaaaaagctccggcctccgtggtccgatgtgccaccctcttacaccgcacccctccagccacccaaacccagacgttccgcactccaaattcgggatctccggcgagcaaggcaaccgcagcagaaagcgctttcagtcggagagtagaaggcaaagcacaaaaccactttgaagagacgaacagcagttcgcagaactccagcgaaccctacacctgcggcgcctgtgggatccagttccagttctacaacaacctgttggagcacatgcagtcccatgcagctgacaatgaaaacaacattgcctccaaccagtcccgatcgccacctgctgttgtagaagagaagtggaaacctcaggcccagaggaacagtgccaataacaccactaccagtggtttaacacccaacagcatgatccccgaaaaggagcggcagaacatcgcagagcggctgttgagggtcatgtgtgccgacctgggtgcactgagcgtggtcagcgggaaggagttcctgaagttggcccagaccttagtagacagtggtgcccgctatggggccttctcggtcactgaaatcctgggcaacttcaacacgctggcgctgaagcacctgccacgcatgtacaaccaggtgaaggtgaaagtgacctgtgccttgggcagcaatgcctgcctaggcatcggtgtcacctgccactcccagagtgttggccctgactcctgctacatcctcacagcctaccaggccgagggcaaccacatcaagagctatgtgcttggtgtgaagggtgcggacattcgcgacagcggtgaccttgtgcaccactgggtgcagaacgtgctgtcggagttcgtgatgtcggagatcaggacagtgtacgtgacggattgccgggtgagcacgtccgccttctccaaggccggcatgtgccttcgctgctcagcctgtgccttgaactcggtggtgcagagcgtgctgagcaagcggacactgcaggcccgcagcatgcacgaggtcatcgagctgctcaacgtgtgcgaggacctggcgggctccacgggcctggccaaggagaccttcgggtcgctggaggagacgtctccaccaccctgctggaactcggtgacggactcactgttgctggtgcatgagcgctatgagcagatctgcgagttctacagccgggccaagaagatgaacctcatccagagcctcaacaagcacctgctcagcaacctggcggccatcctgacgccggtgaagcaggcagtcatcgagctgagcaacgagagccagcccaccctgcagctggtgctgcccacctacgtcaggctggagaagctgttcacggccaaggccaacgacgcaggcactgtcagcaagctctgccacctcttcctggaggcgctcaaggagaacttcaaggtgcacccggcccacaaggtggccatgatcctggacccgcagcagaagctgcggcctgtgccaccctaccagcacgaggagatcatcggcaaggtctgtgagctcatcaacgaggtgaaggagtcctgggccgaggaggccgacttcgagcccgctgccaagaagccccgctctgctgccgtcgagaaccccgcagctcaggaagatgatcggctaggcaaaaatgaagtgtacgattacctgcaggagcccctcttccaggctacccctgatctcttccagtactggtcgtgcgttacccaaaagcacacaaaactcgccaagctcgccttctggctcctggcggttccggccgtgggcgccagaagcgggtgtgtaaatatgtgtgaacaagcgcttctaatcaaacggaggcggctgctcagtccagaagatatgaataaactcatgtttctgaaatccaacatgctt

SEQ ID NO: 4209 - DNA, 9690 bp, Homo sapiens
  source 1..9690: mol_type = genomic DNA
atgcagagcagcccctcccctgctcaccctcagctcccagtcctacagacacagatggtgtcggacggcatgacaggcagcaatcctgtgtcccctgcctcatccagttccccagcctctagtggggcaggcggcatctccccgcagcacatagctcaagattcctcactggatggacctccaggccccccagatggtgccacagtgcccctggaggggttcagcttatcccaggctgctgacctggctaacaagggcccgaagtgggagaagagccatgccgaaattgcagaacaggccaagcatgaggccgagatcgagactcggattgctgagctgcggaaggagggtttctggtcactgaagaggctgcctaaggtgccagagccccctcgccccaaaggtcactgggactatttgtgcgaagagatgcagtggctctctgctgactttgctcaggagcgccgttggaaacggggtgtggcccggaaggtggtgcgcatggtgatccggcaccacgaggagcagcggcagaaagaggaacgggcccggagggaggagcaggccaagctgcgtcgaattgcttccaccatggccaaggatgtcaggcagttctggagcaatgtggagaaggtggtgcaattcaagcaacagtcccggcttgaggaaaagcgcaaaaaagccctggacctgcatttggacttcattgtggggcaaactgaaaagtactcggaccttctgtctcagagcctcaaccagccattaacctccagcaaagcaggctcttccccttgcctcggctcttcctcagctgcctccagtcctccaccccctgcttctcgcctggatgatgaagatggggactttcaaccccaagaggatgaggaagaggatgatgaggaaacgattgaagttgaagaacaacaggaaggcaatgatgcagaggcccagaggcgtgagattgagctgcttcgccgtgagggagaattgccactggaagagctgctccgttcccttccccctcagctgttggaagggccttccagcccctctcaaaccccctcatctcatgatagtgacacccgagatgggcctgaagaaggtgctgaagaagagccccctcaggtgttggagataaagcccccaccctctgctgtcacacagcgcaacaaacagccttggcatccagatgaagatgatgaagagtttactgccaacgaagaggaagcggaggatgaagaggatactatagcagctgaggaacagttggaaggggaggtggatcatgccatggagctgagcgagttggctcgagaaggtgagctttccatggaggagctattgcagcagtatgcaggagcctatgccccaggctctgggagcagtgaagatgaggatgaagatgaggttgatgctaatagctctgactgtgaaccagaggggcccgtggaagcggaagagcctcctcaggaggatagtagcagtcagtcagactctgtggaggaccggagtgaggatgaggaagatgaacattcagaggaggaagaaacaagtggaagttcagcatcagaggaatctgagtctgaagagtctgaggatgcccaatcacagagccaagcagatgaagaggaggaagatgatgattttggggtggagtacttgcttgccagggatgaagagcagagtgaggcagatgcaggcagtgggcctcctactccagggcccactactctaggtccaaagaaagaaattactgacattgctgcagcagctgaaagtctccagcccaagggttacacgctggccacgacccaggtaaagacgcccattcccctgcttctgcggggccagctccgggagtaccagcacattgggctagactggctggttaccatgtatgagaagaagcttaatggcattcttgctgatgagatggggcttgggaagaccatccagaccatctctctgcttgcccacttggcttgtgagaaaggtaactggggtccccatttaatcattgttcccaccagcgtgatgttgaactgggagatggagttgaaacggtggtgccccagctttaaaatcctcacttactatggagcccagaaagagaggaagctcaagcggcagggctggaccaagcccaatgcctttcatgtgtgtatcacatcttacaagctggtgctgcaggaccaccaggccttccgtcgcaagaactggcgctatctcattctggatgaggcgcagaacatcaagaacttcaagtcacagcgctggcagtcactcctcaacttcaacagccagagacgcctgctcctgacaggaactcccttgcagaacagcctcatggagctgtggtccttgatgcactttttgatgccccatgtcttccagtctcatcgcgagttcaaggagtggttctctaatcccctaactggcatgattgagggcagccaagagtataatgaaggtctagtcaaacgcctccacaaggttttgaggccttttttactgcgccgagttaaggtggatgttgagaagcagatgcccaaaaagtacgagcatgttatccgctgcaggctctccaagcgtcaacgctgtctctatgatgacttcatggcacagaccacaactaaggagacactagccacaggccatttcatgagcgtcatcaacattttgatgcagctgagaaaagtttgcaatcatccaaatctgttcgaccctcgaccggttacctcccctttcatcaccccaggcatctgcttcagcaccgcctctctggtgctaagggccacggatgtccatcccctccagcggatagacatgggtcgatttgaccttattggcctggaaggtcgtgtctctcgatatgaggcagacacatttctgccccggcaccgcctctctcgccgggtactgttagaagtggctactgctcctgaccccccaccccggcccaagccagtcaagatgaaggtcaacaggatgctgcagccagtacctaagcaagaaggccggacagtggtggtggtgaacaacccacgggcgcccctgggccctgtcccagttcgacctcctccaggtcctgagctctcagcccagcccacccctggcccagtcccccaagtgctgccagcatcactgatggtttcagcctcacctgccgggcccccgcttattcctgcatctcggcctcctggccctgtcctcttgcctccactgcagcccaacagtggttctctcccccaggtgttgccatcccccctgggggtcctgagtgggacctcacggcctcccacgccaaccttgtccctaaagccaacaccacctgccccagttcgcctgagcccagccccacctccaggctcctctagcctgttgaagcccctgacagtgccaccaggctacaccttccctcctgctgctgccaccaccacttctaccaccacggcaactgctaccaccacagcagtgccagctccgactcctgcaccacagcgcctcattctatctcccgatatgcaggctcgcctgccctcaggcgaagtggtcagcatcgggcagttagcctcactggcacaacgtccagtggctaatgcagggggaagcaaacctctcaccttccaaatccagggcaacaagctgactttgactggtgcccaggtgcgccagcttgctgtggggcagccccgcccgctgcaaaggaatgtggtgcacctcgtgtcagcaggggggcagcaccatctcatcagccagcctgcccatgtggccctcatccaggccgtggccccgacccctggccctacccctgtctctgtgctgccttcttcgacccccagcaccacccctgcccctactggcctcagccttccgcttgctgctaaccaggtgccaccaaccatggtgaataatacaggcgtggtgaagattgtagtgagacaagcccctcgggatggactgactcctgttcctccattggccccagcaccccggcctccgagctctgggcttccagctgtgttgaatccacgccccacgttaacccctggccggctacccacacctactctgggtactgctcgagcccccatgcccacacccactctggtgaggcctcttctcaagctggtccacagtccttcacctgaagtcagtgcttcagcccccggagctgcccccttgaccatctcttctcctctccacgtgccatcctccctccctgggccagcctcttctccaatgccaattcccaactcctctccccttgctagtcctgtgtcctctacagtctcagttccattgtcatcttcactccccatctctgtccccaccacacttcctgccccagcctcggctccactcaccatccccatctcagcccccttgactgtttctgcttcgggcccagctctgttgaccagtgtgactccaccattggcacctgttgtcccagcggctcctggacctccctccttggcaccatctggtgcttccccgtcagcatcagccttgactctaggtttggccacagctccatccctgtcttcatctcagacacctggtcaccctctgttgttggctcccacctcttcacatgttccagggttgaactcaaccgtggccccagcatgctcacctgtcctggtgccagcttcggctctggccagtccttttccgtcagcaccaaatccagctccagctcaggcttcccttctggctccagcatcttctgcatctcaggctctagccacccctctggctcctatggcggctccacagacagcaattctggctccttctccagctcctcctctggctcctcttccggtcctggcaccatcgccaggtgctgctcctgtcctggcttcatcacagactccggttccagttatggctccatcgtctactccaggaacctctttagcctcagcttcaccggtaccagctccaacccctgtgttggctccatcatcaactcaaactatgctaccagccccggttccgtcacctctcccgagcccggcttctacgcagacactggccctagccccagctttagcacccactcttggaggctcatctccatctcagacactctctttgggaacggggaacccccagggaccctttccaactcagacattgtcattaactccagcatcatccctggtaccaactccagcccagacactgtctttggcaccaggaccaccactgggtccaactcagacgctgtctctggctccagcaccccctctggctccagcttctccagtgggcccagccccagctcacacgctgactttggctccagcatcgtcatctgcttcactcctggccccagcttcagtgcagacactgaccttgagccctgccccagttcctaccctgggcccggccgcagctcagaccttggcgctggccccagcctccacacagtccccagcttcccaggcatcttcccttgtggtttcggcatctggtgccgctcccttgcctgtcaccatggtatcccggctgcctgtttccaaggatgagcctgacacactgacattgcgctctggtccccccagccctccctccactgctacctcgtttggtggcccccggcctcgacgccagccccccccaccacctcgttcccctttttatctggactccctggaggaaaagcggaagcggcagcggtctgaacgcctggaacggattttccaacttagtgaggctcatggggccctggcacctgtgtatgggactgaagtcctggatttctgtaccctgccccaacctgttgccagccccatcggccctcgttctcctggccccagccaccccaccttttggacttataccgaggctgcccaccgggctgtactgtttccccagcagcgactagaccagctgtcagaaatcattgagaggttcatctttgtcatgcctcctgtggaggcacctcccccttccctgcatgcctgccacccacctccttggctggccccacgtcaggcagccttccaggagcaattggcctctgagctctggccccgggctcgtcctttgcaccgtattgtgtgtaacatgcgcacccagttccctgacttaagactcatccagtatgattgcggaaagttgcagacgttggcagtgctgttgcggcagctcaaggcagagggccaccgagtgctcatcttcacccagatgacccgaatgctggatgtattggagcagtttctcacctaccatggccatctctacctgcgcctggatggatctactagagttgaacagagacaggccttgatggaacggttcaatgcagacaaacgcatattctgcttcatcctttcaactcggagtgggggtgtgggcgtgaacctgacaggagcagacactgttgttttttatgacagcgactggaatcccaccatggatgctcaggcccaggaccgctgtcaccgaattggccagacccgggatgtccacatatataggcttatcagtgaacggacagtggaggagaacatcctaaaaaaggcaaatcagaagagaatgttgggggacatggccattgagggaggcaacttcaccacagcctatttcaaacagcagaccatccgagagctgtttgatatgcccctggaggaaccttctagctcatccgtgccctctgcccctgaagaggaggaagagactgtggccagcaagcagactcatattctggagcaggcattgtgtcgggcagaagatgaagaggatatccgtgcagccacccaggccaaggctgaacaggtggctgagcttgcagaatttaatgagaacgatgggtttcctgctggtgagggagaggaagctggccggcctggggctgaggatgaggagatgtcccgggctgagcaggaaattgctgccctcgtagaacagctgacccccattgagcgctatgccatgaaattcctggaggcctcactggaggaggtgagccgagaggagctcaaacaggcagaagagcaagtggaagctgcccgcaaagacctggaccaagccaaggaggaggtgttccgcctaccccaagaggaggaggaggggccgggggctggggatgagagttcctgtgggactggtggaggcacccaccggcgcagtaaaaaggccaaagcccctgagaggccggggactcgtgtcagtgagcgtcttcgtggagcccgggctgagactcaaggggcaaaccacactcctgtcatatccgcccatcaaactcgcagcaccaccacaccaccccgctgcagtcctgccagggagcgagttcccaggccagcacctaggcctcgacccactccagcttcagctccggctgcaattcctgcccttgttcctgtcccagtttctgccccagtacccatttcagccccaaatccaataaccattctccctgtccatatcttgccttctcctccccctccttcacagattcctccttgttcttctcctgcctgcacccctcctcctgcctgtacccctccaccagctcatacaccgcctccagcccaaacctgtcttgtaactccttcctctcctctcttgcttggtccaccttctgtgcccatctctgcctcagtcactaatctccccttgggcttgaggcctgaggcagagctgtgtgcccaggcattggcatctccagagtccctggagctggcttctgtggccagttcagaaacctcctcactttctcttgtgccccctaaagatctgttgccagttgctgtggagatcctgcctgtgtcagagaagaacctttctctcaccccttctgcacccagcctgaccttggaggctggcagcatccccaatggtcaagagcaggaggcaccagattctgctgaggggaccacccttacagtgctgcctgaaggtgaggagttgcccctgtgtgtgagtgagagcaatggcctggagctcccaccctcagcagcatctgatgagccacttcaggagccactggaggctgacaggacctcggaagagctgacagaggccaagaccccaacctccagcccagagaagccacaggaactcgttacagctgaggttgcagctccatccacctcatcttcagccacttcctcgcctgagggtccttcacctgcccgacctcctcggcgtcgcaccagtgctgatgtggaaattaggggtcaagggactggtcggccaggacaaccaccaggccccaaagtgcttcgaaagctgccaggacggctggtaactgtggtagaggaaaaggaactggtgcggcggcggcggcagcagcggggagctgccagcaccctagtgcctggggtctctgagactagtgccagcccgggaagcccgtctgtccgcagcatgtcagggccagaatcctcccctcccattggtgggccctgtgaagctgctccttcatcctcactgcccactccaccccagcagcccttcattgctcgccgtcacattgagctgggggtgactggtggtggcagccccgagaatggagacggagcactgctcgccatcaccccacctgctgtgaaacgtcggagggggaggccccccaagaagaacaggtctccagcagatgctgggagaggtgtggatgaggcaccctcatccaccttgaagggaaaaaccaatggggctgacccagtccctgggcctgagaccctaattgttgcagatcctgtcctggaaccacagcttattcctgggccccagcctcttggaccccagccagttcacagacccaatcccctcctgtcacctgtggagaaaagaaggcgaggacgaccccctaaagcacgagatttgcccatccctgggaccatttcctctgcaggggatggcaactccgaaagtcggacacagccacccccacacccatcacccctaaccccactcccaccactgctagtttgtcccactgctactgttgccaacactgtcaccactgtcaccatttcaacgtccccacccaaacggaagaggggccgacctcccaagaatcctccatcacctcggcccagccagctccccgtcttggaccgtgacagcacttctgttctcgagagctgtggattggggaggcgacggcaaccccagggccaaggggagagtgagggtagttcctctgatgaggatggaagccgccccctcacccgcctggcccgccttcggcttgaagcagaaggaatgcgaggacggaagagtggagggtccatggtggtggctgtaattcaggatgacctggacttagcagatagcgggccaggcgggttggaattgacaccacctgtggtctcactaaccccaaaactgcgctcgacccggctgcgtccagggtctctagtccccccactagagactgagaagttgcctcgcaaacgagcaggggccccagttggtgggagtcctgggctggcaaagcggggccgcctacagcccccaagtcccctggggcctgagggttcagtagaggagtctgaggctgaagcctcaggtgaggaggaggaaggggatgggaccccacgccgacgtcctggcccccgccggcttgttgggaccaccaaccaaggggaccagcgcatcctgcgcagcagcgcccctccctccctggctggccctgctgttagtcacagaggccgcaaggccaagacg

SEQ ID NO: 4210 - DNA, 1632 bp, Homo sapiens
  source 1..1632: mol_type = genomic DNA
atgttgaatatgcaaggagctgaagagagagacattagaagagagacttgtccaggctgggtaaacaagaacaagcctgctctggagcaggatgtctgtaaaattgactcatcagggatagtagtaaagaggttccaagaggatgaataccaagattctacatttgaagaaaaatatgcatgtgagggcatgaaggaaaactctcctagggagattgctgaatcatgccttttccaggaaggaggttttgggagaataactttcatccacaaagaagcaccccctgaaattattagtcaaggatataattttgagaaaagcttgcttttgacctcaagccttgttacacgtctcagggtttctacagaagagagtctgcatcagtgggaaacaagtaatatacaaaccaatgatatttcagaccaaagtaaatgtccaactctctgcacacagaaaaaatcttggaaatgtaatgaatgtggaaaaacctttactcagagctcatcccttacccaacatcagagaactcatactggagagagaccctacacatgtgaggaatgtgggaaagcctttagtcgtagttcattccttgttcaacatcaaagaattcacactggagtgaaaccatatggatgtgagcagtgtgggaaaacatttcgatgtcgatcatttcttactcagcatcaaagaattcacactggagagaaaccttataaatgcaatgaatgtgggaattccttccgcaatcactcacatctcactgaacaccagagaattcacactggagagaaaccttataaatgcaataggtgtgggaaggcattcaatcagaatacacaccttattcatcatcagagaattcacactggtgagaagccttacatatgcagtgaatgtggctcttcttttcgaaaacactcaaatcttacgcaacatcagagaattcacactggggaaaaaccccataaatgtgacgaatgtgggaaaactttccaaacaaaggcaaacctctctcagcatcagagaattcatagtggagagaaaccctataaatgtaaagaatgtggcaaagccttttgtcagagcccatctcttattaaacaccagcgaattcatactggagaaaaaccatataagtgtaaagaatgtggcaaagcgtttactcagagcaccccactcactaaacatcagagaatacatacaggggagagaccctacaaatgcagtgaatgtggtaaagccttcattcagagcatttgccttattcggcaccagagaagtcacactggagaaaaaccctataaatgcaatgaatgtggaaagggctttaatcagaacacctgcctcactcagcatatgagaattcatactggagagaagccctataaatgtaaagaatgtgggaaagcctttgctcatagctcatctcttactgaacatcatagaactcacactggtgagaagctctataaatgtagtgagtgtgagaaaaccttccgcaagtatgcacaccttagtgaacattacagaattcacactggtgagaagccttatgagtgtattgagtgtggaaagttcttcagacatagttcagtccttttcagacatcagaaacttcacagtggtgac

SEQ ID NO: 4211 - DNA, 417 bp, Homo sapiens
  source 1..417: mol_type = genomic DNA
atggggaccagcagcctgggcctggtggacaccacaggaggcccaggcgatgactacggggtgcttgggagcactgccaatgagacagagaagaaatcatccaggcggagaaaggagagttcagacaaccaggagaacagagggaagccggagggcagcagcaaagcccgcaaggagaggacggccttcaccaaggagcagctgcgagagctggaggcagagtttgcccatcataactacctgactcggctccgcagatatgagattgcggtaaacctggacctctctgagcgccaggtcaaagtgtggttccagaaccgaaggatgaagtggaagcgtgtgaagggaggtcagcccatctcccccaatgggcaggaccctgaggatggggactccacagcctctccaagttcagag

SEQ ID NO: 4212 - DNA, 552 bp, Homo sapiens
  source 1..552: mol_type = genomic DNA
atggatcccgcggccagcagctgcatgaggagcctccagcccccagcccctgtctggggctgccttcgaaacccccactcggaaggcaatggggcctcagggctaccccactacccgcccaccccgttctccttccaccagaaaccagacttcctggcgacagcgacggcagcgtaccctgacttctcagcctcctgcctggcagccaccccacacagcctgccccaggaggagcacatcttcactgagcagcaccccgctttcccacagtcccccaactggcacttccctgtctcagacgcccggcgcaggcccaactcaggcccggcagggggttccaaggaaatggggaccagcagcctgggcctggtggacaccacaggaggcccaggcgatgactacggggtgcttgggagcactgccaatgagacagagaagaaatcatccaggcggagaaaggagagttcaggtcaaagtgtggttccagaaccgaaggatgaagtggaagcgtgtgaagggaggtcagcccatctcccccaatgggcaggaccc

SEQ ID NO: 4213 - DNA, 912 bp, Homo sapiens
  source 1..912: mol_type = genomic DNA
atggaacacccgctctttggctgcctgcgcagccctcacgccacggcgcaaggcttgcacccgttctcccaatcctctctcgccctccatggaagatctgaccatatgtcttaccccgagctctctacttcttcctcatcttgcataatcgcgggataccccaacgaagagggcatgtttgccagccagcatcacagggggcaccaccaccaccaccaccaccaccaccatcaccaccatcagcagcagcagcaccaggctctgcaaaccaactggcacctcccgcagatgtcttccccaccgagtgcggctcggcacagcctctgcctccagcccgactctggagggcccccagagttggggagcagcccgcccgtcctgtgctccaactcttccagcttgggctccagcaccccgactggggccgcgtgcgcgccgggggactacggccgccaggcactgtcacctgcggaggcggagaagcgaagcggcggcaagaggaaaagcgacagctcagactcccaggaaggaaattacaagtcagaagtcaacagcaaacccaggaaagaaaggacagcatttaccaaagagcaaatcagagaacttgaagcagaatttgcccatcataattatctcaccagactgaggcgatacgagatagcagtgaatctggatctcactgaaagacaggtgaaagtctggttccaaaacaggcggatgaagtggaagagggtaaagggtggacagcaaggagctgcggctcgggaaaaggaactggtgaatgtgaaaaagggaacacttctcccatcagagctgtcgggaattggtgcagccaccctccagcaaacaggggactctatagcaaatgaagacagtcacgacagtgaccacagctcagagcatgcgcactta

SEQ ID NO: 4214 - DNA, 1164 bp, Homo sapiens
  source 1..1164: mol_type = genomic DNA
atgacagcctccgtgctcctccacccccgctggatcgagcccaccgtcatgtttctctacgacaacggcggcggcctggtggccgacgagctcaacaagaacatggaaggggcggcggcggctgcagcagcggctgcagcggcggcggctgccggggccgggggcgggggcttcccccacccggcggctgcggcggcagggggcaacttctcggtggcggcggcggccgcggctgcggcggcggccgcggccaaccagtgccgcaacctgatggcgcacccggcgcccttggcgccaggagccgcgtccgcctacagcagcgcccccggggaggcgcccccgtcggctgccgccgctgctgccgcggctgccgctgcagccgccgccgccgccgccgcgtcgtcctcgggaggtcccggcccggcgggcccggcgggcgcagaggccgccaagcaatgcagcccctgctcggcagcggcgcagagctcgtcggggcccgcggcgctgccctatggctacttcggcagcggctactacccgtgcgcccgcatgggcccgcaccccaacgccatcaagtcgtgcgcgcagcccgcctcggccgccgccgccgccgccttcgcggacaagtacatggataccgccggcccagctgccgaggagttcagctcccgcgctaaggagttcgccttctaccaccagggctacgcagccgggccttaccaccaccatcagcccatgcctggctacctggatatgccagtggtgccgggcctcgggggccccggcgagtcgcgccacgaacccttgggtcttcccatggaaagctaccagccctgggcgctgcccaacggctggaacggccaaatgtactgccccaaagagcaggcgcagcctccccacctctggaagtccactctgcccgacgtggtctcccatccctcggatgccagctcctataggagggggagaaagaagcgcgtgccttataccaaggtgcaattaaaagaacttgaacgggaatacgccacgaataaattcattactaaggacaaacggaggcggatatcagccacgacgaatctctctgagcggcaggtcacaatctggttccagaacaggagggttaaagagaaaaaagtcatcaacaaactgaaaaccactagt

SEQ ID NO: 4215 - DNA, 939 bp, Homo sapiens
  source 1..939: mol_type = genomic DNA
atggattttgatgagcgtggtccctgctcctctaacatgtatttgccaagttgtacttactacgtctcgggtccagatttctccagcctcccttcttttctgccccagaccccgtcttcgcgcccaatgacatactcctactcctccaacctgccccaggtccaacccgtgcgcgaagtgaccttcagagagtacgccattgagcccgccactaaatggcacccccgcggcaatctggcccactgctactccgcggaggagctcgtgcacagagactgcctgcaggcgcccagcgcggccggcgtgcctggcgacgtgctggccaagagctcggccaacgtctaccaccaccccacccccgcagtctcgtccaatttctatagcaccgtgggcaggaacggcgtcctgccacaggctttcgaccagtttttcgagacagcctacggcaccccggaaaacctcgcctcctccgactaccccggggacaagagcgccgagaaggggcccccggcggccacggcgacctccgcggcggcggcggcggctgcaacgggcgcgccggcaacttcaagttcggacagcggcggcggcggcggctgccgggagacggcggcggcagcagaggagaaagagcggcggcggcgccccgagagcagcagcagccccgagtcgtcttccggccacactgaggacaaggccggcggctccagtggccaacgcacccgcaaaaagcgctgcccctataccaagtaccagatccgagagctggaacgggagttcttcttcagcgtctacattaacaaagagaagcgcctgcaactgtcccgcatgctcaacctcactgatcgtcaagtcaaaatctggtttcagaacaggagaatgaaggaaaaaaaaattaacagagaccgtttacagtactactcagcaaatccactcctc

SEQ ID NO: 4216 - DNA, 1230 bp, Homo sapiens
  source 1..1230: mol_type = genomic DNA
atgtcagccagaaagggctatctgctcccttcgccaaattatcccacaacaatgtcatgctcggagagccccgccgcgaactcttttttggtcgactcgctcatcagctcgggcagaggcgaggcaggcggcggtggtggtggcgcggggggcggcggcggtggcggttactacgcccacggcggggtctacctgccgcccgccgccgacctgccctacgggctgcagagctgcgggctcttccccacgctgggcggcaagcgcaatgaggcagcgtcgccgggcagcggtggcggtggcgggggtctaggtcccggggcgcacggctacgggccctcgcccatagacctgtggctagacgcgccccggtcttgccggatggagccgcctgacgggccgccgccgccgccccagcagcagccgccgcccccgccgcaaccaccccagccagcgccgcaggccacctcgtgctctttcgcgcagaacatcaaagaagagagctcctactgcctctacgactcggcggacaaatgccccaaagtctcggccaccgccgccgaactggctcccttcccgcggggcccgccgcccgacggctgcgccctgggcacctccagcggggtgccagtgcctggctacttccgcctttctcaggcctacggcaccgccaagggctatggcagcggcggcggcggcgcgcagcaactcggggctggcccgttccccgcgcagcccccggggcgcggtttcgatctcccgcccgcgctagcctccggctcggccgatgcggcccggaaggagcgagccctcgattcgccgccgccccccacgctggcttgcggcagcggcgggggctcgcagggcgacgaggaggcgcacgcgtcgtcctcggccgcggaggagctctccccggccccttccgagagcagcaaagcctcgccggagaaggattccctgggcaattccaaaggtgaaaacgcagccaactggctcacggcaaagagtggtcggaagaagcgctgcccctacacgaagcaccagacactggagctggagaaggagtttctgttcaatatgtaccttactcgagagcggcgcctagagattagccgcagcgtccacctcacggacagacaagtgaaaatctggtttcagaaccgcaggatgaaactgaagaaaatgaatcgagaaaaccggatccgggagctcacagccaactttaatttttcc

SEQ ID NO: 4217 - DNA, 1332 bp, Homo sapiens
  source 1..1332: mol_type = genomic DNA
atggcctgcctcaacccggtgctctgggaaaccaaggttttgcagtctaaagcaacagaagacttcttcagaaatagcatccaatcacctctgtttactcttcagttgccgcacagcttgcaccaaacattgcaatcgtcaacagcatcattagttattcctgctggtagaactcttccaagttttaccacagcagaactgggcacttcaaactccagtgcaaactttacttttcctggttatcccattcatgtaccagcaggtgtgacactacagactgtatctggtcacctttataaagtcaatgtaccaattatggtgacagagacttctggaagagcaggtattcttcagcatccaattcagcaagtatttcaacagcttggccagccttcagtaatacaaactagtgttccacaattgaatccatggtctcttcaagcaactactgaaaaatcacagagaattgaaaccgtgctacagcaacccgcaattctaccttctgggccagtagataggaaacacttagaaaatgccaccagtgatatacttgtatctcctggaaatgagcataaaatcgtgcctgaagctttgttgtgtcatcaggaaagttctcactatatcagtcttccaggtgttgtattttctccacaggtctctcaaacaaattctaatgtggagtcagtgctcagtggttcagctagcatggctcaaaatctgcatgatgagtccctctccacaagccctcatggggctctccaccagcacgtgactgatattcagcttcatattcttaaaaataggatgtatggatgtgattctgtaaagcaaccaagaaatatagaggaacccagcaacatacctgtatcagagaaggattctaattctcaggtggatttaagcattcgggttactgatgatgatattggtgaaataattcaagtagatggaagcggtgatacatcttccaatgaagaaataggaagtacaagagatgcagatgagaatgaatttctagggaatattgacgggggagatctgaaggtacctgaagaagaagctgacagtatttcaaatgaggattcagccacaaacagtagtgataatgaagaccctcaagtaaacattgtagaagaggaccctttaaattctggagatgatgttagtgaacaggatgtgccagacctgtttgacacggataatgttattgtctgtcagtatgataagattcatcgaagcaagaacaaatggaaattctatttgaaagatggtgttatgtgttttggagggagagactatgtatttgcaaaagccattggtgatgcagagtgg

SEQ ID NO: 4218 - DNA, 2349 bp, Homo sapiens
  source 1..2349: mol_type = genomic DNA
atggtagccaaacccccagtaatgtcttttcattttgcccaagacctttggccagagcagaacataaaagattctttccagaaagtgacactgagaagatacggaaaatgtgaatatgagaatttacagttaagaaaaggctgtaaacatgtggatgagtgtacggggcacaaaggaggtcataatacagttaaccaatgtttgacagctaccccaagcaaaatattccagtgtaataaatatgtgaaagtctttgataaattttcaaattcaaatagatataagagaagacatacaggaaacaaacacttcaaatgtaaagaatgtagcaaatcattttgcgtgctttcacaactaactcagcatagaagaattcatactagagtgaattcctacaaatgtgaagaatgtggaaaagcctttaactggttctcaactcttactaaacataagagaattcatactggagaaaagccctacaaatgtgaagaatgtggcaaagcctttaaccagtcctcacaacttactaggcataagataattcatactgaagagaaacccaacaaatgtgaagaatgtggcaaggcctttaaacaggcctcacaccttactatacataaaataattcatactggagaaaaaccttacaaatatgaagaatgtggcaaagtctttagccagtcctcacaccttactacacaaaagatacttcacactggagagaacctctacaagtgtaaagaatgtggaaaagcttttaacctattctcaaatcttactaaccataagagaattcatgctggggagaaaccctacaaatgtaaagaatgtggcagagcttttaacatatcctcaaaccttaataaacaggagaaaattcatactggagggaaactcaacaaatgtgaagaatgtgacaaagcttttaaccgatccttaaaacttactgcacataagaaaattctaatggaagagaaaccctacaaatgtgaagaatgtggcaaagtctttaaccagttctcaactcttactagacataagataattcatactggagagaaaccctacaaatgtaaagaatgtggcaaagcttttaaccaatcttcaaaccttactgaacataagaaaattcatactgcagagaaatcctataaatgtgaagaatgtggcaaagcttttaaccaacactcaaacctaattaaccataggaaaatttattctggagagaaaccatacaaatgtgaagaatgtggaaaagcttttaatcgatcctcaacccttactagacataagaaaattcatactggagagaaaccctacaaatgtgaagaatgtgacagagcttttagccagtcttcaaaccttactgaacataagaaaattcatactggagagaaaccctataaatgtgaggaatgtggcaaagcttttaaccgattctcaacccttactaaacataagagaattcatactggagaaaaaccctataaatgtgaagaatgtggaaaagcctttaatcaatcctatcaacttactagacataagatagttcatactaaagagaaactcaacaaatgtgaagaatttggcaaggcctttaaacagtcctcacaccgtactatacataaaattattcatactggagagaaaccctacaaatgtgaagaacatggcaaagtttttaaccagtcctcaaaccttactacacaaaagataattcatactggagagaacctctacaaatttgaagaacatggaaaagcttttaacctattctcaaacattactaaccataagataatttatactggagagaaaccccacaaatgtgaagaatgtggaaaagcttataaccgattctcaaacctaactatacataagagaattcatacgggagagaaaccttaccaatgtgcagaatgtggcaaagcctttaactgctcctcaacccttaatagacataagataattcatactggagagaaaccttacaaatgtaaagaatgtggcaaagcttttaacctatcctcaacccttactgcacataagaaaattcatactggagagaaaccctataaatgtgaagaatgtggcaaagcttttaaccaatcctcaaaccttactacacataagaaaattcatacttcagagaaaccctacaaatgtgaagaatgtggcaaatcctttaaccagttctcatctcttaatatacataagataattcatactggagagaaaccctacaaatgtggagattatggcagagctttcaacctatcctcaaatcttactacacataagaaaattcatactggagagaaaccctacaaatgtgagtatggcaaaact

SEQ ID NO: 4219 - DNA, 2556 bp, Homo sapiens
  source 1..2556: mol_type = genomic DNA
atggaaccactgacatttaaagatgtcgccatagaattctctctggaggagtggcaatgcctggatactgcacagcgggatttatataggaatgtgttgttagagaactacagaaacctggtctttttgggtattgctgtctctaagccatatctgatcacctgtctggagcaaaaaaaagagccctggaatataaaaagacatgagatggtagccaaacccccagtaatgtcttttcattttgcccaagacctttggccagagcagaacataaaagattctttccagaaagtgacactgagaagatacggaaaatgtgaatatgagaatttacagttaagaaaaggctgtaaacatgtggatgagtgtacggggcacaaaggaggtcataatacagttaaccaatgtttgacagctaccccaagcaaaatattccagtgtaataaatatgtgaaagtctttgataaattttcaaattcaaatagatataagagaagacatacaggaaacaaacacttcaaatgtaaagaatgtagcaaatcattttgcgtgctttcacaactaactcagcatagaagaattcatactagagtgaattcctacaaatgtgaagaatgtggaaaagcctttaactggttctcaactcttactaaacataagagaattcatactggagaaaagccctacaaatgtgaagaatgtggcaaagcctttaaccagtcctcacaacttactaggcataagataattcatactgaagagaaacccaacaaatgtgaagaatgtggcaaggcctttaaacaggcctcacaccttactatacataaaataattcatactggagaaaaaccttacaaatatgaagaatgtggcaaagtctttagccagtcctcacaccttactacacaaaagatacttcacactggagagaacctctacaagtgtaaagaatgtggaaaagcttttaacctattctcaaatcttactaaccataagagaattcatgctggggagaaaccctacaaatgtaaagaatgtggcagagcttttaacatatcctcaaaccttaataaacaggagaaaattcatactggagggaaactcaacaaatgtgaagaatgtgacaaagcttttaaccgatccttaaaacttactgcacataagaaaattctaatggaagagaaaccctacaaatgtgaagaatgtggcaaagtctttaaccagttctcaactcttactagacataagataattcatactggagagaaaccctacaaatgtaaagaatgtggcaaagcttttaaccaatcttcaaaccttactgaacataagaaaattcatactgcagagaaatcctataaatgtgaagaatgtggcaaagcttttaaccaacactcaaacctaattaaccataggaaaatttattctggagagaaaccatacaaatgtgaagaatgtggaaaagcttttaatcgatcctcaacccttactagacataagaaaattcatactggagagaaaccctacaaatgtgaagaatgtgacagagcttttagccagtcttcaaaccttactgaacataagaaaattcatactggagagaaaccctataaatgtgaggaatgtggcaaagcttttaaccgattctcaacccttactaaacataagagaattcatactggagaaaaaccctataaatgtgaagaatgtggaaaagcctttaatcaatcctatcaacttactagacataagatagttcatactaaagagaaactcaacaaatgtgaagaatttggcaaggcctttaaacagtcctcacaccgtactatacataaaattattcatactggagagaaaccctacaaatgtgaagaacatggcaaagtttttaaccagtcctcaaaccttactacacaaaagataattcatactggagagaacctctacaaatttgaagaacatggaaaagcttttaacctattctcaaacattactaaccataagataatttatactggagagaaaccccacaaatgtgaagaatgtggaaaagcttataaccgattctcaaacctaactatacataagagaattcatacgggagagaaaccttaccaatgtgcagaatgtggcaaagcctttaactgctcctcaacccttaatagacataagataattcatactggagagaaaccttacaaatgtaaagaatgtggcaaagcttttaacctatcctcaacccttactgcacataagaaaattcatactggagagaaaccctataaatgtgaagaatgtggcaaagcttttaaccaatcctcaaaccttactacacataagaaaattcatacttcagagaaaccctacaaatgtgaagaatgtggcaaatcctttaaccagttctcatctcttaatatacataagataattcatactggagagaaaccctacaaatgtggagattatggcagagctttcaacctatcctcaaatcttactacacataagaaaattcatactggagagaaaccctacaaatgtgagtatggcaaaact

SEQ ID NO: 4220 - DNA, 2460 bp, Homo sapiens
  source 1..2460: mol_type = genomic DNA
atggaaccactgacatttaaagatgtcgccatagaattctctctggaggagtggcaatgcctggatactgcacagcgggatttatataggaatgtgttgttagagaactacagaaacctggtctttttggtaatgtcttttcattttgcccaagacctttggccagagcagaacataaaagattctttccagaaagtgacactgagaagatacggaaaatgtgaatatgagaatttacagttaagaaaaggctgtaaacatgtggatgagtgtacggggcacaaaggaggtcataatacagttaaccaatgtttgacagctaccccaagcaaaatattccagtgtaataaatatgtgaaagtctttgataaattttcaaattcaaatagatataagagaagacatacaggaaacaaacacttcaaatgtaaagaatgtagcaaatcattttgcgtgctttcacaactaactcagcatagaagaattcatactagagtgaattcctacaaatgtgaagaatgtggaaaagcctttaactggttctcaactcttactaaacataagagaattcatactggagaaaagccctacaaatgtgaagaatgtggcaaagcctttaaccagtcctcacaacttactaggcataagataattcatactgaagagaaacccaacaaatgtgaagaatgtggcaaggcctttaaacaggcctcacaccttactatacataaaataattcatactggagaaaaaccttacaaatatgaagaatgtggcaaagtctttagccagtcctcacaccttactacacaaaagatacttcacactggagagaacctctacaagtgtaaagaatgtggaaaagcttttaacctattctcaaatcttactaaccataagagaattcatgctggggagaaaccctacaaatgtaaagaatgtggcagagcttttaacatatcctcaaaccttaataaacaggagaaaattcatactggagggaaactcaacaaatgtgaagaatgtgacaaagcttttaaccgatccttaaaacttactgcacataagaaaattctaatggaagagaaaccctacaaatgtgaagaatgtggcaaagtctttaaccagttctcaactcttactagacataagataattcatactggagagaaaccctacaaatgtaaagaatgtggcaaagcttttaaccaatcttcaaaccttactgaacataagaaaattcatactgcagagaaatcctataaatgtgaagaatgtggcaaagcttttaaccaacactcaaacctaattaaccataggaaaatttattctggagagaaaccatacaaatgtgaagaatgtggaaaagcttttaatcgatcctcaacccttactagacataagaaaattcatactggagagaaaccctacaaatgtgaagaatgtgacagagcttttagccagtcttcaaaccttactgaacataagaaaattcatactggagagaaaccctataaatgtgaggaatgtggcaaagcttttaaccgattctcaacccttactaaacataagagaattcatactggagaaaaaccctataaatgtgaagaatgtggaaaagcctttaatcaatcctatcaacttactagacataagatagttcatactaaagagaaactcaacaaatgtgaagaatttggcaaggcctttaaacagtcctcacaccgtactatacataaaattattcatactggagagaaaccctacaaatgtgaagaacatggcaaagtttttaaccagtcctcaaaccttactacacaaaagataattcatactggagagaacctctacaaatttgaagaacatggaaaagcttttaacctattctcaaacattactaaccataagataatttatactggagagaaaccccacaaatgtgaagaatgtggaaaagcttataaccgattctcaaacctaactatacataagagaattcatacgggagagaaaccttaccaatgtgcagaatgtggcaaagcctttaactgctcctcaacccttaatagacataagataattcatactggagagaaaccttacaaatgtaaagaatgtggcaaagcttttaacctatcctcaacccttactgcacataagaaaattcatactggagagaaaccctataaatgtgaagaatgtggcaaagcttttaaccaatcctcaaaccttactacacataagaaaattcatacttcagagaaaccctacaaatgtgaagaatgtggcaaatcctttaaccagttctcatctcttaatatacataagataattcatactggagagaaaccctacaaatgtggagattatggcagagctttcaacctatcctcaaatcttactacacataagaaaattcatactggagagaaaccctacaaatgtgagtatggcaaaact

SEQ ID NO: 4221 - DNA, 1308 bp, Homo sapiens
  source 1..1308: mol_type = genomic DNA
atggactcagtggcctttgaggatgtggctgtgaacttcacccaggaggagtgggctttgctgagtccttcccagaagaatctctacagagatgtgacgctggaaaccttcaggaacctggcctcggtcggaatccaatggaaagaccaggacattgagaatctgtaccaaaacctggggattaagctaagaagtctggtggagagactctgtggacgtaaagaagggaatgaacacagagaaactttcagccagattcctgattgtcacctgaacaagaaaagtcaaactggagtgaaaccatgcaaatgcagcgtgtgtgggaaagtcttcctccgtcattcattcctggacaggcacatgagagctcatgctggacacaaacgatctgagtgtggtggggaatggagagagacgccccgtaaacagaaacaacatgggaaagcctccatttcccccagtagtggtgcacggcgcacagtaacaccaactcgaaagagaccttatgaatgcaaggtgtgcgggaaagcctttaattctcccaatttatttcaaatccatcaaagaactcacactggaaagaggtcctataaatgtagggaaatagtgagagccttcacagtttccagtttctttcgaaaacatggaaaaatgcatactggagaaaaacgctatgaatgtaaatactgtggaaaacctatcgattatcccagtttatttcaaattcatgttagaactcacactggagaaaaaccttacaaatgtaaacaatgtggtaaagccttcatttccgcaggttaccttcggacacatgaaatcagatctcacgcgctggagaaatcccaccaatgtcaggaatgtgggaaaaaactcagttgttccagttcccttcacagacatgaaagaactcatagtggaggaaaactctacgaatgtcaaaaatgtgccaaagtctttagatgtcccacgtcccttcaagcacatgaaagagctcacactggagaaagaccttatgaatgtaataaatgtggtaaaaccttcaattatcccagttgttttcgaagacataaaaaaactcatagtggagaaaagccatatgaatgtacaaggtgtggtaaagcctttgggtggtgcagttccctccgaagacatgaaatgactcacactggagaaaaaccctttgattgtaaacagtgtggtaaagtctttactttttcaaattaccttagacttcatgaaagaactcatttggccgggcgtagccagtgctttggcaggaggcagggggatcacctgagcccaggagtt

SEQ ID NO: 4222 - DNA, 1626 bp, Homo sapiens
  source 1..1626: mol_type = genomic DNA
atggatgacccgaggtatggaatgtgtcctctcaagggagcaagtggatgccctggggctgagaggagtcttctggtgcagtcttattttgaaaaggggccattgacgtttagggatgtggccatagaattctctctggaggagtggcaatgcctggacagtgctcagcagggtttgtataggaaagtgatgttagagaactacagaaacctggtcttcttggcaggtattgctctcactaagccagacctgatcacctgtctggagcaaggaaaagagccctggaatataaagagacatgagatggtagccaaacccccagttatatgttctcattttccccaagacctttgggcagagcaggacattaaagattcttttcaagaagcgattctgaaaaaatatggaaaatatggacatgacaatttacagttacaaaaaggctgtaaaagtgtggatgagtgtaaagtgcacaaagaacatgataacaaattaaaccagtgtttgataactacccagagcaacatatttcaatgtgatccatctgcaaaagtctttcatacattttcaaattcaaacagacataagataagacatactagaaagaaacctttcaaatgtaaaaaatgtgaaaaatcattttgcatgcttttacacctaactcaacataaaagatttcatattacagagaattcctaccaatgtaaagattgtggcaaagccttcaactggttctcaacccttactacacacaggagaattcatactggagagaaaccctacaaatgtgaagaatgtgggaaagcatttaaccggtcctcacaccttactacacataagataattcatactggagagaaaccatacagatgtgaagaatgtgggaaagcttttaaccggtcttcacaccttactacacataaaagaattcatactggagtgaaaccctacaaatgtacagaatgtggcaaagcttttaaccggtcctcacaccttactacacacaggataattcatactggagagaaaccctacaaatgtgaagaatgtggcaaagcctttaaccagtcctcaacccttactacacataagataactcatgctggagagaaaccttacaaatgtgaagaatgtggcaaagctttttaccgattctcataccttactaaacataagacaagtcatactggagagaaattctacaaatgtgaagaatgcggcaaaggctttaactggtcctcagccctcactaaacataagagaattcatactggagagaaaccctacaaatgtgaagaatgtggcaaagcttttaatgagtcctcaaaccttactacccataagatgattcatactggagagaaaccctacaaatgtgacgaatgtggcaaagcctttaaccggtcctcacaactaactgcacataagatgattcatactggagagaaaccctacaaatgtgaggaatgtggcaaagcttttaaccgatcctcaacccttactaaacataagataactcatactggagagaaatcttacaaatgggaagaatgtggtaaagactttaaccagtccctaagccttattaaacaaaataactcatactggagagaaaccctacaaatg

SEQ ID NO: 4223 - DNA, 1659 bp, Homo sapiens
  source 1..1659: mol_type = genomic DNA
atggcctttgaggatgtggctgtgtacttctcccaggaggagtgggggctcctggacacagcccagagggccctgtaccgccgcgtgatgctagacaacttcgcacttgtggcctcgctgggactctccacctctcgacctcgtgtggtcatccaactggagcgtggcgaggagccctgggttcccagtggaacggacacaaccctgtccaggaccacctacaggaggcgcaaccctggttcctggagtttgacagaggatagagatgtttctggagaatggccacgagctttcccagataccccacctgggatgactactagcgtcttccctgttgccggtgcctgccacagtgtaaaaagcctgcagagacaacggggtgcctccccatctcgggagagaaaacccacgggggtgtcggtgatctactgggagaggctcctgctaggctcaggcagtgggcaagccagcgtcagcctgcgactgacctccccgcttaggcctcccgagggcgtccggcttagagaaaagacactcacagagcatgcgttgctggggaggcagcccaggacgcctgagcggcagaaaccatgtgcacaggaggtccctgggagaacctttgggagcgcccaggacctggaggctgccggcggtcggggacatcaccgaatgggtgcagtttggcaggagcctcatagactcctcggtggccaggagccctcgacctgggacgagctgggcgaggctcttcacgctggggagaagtccttcgaatgcagggcgtgcagcaaagtgttcgtgaagagctccgacctcctcaagcacctacgcacccacaccggggagcggccctacgagtgcgcccagtgcggcaaggccttcagccagacgtcgcacttgacgcagcaccagcgcatccacagcggcgagacgccctacgcgtgccccgtgtgcggcaaggccttccggcatagctcctcgctggtgcggcaccagcgcatccacacggccgagaagtccttccgctgctccgagtgcggcaaggccttcagccacggctccaacctcagccagcaccgcaagatccacgcgggtgggcgtccttatgcttgcgcacagtgtggccgccgcttctgccgcaactcgcacctgatccagcacgagcgtacgcacacaggcgagaagcccttcgtgtgcgcgctctgcggtgctgccttcagccagggctcctcgctctttaagcaccagcgcgtgcacacaggcgagaagcccttcgcctgcccacagtgcggccgcgcctttagccacagctccaacctcacccagcaccagctcctgcacacgggcgagcggcccttccgctgcgtggactgtggcaaggccttcgccaagggcgccgtgctgctcagccaccggcgcattcacacgggcgagaagcccttcgtgtgtacgcagtgtggccgcgccttccgtgagcgcccggccctcttccaccaccagaggatccataccggcgagaagaccgtccggcgatccagggccagcctgcacccccaggccaggtctgttgccggggcatcatcagaaggtgcgccagcgaaggaaaccgagcccactcccgcctcgggcccagccgccgtctcgcagccagcggaggtc

SEQ ID NO: 4224 - DNA, 1524 bp, Homo sapiens
  source 1..1524: mol_type = genomic DNA
atgttaccgacccaagctggggccgcggcggctctgggccggggctcggccctggggggcagcctgaaccggaccccgacggggcggccgggcggcggcggcgggacacgcggggctaacgggggccgggtccccgggaatggcgcggggctcgggcccggccgcctggagcgggaggctgcggcagcggcggcaaccaccccggcgcccaccgcgggggccctctacagcggcagcgagggcgactcggagtcgggcgaggaggaggagctgggcgccgagcggcgcggcctgaagcggagcctgagcgagatggagatcggtatggtggtcggtgggcccgaggcgtcggcagcggccaccgggggctacgggccggtgagcggcgcggtgagcggggccaagccgggtaagaagacccggggccgcgtgaagatcaagatggagttcatcgacaacaagctgcggcgctacacgaccttcagcaagaggaagacgggcatcatgaagaaggcctatgagctgtccacgctgacagggacacaggtgctgttgctggtggccagtgagacaggccatgtgtatacctttgccacccgaaaactgcagcccatgatcaccagtgagaccggcaaggcactgattcagacctgcctcaactcgccagactctccaccccgttcagaccccacaacagaccagagaatgagtgccactggctttgaagagacagatctcacctaccaggtgtcggagtctgacagcagtggggagaccaaggacacactgaagccggcgttcacagtcaccaacctgccgggtacaacctccaccatccaaacagcacctagcacctctaccaccatgcaagtcagcagcggcccctcctttcccatcaccaactacctggcaccagtgtctgctagtgtcagccccagtgctgtcagcagtgccaatgggactgtgctgaagagtacaggcagcggccctgtctcctctgggggccttatgcagctgcctaccagcttcaccctcatgcctggtggggcagtggcccagcaggtcccagtgcaggccattcaagtgcaccaggccccacagcaagcgtctccctcccgtgacagcagcacagacctcacgcagacctcctccagcgggacagtgacgctgcccgccaccatcatgacgtcatccgtgcccacaactgtgggtggccacatgatgtaccctagcccgcatgcggtgatgtatgcccccacctcgggcctgggtgatggcagcctcaccgtgctgaatgccttctcccaggcaccatccaccatgcaggtgtcacacagccaggtccaggagccaggtggcgtcccccaggtgttcctgacagcatcatctgggacagtgcagatccctgtttcagcagttcagctccaccagatggctgtgatagggcagcaggccgggagcagcagcaacctcaccgagctacaggtggtgaacctggacaccgcccacagcaccaagagtgaa

SEQ ID NO: 4225 - DNA, 1623 bp, Homo sapiens
  source 1..1623: mol_type = genomic DNA
atgagattgaaaatgacgactcggaattttcctgagagagaagtaccctgtgatgtagaagtggaaagattcacaagggaagttccctgcttgtccagtttaggtgatggttgggactgtgagaaccaggagggacacttgaggcaatcagctttaactctggagaaaccagggactcaggaagcaatttgtgaatatcctggttttggggagcatttgattgcaagctcagaccttccaccgtctcagagagttctggcaacaaatggtttccatgcacctgactcaaatgttagtggtctggattgtgaccccgccttacccagctatcctaaaagttatgcagataagagaactggtgacagtgatgcctgtggaaaaggcttcaaccattccatggaagttattcatggaagaaatccagtgagagagaagccctacaaataccctgaaagtgttaagtcttttaatcattttacctctcttggtcatcagaaaataatgaaaagaggcaagaaatcgtatgaaggtaagaattttgagaacatctttactctgagctcatcgcttaatgaaaaccagagaaatctccctggagagaaacaatatagatgtactgaatgtggcaaatgcttcaaacggaactcttctcttgttttgcatcaccgaactcacaccggagagaagccttatacttgtaatgagtgtggaaagtccttctccaagaactacaacctgattgtgcatcaaagaatccacacaggagagaagccctatgaatgcagtaaatgtgggaaagctttcagtgatggctcagctctgacacagcaccagagaattcacacaggcgagaaaccttatgaatgcctagagtgtggaaaaaccttcaaccgaaattcatccttaattttgcaccaaagaactcatacaggggaaaaaccatatagatgtaacgaatgtgggaaacccttcactgacatctcccaccttacagtgcatctcagaatccacaccggtgagaagccctatgagtgtagcaaatgtggaaaggctttccgggacggctcgtacctcacccagcatgagaggactcacactggagaaaagccctttgagtgtgcagagtgcgggaaatccttcaacagaaactctcacctcattgtgcatcaaaagatccattctggggagaaaccctatgaatgtaaagaatgtggcaagactttcatcgagagtgcgtacctcatcaggcatcagaggattcatactggcgagaagccctatggctgcaaccagtgtcagaaacttttcaggaatatcgctggcctcattaggcaccagaggactcatactggtgagaagccctatgagtgtaatcagtgtggcaaagccttcagggacagctcctgtctgaccaagcaccagagaattcacactaaggagaccccatatcagtgtccagaatgtgggaagtccttcaagcagaactctcacctggcagtacatcagagactccatagcagggagggtcccagccggtgtcctcagtgtggaaaaatgttccaaaagagctcatcccttgttcgacatcaaagagcacacctgggagagcaacccatggaaaca

SEQ ID NO: 4226 - DNA, 612 bp, Homo sapiens
  source 1..612: mol_type = genomic DNA
atgcaatcatatgcttctgctatgttaagcgtattcaacagcgatgattacagtccagctgtgcaagagaatattcccgctctccggagaagctcttccttcctttgcactgaaagctgtaactctaagtatcagtgtgaaacgggagaaaacagtaaaggcaacgtccaggatagagtgaagcgacccatgaacgcattcatcgtgtggtctcgcgatcagaggcgcaagatggctctagagaatcccagaatgcgaaactcagagatcagcaagcagctgggataccagtggaaaatgcttactgaagccgaaaaatggccattcttccaggaggcacagaaattacaggccatgcacagagagaaatacccgaattataagtatcgacctcgtcggaaggcgaagatgctgccgaagaattgcagtttgcttcccgcagatcccgcttcggtactctgcagcgaagtgcaactggacaacaggttgtacagggatgactgtacgaaagccacacactcaagaatggagcaccagctaggccacttaccgcccatcaacgcagccagctcaccgcagcaacgggaccgctacagccactggacaaagctg

SEQ ID NO: 4227 - DNA, 921 bp, Homo sapiens
  source 1..921: mol_type = genomic DNA
atggaagctgataaagatgacacacaacaaattcttaaggagcattcgccagatgaatttataaaagatgaacaaaataagggactaattgatgaaattacaaagaaaaatattcaactaaagaaggagatccaaaagcttgaaacggagttacaagaggctaccaaagaattccagattaaagaggatattcctgaaacaaagatgaaattcttatcagttgaaactcctgagaatgacagccagttgtcaaatatctcctgttcgtttcaagtgagctcgaaagttccttatgagatacaaaaaggacaagcacttatcacctttgaaaaagaagaagttgctcaaaatgtggtaagcatgagtaaacatcatgtacagataaaagatgtaaatctggaggttacggccaagccagttccattaaattcaggagtcagattccaggtttatgtagaagtttctaaaatgaaaatcaatgttactgaaattcctgacacattgcgtgaagatcaaatgagagacaaactagagctgagcttttcaaagtcccgaaatggaggcggagaggtggaccgcgtggactatgacagacagtccgggagtgcagtcatcacgtttgtggagattggagtggctgacaagattttgaaaaagaaagaataccctctttatataaatcaaacctgccatagagttactgtttctccatacacagaaatacacttgaaaaagtatcagatattttcaggaacatctaagaggacagtgcttctgacaggaatggaaggcattcaaatggatgaagaaattgtggaggatttaattaacattcactttcaacgggcaaagaatggaggtggagaagtagatgtggtcaagtgttctctaggtcaacctcacatagcatactttgaagaa

SEQ ID NO: 4228 - DNA, 1359 bp, Homo sapiens
  source 1..1359: mol_type = genomic DNA
atgcgggtccagaatgagggaactggcaagagctcttggtggatcatcaaccctgatggggggaagagcggaaaagccccccggcggcgggctgtctccatggacaatagcaacaagtataccaagagccgtggccgcgcagccaagaagaaggcagccctgcagacagcccccgaatcagctgacgacagtccctcccagctctccaagtggcctggcagccccacgtcacgcagcagtgatgagctggatgcgtggacggacttccgttcacgcaccaattctaacgccagcacagtcagtggccgcctgtcgcccatcatggcaagcacagagttggatgaagtccaggacgatgatgcgcctctctcgcccatgctctacagcagctcagccagcctgtcaccttcagtaagcaagccgtgcacggtggaactgccacggctgactgatatggcaggcaccatgaatctgaatgatgggctgactgaaaacctcatggacgacctgctggataacatcacgctcccgccatcccagccatcgcccactgggggactcatgcagcggagctctagcttcccgtataccaccaagggctcgggcctgggctccccaaccagctcctttaacagcacggtgttcggaccttcatctctgaactccctacgccagtctcccatgcagaccatccaagagaacaagccagctaccttctcttccatgtcacactatggtaaccagacactccaggacctgctcacttcggactcacttagccacagcgatgtcatgatgacacagtcggaccccttgatgtctcaggccagcaccgctgtgtctgcccagaattcccgccggaacgtgatgcttcgcaatgatccgatgatgtcctttgctgcccagcctaaccagggaagtttggtcaatcagaacttgctccaccaccagcaccaaacccagggcgctcttggtggcagccgtgccttgtcgaattctgtcagcaacatgggcttgagtgagtccagcagccttgggtcagccaaacaccagcagcagtctcctgtcagccagtctatgcaaaccctctcggactctctctcaggctcctccttgtactcaactagtgcaaacctgcccgtcatgggccatgagaagttccccagcgacttggacctggacatgttcaatgggagcttggaatgtgacatggagtccattatccgtagtgaactcatggatgctgatgggttggattttaactttgattccctcatctccacacagaatgttgttggtttgaacgtggggaacttcactggtgctaagcaggcctcatctcagagctgggtgccaggc

SEQ ID NO: 4229 - DNA, 1965 bp, Homo sapiens
  source 1..1965: mol_type = genomic DNA
atggccgaggcgcctcaggtggtggagatcgacccggacttcgagccgctgccccggccgcgctcgtgcacctggccgctgcccaggccggagtttagccagtccaactcggccacctccagcccggcgccgtcgggcagcgcggctgccaaccccgacgccgcggcgggcctgccctcggcctcggctgccgctgtcagcgccgacttcatgagcaacctgagcttgctggaggagagcgaggacttcccgcaggcgcccggctccgtggcggcggcggtggcggcggcggccgccgcggccgccaccggggggctgtgcggggacttccagggcccggaggcgggctgcctgcacccagcgccaccgcagcccccgccgcccgggccgctgtcgcagcacccgccggtgccccccgccgccgctgggccgctcgcggggcagccgcgcaagagcagctcgtcccgccgcaacgcgtggggcaacctgtcctacgccgacctcatcaccaaggccatcgagagctcggcggagaagcggctcacgctgtcgcagatctacgagtggatggtcaagagcgtgccctacttcaaggataagggtgacagcaacagctcggcgggctggaagaattcaattcgtcataatctgtccctacacagcaagttcattcgtgtgcagaatgaaggaactggaaaaagttcttggtggatgctcaatccagagggtggcaagagcgggaaatctcctaggagaagagctgcatccatggacaacaacagtaaatttgctaagagccgaagccgagctgccaagaagaaagcatctctccagtctggccaggagggtgctggggacagccctggatcacagttttccaaatggcctgcaagccctggctctcacagcaatgatgactttgataactggagtacatttcgccctcgaactagctcaaatgctagtactattagtgggagactctcacccattatgaccgaacaggatgatcttggagaaggggatgtgcattctatggtgtacccgccatctgccgcaaagatggcctctactttacccagtctgtctgagataagcaatcccgaaaacatggaaaatcttttggataatctcaaccttctctcatcaccaacatcattaactgtttcgacccagtcctcacctggcaccatgatgcagcagacgccgtgctactcgtttgcgccaccaaacaccagtttgaattcacccagcccaaactaccaaaaatatacatatggccaatccagcatgagccctttgccccagatgcctatacaaacacttcaggacaataagtcgagttatggaggtatgagtcagtataactgtgcgcctggactcttgaaggagttgctgacttctgactctcctccccataatgacattatgacaccagttgatcctggggtagcccagcccaacagccgggttctgggccagaacgtcatgatgggccctaattcggtcatgtcaacctatggcagccaggcatctcataacaaaatgatgaatcccagctcccatacccaccctggacatgctcagcagacatctgcagttaacgggcgtcccctgccccacacggtaagcaccatgccccacacctcgggtatgaaccgcctgacccaagtgaagacacctgtacaagtgcctctgccccaccccatgcagatgagtgccctggggggctactcctccgtgagcagctgcaatggctatggcagaatgggccttctccaccaggagaagctcccaagtgacttggatggcatgttcattgagcgcttagactgtgacatggaatccatcattcggaatgacctcatggatggagatacattggattttaactttgacaatgtgttgcccaaccaaagcttcccacacagtgtcaagacaacgacacatagctgggtgtcaggc

SEQ ID NO: 4230 - DNA, 1476 bp, Homo sapiens
  source 1..1476: mol_type = genomic DNA
atggctgcgaagctgcgagcgcatcaggtggacgtggacccggacttcgcgccgcagagccggccgcgctcgtgtacctggcccctgccgcagcctgacttggccggcgacgaggacggagcgctgggcgcaggggtggccgagggcgccgaggactgcgggccggagcgccgggctacggccccggcgatggccccagcgccgcccctgggcgcggaggtcggaccgctgcggaaagcgaagagctctcggcggaacgcgtgggggaacctgtcctacgccgacctcatcaccaaagccatcgagagcgccccggacaagcggctcacgctctcgcagatctacgactggatggtccgttacgtgccctacttcaaggataaaggcgacagcaacagctcggccggctggaagaactccatccggcacaacctgtcgctgcacacccgtttcatccgcgtgcagaacgagggcaccggcaagagttcgtggtggatgctgaaccccgagggcggaaagacagggaagaccccgcggcgcagggccgtgtccatggacaacggggccaagttcctgcgcatcaagggcaaggcgagcaagaagaagcagctgcaggcgcccgagcgaagcccggacgacagctccccgagtgcgcccgccccggggccggtgcctgccgcagccaagtgggccgccagccccgcctcgcacgccagcgacgactacgaggcttgggccgacttccgcggcggcgggagacccctgctcggggaggcggccgagctggaggacgacgaggccctggaggccctggcgccatcatcgccgctcatgtacccaagccccgccagcgcgctgtcgccggcgctgggctcgcgctgtccgggtgagctgccccgcctggccgagctgggaggcccgctgggcctgcacggcggcggcggcgcggggctgcccgagggcctgctggacggcgcgcaggacgcgtacgggccgcgggcccgcgccaggcccggcccggtgctgggtgcgccgggggagctggcgctggcgggcgcagccgccgcctaccccggcaaaggggcggccccgtacgcgccgcccgcgccctcgcgcagtgccttagcccaccccatcagccttatgacgctgcccggcgaggcgggcgccgcgggcctggcaccgccgggccacgccgccgccttcgggggcccgcccggcggcctcctgctggacgctctgccggggccctacgctgccgccgccgccgggccgctgggcgccgcgcccgaccgcttcccggccgacctggacctcgacatgttcagcgggagcctcgagtgcgacgtggagtccatcatcctcaacgacttcatggacagcgacgaaatggacttcaacttcgattcggccctgcctccgccgccgccgggcctggccggggccccgccccccaaccagagctgggtgccgggc

SEQ ID NO: 4231 - DNA, 1515 bp, Homo sapiens
  source 1..1515: mol_type = genomic DNA
atggatccggggaatgagaattcagccacagaggctgccgcgatcatagacctagatcccgacttcgaaccccagagccgtccccgctcctgcacctggccccttccccgaccagagatcgctaaccagccgtccgagccgcccgaggtggagccagatctgggggaaaaggtacacacggaggggcgctcagagccgatcctgttgccctctcggctcccagagccggccgggggcccccagcccggaatcctgggggctgtaacaggtcctcggaagggaggctcccgccggaatgcctggggaaatcagtcatatgcagaactcatcagccaggccattgaaagcgccccggagaagcgactgacacttgcccagatctacgagtggatggtccgtactgtaccctacttcaaggacaagggtgacagcaacagctcagcaggatggaagaactcgatccgccacaacctgtccctgcacagcaagttcatcaaggttcacaacgaggccaccggcaaaagctcttggtggatgctgaaccctgagggaggcaagagcggcaaagccccccgccgccgggccgcctccatggatagcagcagcaagctgctccggggccgcagtaaagcccccaagaagaaaccatctgtgctgccagctccacccgaaggtgccactccaacgagccctgtcggccactttgccaagtggtcaggcagcccttgctctcgaaaccgtgaagaagccgatatgtggaccaccttccgtccacgaagcagttcaaatgccagcagtgtcagcacccggctgtcccccttgaggccagagtctgaggtgctggcggaggaaataccagcttcagtcagcagttatgcagggggtgtccctcccaccctcaatgaaggtctagagctgttagatgggctcaatctcacctcttcccattccctgctatctcggagtggtctctctggcttctctttgcagcatcctggggttaccggccccttacacacctacagcagctcccttttcagcccagcagaggggcccctgtcagcaggagaagggtgcttctccagctcccaggctctggaggccctgctcacctctgatacgccaccaccccctgctgacgtcctcatgacccaggtagatcccattctgtcccaggctccgactcttctgttgctgggggggcttccttcctccagtaagctggccacgggcgtcggcctgtgtcccaagcccctagaggctccaggccccagcagtctggttcccaccctttctatgatagcaccacctccagtcatggcaagtgcccccatccccaaggctctggggactcctgtgctcacaccccctactgaagctgcaagccaagacagaatgcctcaggatctagatcttgatatgtatatggagaacctggagtgtgacatggataacatcatcagtgacctcatggatgagggcgagggactggacttcaactttgagccagatccc

SEQ ID NO: 4232 - DNA, 1350 bp, Homo sapiens
  source 1..1350: mol_type = genomic DNA
atggatccggggaatgagaattcagccacagaggctgccgcgatcatagacctagatcccgacttcgaaccccagagccgtccccgctcctgcacctggccccttccccgaccagagatcgctaaccagccgtccgagccgcccgaggtggagccagatctgggggaaaaggccattgaaagcgccccggagaagcgactgacacttgcccagatctacgagtggatggtccgtactgtaccctacttcaaggacaagggtgacagcaacagctcagcaggatggaagaactcgatccgccacaacctgtccctgcacagcaagttcatcaaggttcacaacgaggccaccggcaaaagctcttggtggatgctgaaccctgagggaggcaagagcggcaaagccccccgccgccgggccgcctccatggatagcagcagcaagctgctccggggccgcagtaaagcccccaagaagaaaccatctgtgctgccagctccacccgaaggtgccactccaacgagccctgtcggccactttgccaagtggtcaggcagcccttgctctcgaaaccgtgaagaagccgatatgtggaccaccttccgtccacgaagcagttcaaatgccagcagtgtcagcacccggctgtcccccttgaggccagagtctgaggtgctggcggaggaaataccagcttcagtcagcagttatgcagggggtgtccctcccaccctcaatgaaggtctagagctgttagatgggctcaatctcacctcttcccattccctgctatctcggagtggtctctctggcttctctttgcagcatcctggggttaccggccccttacacacctacagcagctcccttttcagcccagcagaggggcccctgtcagcaggagaagggtgcttctccagctcccaggctctggaggccctgctcacctctgatacgccaccaccccctgctgacgtcctcatgacccaggtagatcccattctgtcccaggctccgactcttctgttgctgggggggcttccttcctccagtaagctggccacgggcgtcggcctgtgtcccaagcccctagaggctccaggccccagcagtctggttcccaccctttctatgatagcaccacctccagtcatggcaagtgcccccatccccaaggctctggggactcctgtgctcacaccccctactgaagctgcaagccaagacagaatgcctcaggatctagatcttgatatgtatatggagaacctggagtgtgacatggataacatcatcagtgacctcatggatgagggcgagggactggacttcaactttgagccagatccc

SEQ ID NO: 4233 - DNA, 1593 bp, Homo sapiens
  source 1..1593: mol_type = genomic DNA
atgatggacggccgcctcctggaacacccgcatgcccagttcgggggctcgctgggcggcgtggtgggcttcccctacccgctgggccaccaccacgtgtacgagctggccgggcaccagctgcagtcggccgccgccgccgcctcggtgcccttctccatcgacggcctgctcgggggctcgtgcgccgccgccgcctcggtggtcaaccccacgccgctgctgccagccgcctgcggggtcggcggggacggccagcccttcaagctgtcagactcgggggacccggacaaggagagcccgggctgcaagcggcggcgcacccgcaccaacttcaccggctggcagctggaggagctggagaaggcgttcaacgagagccactatcccgacgtgttcatgcgcgaggcgctggcgctgcgcctagacctggtcgagtcccgagttcaggtctggttccaaaaccgccgggccaagtggaggaagaaggagaacacgaaaaagggcccggggcggccggcgcacaactcgcacccgaccacgtgcagcggcgagcccatggacccggaggagatcgcgcgcaaggagctggagaagatggagaagaagaagcgcaagcacgagaagaagctgctgaagagccagggccgccacttgcactcgcccggcggcctgtccctgcacagcgcgcccagctccgacagcgacagcggcggcggcggcctgtctccggagccgcccgagccgccgccgcccgccgccaagggccccggagcgcacgcctcgggcgccgcggggaccgcgcccgcccctcccggcgagccgcctgcacccggcacctgcgaccccgccttctacccgagccaaagaagcggcgccggcccacagccgcgcccaggtcgccctgcggacaaggacgcggcctcgtgcgggccaggggccgctgtggcggcggtggagcgcggcgccgcggggctgcccaaggccagcccattcagcgtggagagcctcctgtccgactcgccgccgcgccggaaagccgcttccaacgccgccgccgccgccgccgcggggctggacttcgcgcccgggctgccgtgcgcgccgcggaccctgatcggcaagggccacttcctcctctaccccatcacgcagccgctcggcttcctggtgccgcaggccgcgctcaagggcggcgcgggcctggagccggcgcccaaggacgcgccgcccgcgcccgccgtgccgcccgcgccgcctgcccaggccagtttcggggccttctcggggcccggcggcgccccggactcggccttcgcgcgtcgcagccccgacgccgtcgcctccccgggggccccagccccggccccggcgcctttccgggacctcgcctcggcagcggctaccgagggcggcggcggggactgcgcggacgcggggaccgccggccccgcgcccccgccgcccgcgccgtcgcccaggcccggccctcggcctcccagccccgccgaggagccggccacctgcggggttcccgagcctggcgcggcggccggacccagcccgccggagggcgaggagctggacatggac

SEQ ID NO: 4234 - DNA, 4023 bp, Homo sapiens
  source 1..4023: mol_type = genomic DNA
atgacaaagaggaagaagaccatcaaccttaatatacaagacgcccagaagaggactgctctacactgggcctgtgtcaatggccatgaggaagtagtaacatttctggtagacagaaagtgccagcttgacgtccttgatggcgaacacaggacacctctgatgaaggctctacaatgccatcaggaggcttgtgcaaatattctgatagattctggtgccgatataaatctcgtagatgtgtatggcaacacggctctccattatgctgtttatagtgagattttgtcagtggtggcaaaactgctgtcccatggtgcagtcatcgaagtgcacaacaaggctagcctcacaccacttttactatccataacgaaaagaagtgagcaaattgtggaatttttgctgataaaaaatgcaaatgcgaatgcagttaataagtataaatgcacagccctcatgcttgctgtatgtcatggatcatcagagatagttggcatgcttcttcagcaaaatgttgacgtctttgctgcagatatatgtggagtaactgcagaacattatgctgttacttgtggatttcatcacattcatgaacaaattatggaatatatacgaaaattatctaaaaatcatcaaaataccaatccagaaggaacatctgcaggaacacctgatgaggctgcacccttggcggaaagaacacctgacacagctgaaagcttggtggaaaaaacacctgatgaggctgcacccttggtggaaagaacacctgacacggctgaaagcttggtggaaaaaacacctgatgaggctgcatccttggtggagggaacatctgacaaaattcaatgtttggagaaagcgacatctggaaagttcgaacagtcagcagaagaaacacctagggaaattacgagtcctgcaaaagaaacatctgagaaatttacgtggccagcaaaaggaagacctaggaagatcgcatgggagaaaaaagaagacacacctagggaaattatgagtcccgcaaaagaaacatctgagaaatttacgtgggcagcaaaaggaagacctaggaagatcgcatgggagaaaaaagaaacacctgtaaagactggatgcgtggcaagagtaacatctaataaaactaaagttttggaaaaaggaagatctaagatgattgcatgtcctacaaaagaatcatctacaaaagcaagtgccaatgatcagaggttcccatcagaatccaaacaagaggaagatgaagaatattcttgtgattctcggagtctctttgagagttctgcaaagattcaagtgtgtatacctgagtctatatatcaaaaagtaatggagataaatagagaagtagaagagcctcctaagaagccatctgccttcaagcctgccattgaaatgcaaaactctgttccaaataaagcctttgaattgaagaatgaacaaacattgagagcagatccgatgttcccaccagaatccaaacaaaaggactatgaagaaaattcttgggattctgagagtctctgtgagactgtttcacagaaggatgtgtgtttacccaaggctacacatcaaaaagaaatagataaaataaatggaaaattagaagagtctcctaataaagatggtcttctgaaggctacctgcggaatgaaagtttctattccaactaaagccttagaattgaaggacatgcaaactttcaaagcagagcctccggggaagccatctgccttcgagcctgccactgaaatgcaaaagtctgtcccaaataaagccttggaattgaaaaatgaacaaacattgagagcagatgagatactcccatcagaatccaaacaaaaggactatgaagaaaattcttgggatactgagagtctctgtgagactgtttcacagaaggatgtgtgtttacccaaggctgcgcatcaaaaagaaatagataaaataaatggaaaattagaagggtctcctgttaaagatggtcttctgaaggctaactgcggaatgaaagtttctattccaactaaagccttagaattgatggacatgcaaactttcaaagcagagcctcccgagaagccatctgccttcgagcctgccattgaaatgcaaaagtctgttccaaataaagccttggaattgaagaatgaacaaacattgagagcagatgagatactcccatcagaatccaaacaaaaggactatgaagaaagttcttgggattctgagagtctctgtgagactgtttcacagaaggatgtgtgtttacccaaggctacgcatcaaaaagaaatagataaaataaatggaaaattagaagagtctcctgataatgatggttttctgaaggctccctgcagaatgaaagtttctattccaactaaagccttagaattgatggacatgcaaactttcaaagcagagcctcccgagaagccatctgccttcgagcctgccattgaaatgcaaaagtctgttccaaataaagccttggaattgaagaatgaacaaacattgagagcagatcagatgttcccttcagaatcaaaacaaaagaaggttgaagaaaattcttgggattctgagagtctccgtgagactgtttcacagaaggatgtgtgtgtacccaaggctacacatcaaaaagaaatggataaaataagtggaaaattagaagattcaactagcctatcaaaaatcttggatacagttcattcttgtgaaagagcaagggaacttcaaaaagatcactgtgaacaacgtacaggaaaaatggaacaaatgaaaaagaagttttgtgtactgaaaaagaaactgtcagaagcaaaagaaataaaatcacagttagagaaccaaaaagttaaatgggaacaagagctctgcagtgtgagattgactttaaaccaagaagaagagaagagaagaaatgccgatatattaaatgaaaaaattagggaagaattaggaagaatcgaagagcagcataggaaagagttagaagtgaaacaacaacttgaacaggctctcagaatacaagatatagaattgaagagtgtagaaagtaatttgaatcaggtttctcacactcatgaaaatgaaaattatctcttacatgaaaattgcatgttgaaaaaggaaattgccatgctaaaactggaaatagccacactgaaacaccaataccaggaaaaggaaaataaatactttgaggacattaagattttaaaagaaaagaatgctgaacttcagatgaccctaaaactgaaagaggaatcattaactaaaagggcatctcaatatagtgggcagcttaaagttctgatagctgagaacacaatgctcacttctaaattgaaggaaaaacaagacaaagaaatactagaggcagaaattgaatcacaccatcctagactggcttctgctgtacaagaccatgatcaaattgtgacatcaagaaaaagtcaagaacctgctttccacattgcaggagatgcttgtttgcaaagaaaaatgaatgttgatgtgagtagtacgatatataacaatgaggtgctccatcaaccactttctgaagctcaaaggaaatccaaaagcctaaaaattaatctcaattatgcaggagatgctctaagagaaaatacattggtttcagaacatgcacaaagagaccaacgtgaaacacagtgtcaaatgaaggaagctgaacacatgtatcaaaacgaacaagataatgtgaacaaacacactgaacagcaggagtctctagatcagaaattatttcaactacaaagcaaaaatatgtggcttcaacagcaattagttcatgcacataagaaagctgacaacaaaagcaagataacaattgatattcattttcttgagaggaaaatgcaacatcatctcctaaaagagaaaaatgaggagatatttaattacaataaccatttaaaaaaccgtatatatcaatatgaaaaagagaaagcagaaacagaaaactca

SEQ ID NO: 4235 - DNA, 1500 bp, Homo sapiens
  source 1..1500: mol_type = genomic DNA
atggccactgtcattcctggtgatttgtcagaagtaagagatacccagaaagtcccttcagggaaacgtaagcgtggtgaaaccaaaccaagaaaaaactttccttgccaactgtgtgacaaggcctttaacagtgttgagaaattaaaggttcactcctactctcacacaggagagaggccctacaagtgcatacaacaagactgcaccaaggcctttgtttctaagtacaaattacaaaggcacatggctactcattctcctgagaaaacccacaagtgtaattattgtgagaaaatgtttcaccggaaagatcatctgaagaatcacctccatacacacgaccctaacaaagagacgtttaagtgcgaagaatgtggcaagaactacaataccaagcttggatttaaacgtcacttggccttgcatgccgcaacaagtggtgacctcacctgtaaggtatgtttgcaaacttttgaaagcacgggagtgcttctggagcaccttaaatctcatgcaggcaagtcgtctggtggggttaaagaaaaaaagcaccagtgcgaacattgtgatcgccggttctacacccgaaaggatgtccggagacacatggtggtgcacactggaagaaaggacttcctctgtcagtattgtgcacagagatttgggcgaaaggatcacctgactcgacatatgaagaagagtcacaatcaagagcttctgaaggtcaaaacagaaccagtggatttccttgacccatttacctgcaatgtgtctgtgcctataaaagacgagctccttccggtgatgtccttaccttccagtgaactgttatcaaagccattcacaaacactttgcagttaaacctctacaacactccatttcagtccatgcagagctcgggatctgcccaccaaatgatcacaactttacctttgggaatgacatgcccaatagatatggacactgttcatccctctcaccacctttctttcaaatatccgttcagttctacctcatatgcaatttctattcctgaaaaagaacagccattaaagggggaaattgagagttacctgatggagttacaaggtggcgtgccctcttcatcccaagattctcaagcatcgtcatcatctaagctagggttggatcctcagattgggtccctagatgatggtgcaggagacctctccctatccaaaagctctatctccatcagtgaccccctaaacacaccagcattggatttttctcagttgtttaatttcatacctttaaatggtcctccctataatcctctatcagtggggagccttggaatgagctattcccaggaagaagcacattcttctgtttcccagctccccccacaaacacaggatcttcaggatcctgcaaacactatagggcttgggtctctgcactcactgtcagcagctttcaccagcagtttaagcacaagtaccaccctcccacgtttccatcaagcttttcag

SEQ ID NO: 4236 - DNA, 1254 bp, Homo sapiens
  source 1..1254: mol_type = genomic DNA
atggctactcattctcctgagaaaacccacaagtgtaattattgtgagaaaatgtttcaccggaaagatcatctgaagaatcacctccatacacacgaccctaacaaagagacgtttaagtgcgaagaatgtggcaagaactacaataccaagcttggatttaaacgtcacttggccttgcatgccgcaacaagtggtgacctcacctgtaaggtatgtttgcaaacttttgaaagcacgggagtgcttctggagcaccttaaatctcatgcaggcaagtcgtctggtggggttaaagaaaaaaagcaccagtgcgaacattgtgatcgccggttctacacccgaaaggatgtccggagacacatggtggtgcacactggaagaaaggacttcctctgtcagtattgtgcacagagatttgggcgaaaggatcacctgactcgacatatgaagaagagtcacaatcaagagcttctgaaggtcaaaacagaaccagtggatttccttgacccatttacctgcaatgtgtctgtgcctataaaagacgagctccttccggtgatgtccttaccttccagtgaactgttatcaaagccattcacaaacactttgcagttaaacctctacaacactccatttcagtccatgcagagctcgggatctgcccaccaaatgatcacaactttacctttgggaatgacatgcccaatagatatggacactgttcatccctctcaccacctttctttcaaatatccgttcagttctacctcatatgcaatttctattcctgaaaaagaacagccattaaagggggaaattgagagttacctgatggagttacaaggtggcgtgccctcttcatcccaagattctcaagcatcgtcatcatctaagctagggttggatcctcagattgggtccctagatgatggtgcaggagacctctccctatccaaaagctctatctccatcagtgaccccctaaacacaccagcattggatttttctcagttgtttaatttcatacctttaaatggtcctccctataatcctctatcagtggggagccttggaatgagctattcccaggaagaagcacattcttctgtttcccagctccccccacaaacacaggatcttcaggatcctgcaaacactatagggcttgggtctctgcactcactgtcagcagctttcaccagcagtttaagcacaagtaccaccctcccacgtttccatcaagcttttcag

SEQ ID NO: 4237 - DNA, 1182 bp, Homo sapiens
  source 1..1182: mol_type = genomic DNA
atgatgatgatggcgctgagcaagaccttcgggcagaagcccgtgaagttccagctggaggacgacggcgagttctacatgatcggctccgaggtgggaaactacctccgtatgttccgaggttctctgtacaagagatacccctcactctggaggcgactagccactgtggaagagaggaagaaaatagttgcatcgtcacatgatcacggatacacgactctagccaccagtgtgaccctgttaaaagcctcggaagtggaagagattctggatggcaacgatgagaagtacaaggctgtgtccatcagcacagagccccccacctacctcagggaacagaaggccaagaggaacagccagtgggtacccaccctgcccaacagctcccaccacttagatgccgtgccatgctccacaaccatcaacaggaaccgcatgggccgagacaagaagagaaccttccccctttggtgtggatgcatcgctgcactcaccctccgtgctgattccgccttagttctccactttgatgaccatgacccagctgtgatccatgagaacgcatctcagcccgaggtgctggtccccatccggctggacatggagatcgatgggcagaagctgcgagacgccttcacctggaacatgaatgagaagttgatgacgcctgagatgttttcagaaatcctctgtgacgatctggatttgaacccgctgacgtttgtgccagccatcgcctctgccatcagacagcagatcgagtcctaccccacggacagcatcctggaggaccagtcagaccagcgcgtcatcatcaagctgaacatccatgtgggaaacatttccctggtggaccagtttgagtgggacatgtcagagaaggagaactcaccagagaagtttgccctgaagctgtgctcggagctggggttgggcggggagtttgtcaccaccatcgcatacagcatccggggacagctgagctggcatcagaagacctacgccttcagcgagaaccctctgcccacagtggagattgccatccggaacacgggcgatgcggaccagtggtgcccactgctggagactctgacagacgctgagatggagaagaagatccgcgaccaggacaggaacacgaggcggatgaggcgtcttgccaacacggccccggcctgg

SEQ ID NO: 4238 - DNA, 1155 bp, Homo sapiens
  source 1..1155: mol_type = genomic DNA
atgatgatgatggcgctgagcaagaccttcgggcagaagcccgtgaagttccagctggaggacgacggcgagttctacatgatcggctccgaggtgggaaactacctccgtatgttccgaggttctctgtacaagagatacccctcactctggaggcgactagccactgtggaagagaggaagaaaatagttgcatcgtcacatggtaaaaaaacaaaacctaacactaaggatcacggatacacgactctagccaccagtgtgaccctgttaaaagcctcggaagtggaagagattctggatggcaacgatgagaagtacaaggctgtgtccatcagcacagagccccccacctacctcagggaacagaaggccaagaggaacagccagtgggtacccaccctgcccaacagctcccaccacttagatgccgtgccatgctccacaaccatcaacaggaaccgcatgggccgagacaagaagagaaccttccccctttgctttgatgaccatgacccagctgtgatccatgagaacgcatctcagcccgaggtgctggtccccatccggctggacatggagatcgatgggcagaagctgcgagacgccttcacctggaacatgaatgagaagttgatgacgcctgagatgttttcagaaatcctctgtgacgatctggatttgaacccgctgacgtttgtgccagccatcgcctctgccatcagacagcagatcgagtcctaccccacggacagcatcctggaggaccagtcagaccagcgcgtcatcatcaagctgaacatccatgtgggaaacatttccctggtggaccagtttgagtgggacatgtcagagaaggagaactcaccagagaagtttgccctgaagctgtgctcggagctggggttgggcggggagtttgtcaccaccatcgcatacagcatccggggacagctgagctggcatcagaagacctacgccttcagcgagaaccctctgcccacagtggagattgccatccggaacacgggcgatgcggaccagtggtgcccactgctggagactctgacagacgctgagatggagaagaagatccgcgaccaggacaggaacacgaggcggatgaggcgtcttgccaacacggccccggcctgg

SEQ ID NO: 4239 - DNA, 1632 bp, Homo sapiens
  source 1..1632: mol_type = genomic DNA
atggcagttatggacctatcctccccatgggctttaactaaacaggactctgcctgtttccatctgagaaatgctgaagaggaaaggatgattgctgtatttctgacaacctggttacaggaaccaatgactttcaaagatgtagctgtggagttcactcaggaggagtggatgatgctggattctgctcaaagaagtctgtacagagatgtgatgttggaaaactatagaaatctcacctccgtggaatatcagttgtacaggcttactgtgatctccccattggatcaagaagagataaggaatatgaaaaagagaattccccaagccatctgtccagaccagaagattcaacctaaaaccaaagaatcaactgtgcagaaaattttgtgggaggaaccatccaatgcagtgaaaatgataaaactcacaatgcataattggtcctccacattaagagaagactgggaatgccataagatcagaaaacagcataagattccagggggacattggaggcaaatgatatatgccccaaagaaaacagtacctcaggagctattccgtgactatcatgaattagaggaaaactctaaacttggatcaaaacttattttttcacagagcattttcaccagtaaacattgccaaaaatgttactcagagattggatgtttgaaacacaattcaatcataaacaattatgtgaaaaactctataagtgagaagctctatgaaagtcatgaatgtgatacaactctatggcattttcagagaaatcaaacagtacaaaaagagtacacatattctaaacatggaatgcacttcacacataatatgtttcctgtacctaacaatttgcatatggcacagaatgcctgtgaatgtaataaagatgaaacgctgtgtcatcaatcatcccttaagaaacaaggacaaactcatactgaaaagaaacatgaatgcaatcaatgtggaaaagccttcaaaaggatttctaatcttactttatacaagaaaagtcacatgggtgagaaacaatatgaatgtaaagaatgtggtaaagtgttcaatgattcctcaaccttaaggagacatgtaagaactcacactggagagaaaccctatgaatgtaatcaatgtggaaaagctttcagtcaaaaaacatcccttaaggctcacatgagaactcacactggagagaaaccttatgaatgtaatcagtgtggaaaatcctttggcacaagctcttaccttatagtgcacaagagaatacacactggagaaaaactctatgaatgcagtgagtgtggaaaagccttcaacacgagctctcaccttaaagttcataagaaaattcataccggagagaatgtttatgaatgcagtgactgtgggaaagttttcagtggggtctcatcccttagaatgcatataagaactcacactggagagaaaccctatgaatgtaaggaatgtaggaaagccttcagtgtttcctcttcccttaggaggcatgtgagaattcacactggagagaaaccctatgaatgtattcaatgtggaaaagccttcagtcagagctcttcacttattatacacaagagaattcatactgagagagaaaccctg

SEQ ID NO: 4240 - DNA, 870 bp, Homo sapiens
  source 1..870: mol_type = genomic DNA
atgaggcctgcggtgctgggctccccagaccgagcacccccagaagatgaggggcctgtcatggtgaagctagaggactctgaggaggagggtgaggctgccttatgggacccaggccctgaagctgcacgcctgcgtttccggtgcttccgctatgaggaggccacagggccccaagaggccctggcccagctccgagagctgtgtcgccagtggctgcgtccagaggtacgctccaaggagcagatgctggagctgttggtgctggagcagttcctgggcgcactgccccctgagatccaggcccgtgtgcaggggcagcggccaggcagccccgaggaggctgctgccctagtagatgggctgcgccgggagccgggcggaccccggagatgggtcacagtccaggtgcagggccaggaggtcctatcagagaagatggagccctccagtttccagcccctacctgaaactgagcctccaactccagagcctgggcccaagacacctcctaggactatgcaggaatcaccactgggcctgcaggtgaaagaggagtcagaggttacagaggactcagatttcctggagtctgggcctctagctgccacccaggagtctgtacccaccctcctgcctgaggaggcccagagatgtgggaccgtgctggaccagatctttccccacagcaagactgggcctgagggtccctcatggagggagcaccccagggccctgtggcatgaggaagctgggggcatcttctccccaggggccggagccggggccgccccagcactgggggcggggtggttaggggcggccgttgcgatgtatgtggcaaggtgttcagccaacgcagcaacctgc

SEQ ID NO: 4241 - DNA, 1848 bp, Homo sapiens
  source 1..1848: mol_type = genomic DNA
atgggactgttgacatttagggatgtggccatagaattctctctggaggagtggcagtgcctggacactgcacagaagaatttatataggaatgtgatgttagagaactacagaaacctggccttcctgggtattgctgtctctaagccagacctcatcatctgtctggagaaagaaaaagagccctggaatatgaagcgagatgagatggtggatgaacccccaggtatatgtcctcattttgctcaagacatttggccagagcagggcgtggaagattcttttcaaaaagtaatactaagaagatttgaaaaatgtggacatgagaatttacagttaagaaaaggttgtaaaagtgtggatgagtgtaaggtacacaaagaaggttataatggacttaaccagtgtttcacaactacccagggcaaagcttctcaatgtggtaaatatttgaaagtcttttataaatttataaatttaaacagatataagataagacatactagaaagaaacctttcaaatgtaaaaattgtgtcaaatcattttgcatgttttcacacaaaacccagcataaaagcatatatactacagagaagtcctacaaatgtaaagaatgtggaaaaacctttaattggtcctcaacccttactaatcataagaaaactcatactgaagaaaagccctacaaatgtgaagaatatggcaaagcttttaatcaatcctcaaattatactacacataaggtaactcatactggagagaagccttacaagtgtgaagaatgtggcaaagcatttagccaatcctcaacactaaccatacataagaggatacatactggagagaaaccctgcaaatgtgaagaatgtggcaaagcatttagccaaccctcagcactaaccatacataagaggatgcacattggagagaaaccctacaaatgtgaagaatgtggcaaagcatttgtttggtcctcaaccctaactagacataagaggctgcacagtggagagaaaccctacaaatgtgaagaatgtgccaaagcttttagccaattcggacaccttactacacataggataattcatactggagagaaaccctacaaatgtgaagaatgtggcaaagcatttatatggccctcaaccctaactaaacataagaggattcacactggagagaaaccctacaaatgtgaagaatgtggcaaagcttttcatcgatcctcaaatcttactaaacataagataattcatactggagagaaaccttacaagtgtgaagaatgcggcaaagcgtttatatggtcctcaaaccttactgaacataagaaaattcatactagagagaaaccctacaaatgtgaagaatgtagtaaagcatttagccgatcctcagccctaactacacataagaggatgcacactggagagaaaccctacaaatgtgaagaatgtggcaaagcttttagccagtcctcaacccttactgcacataagataattcatactggagagaaaccctacaaatgtgaagaatgtggcaaagcatttatattgtcctcgaccctatctaaacataagaggattcacactggagagaaaccctacaaatgtgaagaatgtggcaaaacttttaatcaatcctcaaatcttagtacacataagataattcatactggagagaaaccttacaagtgtgaagaatgtggaaaagcgtttaatcgatcctcaaatcttagtacgcataagataattcatactggagagaaaccttacaagtgtgacgaatgtggcaaatcatttatctggtcctcaaccctttttaagcataagaggattcatact

SEQ ID NO: 4242 - DNA, 1866 bp, Homo sapiens
  source 1..1866: mol_type = genomic DNA
atgggatcgttgacatttcgggatgtggccatacaattctctctggaggagtggcaatgcctggacactgcacagcagaatttatataggaatgtgatgttagagaactacagaaacctggtcttcctgggtattgctgcccctaagccagacctgatcatttttctggagcaaggaaaagagccctggaatatgaagagacatgagctggtgaaagaaccgccagttatatgttctcattttgctcaagacctttggccagagcagggcagagaagattctttccaaaaagtgatattgagaagatatgaaaaatgtggacatgagaatttacagttaaaaattggttgtaccaatgtggatgagtgtaaggtgcacaaaaaaggttataataagcttaaccagagtttgacaactacacaaagcaaagtatttcaatgtggcaaatatgcaaacatctttcataaatgttcaaattcaaaaagacataagataaggcatactggaaagaaacttttgaaatgtaaagaatatgtcagatcattttgcatgctttcacacctatctcaacataaaagaatttatactagagagaattcctacaaaagtgaagaacatggcaaagcctttaactggtcctcagcccttacttataagagaattcatactggagagaaaccctgcaaatgtgaagaatgtggcaaagcctttagtaagttctcaatccttactaagcataaggtaattcatactggagagaaacattacaaatgtgaagaatgtggcaaagccttcacccggtcctcaagccttattgaacataagagaagtcatgctggagagaaaccctacaaatgtgaagaatgtggcaaagcctttagtaaggcctcaacccttactgcacataagacaattcatgctggagagaaaccctacaaatgtgaagaatgtggcaaagctttcaaccggtcctcaaaccttatggaacataagagaattcatactggagagaagccctgcaaatgtgaagaatgtggcaaagcctttggtaacttctcaacccttactaaacataaggtaattcatactggagagaaaccctacaaatgtgaagaatgtggcaaagccttcagctggccctcaagccttactgaacacaagagaattcatgctggagacaaaccttacaaatgtgaagaatgtggcaaaacctttaagtggtcctcaacacttactaaacataagataattcatactggagagaaaccctacaaatgtgaagaatgtggcaaagcctttactacattttcgagccttactaaacataaagtaattcatactggagagaaacactacaaatgtgaagaatgtggcaaagtcttcagctggtcctcaagccttactacacataaggcaattcatgctggagagaaactctacaaatgtgaagaatgtggcaaagcctttaagtggtcctcaaaccttatggaacataagagaattcatactggagagaaaccctacaaatgtgaagaatgtggcaaagccttcagtaaggttgcaaaccttactaaacataaggtaattcatactggagagaaacaatacaaatgtgaagaatgtggcaaagccttcatctggtcctcaagacttagtgaacataagagaattcatactggagagaaaccctacaaatgtgaagaatgtggcaaagcctttagctgggtctcagtccttaacaaacataagaaaattcatgctggaaagaaattctacaaatgtgaagaatgtggtaaagacttcaaccaatcctcacaccttactactcataagagaattcatactggaggaaaaaccctacaaatg

SEQ ID NO: 4243 - DNA, 8169 bp, Homo sapiens
  source 1..8169: mol_type = genomic DNA
atggcggacgaagaggccgagcaggagaggttgagttgcggcgaaggcggctgcgtcgcggagctgcagcgcctgggcgagcggctccaggagctggagctacagctgcgggagagccgggtaccggccgtggaagcggccaccgactactgtcagcagctgtgccagacactcctagaatatgcagagaaatggaaaacttcagaagatcctttacctttattggaggtatacacagtggctatccaaagttatgttaaagcccgaccttatcttacctctgaatgtgaaaatgtagccttggttctggaacgcttggcattaagctgtgttgaacttttactgtgtctgcctgttgagttatcagataaacagtgggaacaatttcagacactggtgcaggtagctcatgaaaagctgatggagaatggcagctgtgaattgcattttttagctactctagctcaagagactggggtgtggaaaaacccggtactgtgcactattctttcccaggaaccattggataaggataaagtgaatgaatttttagcttttgagggtcccatcttgttggatatgagaattaaacatctaatcaaaacaaatcagttaagtcaagcaactgctctagcaaagctgtgttctgaccatccagagattggcataaaaggtagttttaagcaaacttaccttgtctgtctttgtacatcatcaccaaatggaaagttaatcgaagagatttcagaagttgattgcaaagatgcactggaaatgatctgtaacttagaatctgagggtgatgaaaaaagcgctcttgttttatgtactgcgtttttgtcacgtcagctccaacaaggagatatgtactgcgcttgggaacttactctcttttggagtaaattacaacaaagagtagaaccatctatacaagtgtaccttgagaggtgtcgtcaactttctttgttaacgaaaacagtatatcacattttcttcctgattaaagttattaattcagagactgaaggggctggacttgctacctgtatagaactgtgtgtaaaggctcttcgcttggagtctacagaaaatactgaagtgaaaatatctatttgcaagaccatttcatgtttgttgcctgatgatctggaagttaaacgtgcttgtcaactgagtgaatttcttattgagcctacagtagatgcgtattatgctgtggaaatgttgtataatcagccagaccagaaatatgatgaagagaatcttccaataccaaattctttacgctgtgagctgttacttgtattgaaaactcaatggccctttgatccagaattctgggattggaaaaccttgaaacgacaatgtcttgcattaatgggagaagaagcatccattgtgtcttcaatagatgaactaaatgacagtgaagtatatgaaaaagtggtagactaccaagaagagagtaaagaaacttctatgaatgggctttctggtggagttggtgctaattctggccttcttaaagacattggtgatgaaaagcagaagaagagagagataaaacagttaagagagaggggatttatatctgctcggtttaggaattggcaagcctacatgcagtattgtgtgttgtgtgacaaagaattccttggtcacagaatagtacgacatgctcagaaacattacaaagatggaatttatagttgccccatatgtgcaaagaactttaattctaaagaaacttttgtccctcatgtcacactgcatgttaaacaatctagtaaagagagactagcagctatgaaaccattaagaagattgggaaggcctccaaagatcacaactaccaatgaaaatcagaagactaatactgtggctaaacaggagcagcgacctataaaaaagaatagtctctattcaacagattttatagtgtttaatgacaatgatggttcagatgatgagaatgatgacaaagataaatcctatgagccagaagtgattccagtccagaaaccagtacctgttaatgaatttaattgccctgtaactttttgtaaaaagggctttaagtactttaaaaatttaattgctcatgtgaaggggcataaagataatgaagacgccaagcgctttcttgaaatgcagagcaaaaaagttatttgccagtactgtaggcggcattttgtgagtgttactcatctcaatgatcacttacagatgcactgtggcagtaaaccatatatctgtatacagatgaaatgtaaagctggttttaatagttacgccgagcttttaacccaccgaaaggagcatcaagtctttagagcaaaatgtatgtttcctaaatgtggaagaattttttcggaagcttatttactatatgatcatgaagcacaacattataatacgtacacttgtaagttcacaggttgtggtaaagtttatcgttctcagggtgagctggaaaagcatctggatgatcacagtactcctcctgaaaaagtgctgcctcctgaagcccaacttaattcatctggagattccattcagccttctgaagtgaatcagaacacagcagagaatattgagaaagaaagatctatgcttccttcagaaaataacattgaaaacagcttactagcagatagaagtgatgcttgggataaaagcaaagcagaatcagctgtgaccaaacaagaccagatttctgcctctgagctcaggcaagctaatggaccattgtcaaatggtttggaaaaccctgctactactcctctacttcaatccagtgaagtagctgtgtccattaaggtgtctctcaatcaggggattgaggataactttggaaagcaagaaaactcaactgtggaaggcagtggtgaagcactggtcacagacttacatacgccagttgaagatacttgtaatgatttgtgtcatccaggtttccaggagagaaaagaacaagattgctttaatgatgcccatgttactcagaattctttagtaaattcagaaactctcaaaataggtgaccttaccccacaaaacttagaaagacaagtgaacaacttgatgaccttttctgtgcaaaatcaggcagcatttcaaaacaatttaccaacttccaaatttgaatgtggagataatgttaaaacatcatccaatctttataatttacctcttaagacattagaaagtattgcatttgttccaccgcagtccgacctaagtaattcattaggaactccatcagtgcctccaaaagctccagttcagaaattcagctgccaggtcgagggatgtactcgaacctataattcttcacagagtattgggaaacacatgaagacagcacaccctgaccaatatgctgcatttaaaatgcagcgcaaaagtaaaaaaggtcagaaagctaacaacttaaatacaccaaataatggaaagtttgtttattttttgccatcaccggtgaacagctcaaatccattttttacatcacagaccaaagccaatgggaatcctgcttgttcggcccagttgcagcatgtctcgccacccatttttccagctcatttagcaagtgtgtcaactccattgttgtcctcaatggaaagtgtcataaatccaaatataacttctcaggataaaaatgaacaaggtggtatgttatgttcccaaatggaaaatttacctagtactgccttgccagcacaaatggaagatctaaccaaaacagttctgcctttgaatattgacagtggctcagatcctttccttcctttacctgcagaaagtagttcaatgtctctcttcccttcaccagcagatagtgggactaattctgttttttcccaactggaaaataatacaaatcattattcctcacagattgaaggaaacactaattcctcctttctaaaggggggtaatggtgaaaatgcagtttttccttcacaagtgaatgttgcaaataacttcagtagcaccaatgcccaacagtctgcacctgaaaaagttaaaaaagaccgtgggcggggcccaaatgggaaggaaagaaaacctaagcacaacaaaagggctaaatggcctgcaattatcagagatgggaaatttatctgtagcaggtgttacagggcttttactaatcccagatcactgggtgggcacttatccaagcgatcttactgtaaaccactggatggagccgaaattgctcaagaacttctacagagtaatggacagccttctcttcttgccagcatgattctctccacaaatgcagtaaatttgcagcagccacaacaatctaccttcaatccagaagcatgttttaaagatccatcatttctacagcttcttgctgaaaatcgctcgccagcatttttaccaaatacatttcctcgatctggtgtgactaactttaataccagtgtcagtcaagaaggtagtgaaattattaaacaggctttggaaactgctggcattcccagtacatttgagggtgccgaaatgctttctcatgtttcaacaggttgtgtctctgatgcatcacaagtaaatgcaacggtgatgccaaatccaactgtaccacccctgttgcacactgtatgccatccaaacaccttgctgaccaaccagaataggacgtcaaactccaaaacttcctccattgaggaatgtagcagcttgcctgtttttccaacgaatgacttactactgaagactgttgaaaatggtttgtgctctagttcatttcctaattctggtgggccatcacaaaattttaccagtaacagttctcgtgtttctgttataagtggtcctcagaacacaagatccagtcatttaaataaaaagggaaacagtgcttctaagagaagaaagaaagttgctcctccactaattgcacctaacgcttcccaaaacttggtaacaagtgacttaacaacaatgggactcatagcaaagagtgttgaaatcccaactactaaccttcattcaaatgtaattccaacttgtgaacctcagagtttggtggaaaatctaacacagaaattaaataatgttaacaatcagttatttatgactgatgtaaaagagaatttcaaaaccagtcttgagtcccatacagtgttagcccctttaacattaaaaactgaaaatggtgattcccaaatgatggctttgaattcatgcacaacttcaataaattctgatttgcagatttctgaagacaatgttatacaaaactttgaaaagactcttgaaattattaaaactgctatgaattctcaaatacttgaggtaaaaagtggatctcagggtgctggtgaaacttcacaaaatgctcaaataaattataacattcagcttccttcagtaaacactgtgcaaaataacaaattacccgattcttctccgttttcctcctttataagtgtcatgccaacaaaaagtaacattcctcagtctgaagtatcacataaggaggatcaaatacaggaaattttagaaggcttacagaaattaaaattagaaaatgacctatccactccagcatcccaatgtgtactgataaatacatcagtgacactgactcccacgcctgttaaatcaactgcagatatcacagttattcagccagtttctgaaatgataaacattcaatttaatgacaaagttaataaaccctttgtgtgtcaaaaccaaggctgtaactacagtgctatgacaaaggatgcactatttaagcactatggtaaaattcatcaatacactccagaaatgattcttgaaattaagaagaatcaattgaaatttgctccctttaaatgtgtagtacctacatgtacaaaaacatttacaagaaattctaacctccgggcacactgtcagttggtgcatcattttacaactgaagaaatggtaaagttaaaaattaaaaggccttatggaagaaaatctcagagtgaaaatgtgccggcctcacgaagtacacaagtgaaaaaacagctagctatgacagaggaaaataaaaaggaatctcagcctgctttagaattgagagcagagacccaaaatacccacagtaatgtagcagtgatcccagaaaaacaacttgtagaaaaaaaaagtcctgacaaaacagaaagttctttacaagtgattacagttacttcagaacaatgtaatacaaatgcactcacaaacacacaaaccaaaggacggaagattaggaggcataaaaaagaaaaggaggagaaaaaacgaaagaagccagtttcccaatcccttgagtttccaacaagatacagtccttacagaccttatcgatgtgttcaccagggatgctttgctgcctttacgatacagcaaaacttgattctccattaccaggctgtacacaaatcagatctacctgcattttcagcagaggtcgaagaggaaagtgaagctggtaaagaaagtgaagaaactgaaactaaacaaactttgaaagaatttcgatgtcaggtaagtgactgttctcgaattttccaagcaattactggcctaatacaacactacatgaaacttcatgaaatgactcctgaagaaattgaaagtatgactgcttcagtggatgttgggaagtttccatgtgaccagttagagtgtaaatcttcatttactacatatttgaactatgttgttcatctagaggcagaccacgggattggactaagggcaagtaaaacagaagaagatggtgtatacaaatgtgattgtgaaggctgtgaccgtatatatgcaacccggtcgaatctcctccgacacatttttaataagcataatgacaaacataaggctcatttgattcgtccaagaagattaacaccaggccaggaaaatatgtcaagcaaggcaaaccaagaaaaatcaaagtctaaacatcgggggaccaagcacagcagatgtggaaaggaaggaataaaaatgcccaagaccaaacgaaagaaaaaaaataatttagaaaacaagaatgcaaagattgtgcagattgaagaaaataagccttattctctgaaacgtgggaagcatgtatattctataaaggctagaaatgatgccctgtctgagtgtacaagcagatttgtaacccagtatccatgtatgataaagggatgtacttcagttgttacaagtgaaagcaatataattagacattataagtgccataaattatctaaggcatttacatcacaacaccgaaatcttcttattgtattcaaacggtgttgcaactcacaagtaaaggaaacgtctgagcaagaaggtgctaagaatgatgtgaaagattctgacacgtgtgtatcagagagcaatgataattcaagaacaacagctacagtttcacaaaaggaagttgaaaaaaatgaaaaagatgaaatggatgaactaacagaattgtttattacaaaattaataaatgaagatagcacaagtgtagagacccaagctaatacttcttcaaatgtaagtaatgattttcaggaagataacctctgccagtcagaaagacaaaaagcaagtaatttgaagagagttaataaggaaaaaaatgtctcacaaaataaaaaaaggaaagttgaaaaagctgaaccagcatcagcagctgagttaagtagcgtgcgtaaagaagaagaaactgctgttgccattcaaaccattgaggagcatcctgcatcttttgactggagctcttttaagccaatgggatttgaagtatcatttctgaagtttcttgaggagtctgcagtgaagcagaagaaaaatactgacaaagaccatccgaatactggaaacaaaaaaggatcccattcaaattcaagaaaaaatattgataagactgctgtgactagtggaaatcatgtatgtccttgtaaagaaagcgaaacgtttgtacagtttgccaatccatcacagcttcagtgcagtgataatgtaaaaattgttttagacaagaatcttaaagattgcactgagcttgtcttaaagcaacttcaggaaatgaaacctaccgtcagtctgaaaaaacttgaagtacattcaaatgatccagatatgtctgttatgaaagatatcagtataggtaaagccacaggcagaggtcagtac

SEQ ID NO: 4244 - DNA, 1590 bp, Homo sapiens
  source 1..1590: mol_type = genomic DNA
atggcgacggcgaccatagctctcggcacagactccatcaagatggagaacgggcagagcacagccgccaagctggggctgcctcccctgacgcccgagcagcaggaggcccttcagaaggccaagaagtacgccatggagcagagcatcaagagtgtgctggtgaagcagaccatcgcgcaccagcagcagcagctcaccaacctgcagatggcagcagtgacaatgggctttggagatcctctctcacctttgcaatcgatggcggctcagcggcagcgggcgctggccatcatgtgccgcgtctacgtgggctctatctactatgagctgggggaggacaccatccgccaggcctttgccccctttggccccatcaagagcatcgacatgtcctgggactccgtcaccatgaagcacaagggctttgccttcgtggagtatgaggtccccgaagctgcacagctggccttggagcagatgaactcggtgatgctggggggcaggaacatcaaggtgggcagacccagcaacatagggcaggcccagcccatcatagaccagttggctgaggaggcacgggccttcaaccgcatctacgtggcctctgtgcaccaggacctctcagacgatgacatcaagagcgtgtttgaggcctttggcaagatcaagtcctgcacactggcccgggaccccacaactggcaagcacaagggctacggcttcattgagtacgagaaggcccagtcgtcccaagatgctgtgtcttccatgaacctctttgacctgggtggccagtacttgcgggtgggcaaggctgtcacaccgcccatgcccctactcacaccagccacgcctggaggcctcccacctgccgctgctgtggcagctgctgcagccactgccaagatcacagctcaggaagcagtggccggagcagcggtgctgggtaccctgggcacacctggactggtgtccccagcactgaccctggcccagcccctgggcactttgccccaggctgtcatggctgcccaggcacctggagtcatcacaggtgtgaccccagcccgtcctcctatcccggtcaccatcccctcggtgggagtggtgaaccccatcctggccagccctccaacgctgggtctcctggagcccaagaaggagaaggaagaagaggagctgtttcccgagtcagagcggccagagatgctgagcgagcaggagcacatgagcatctcgggcagtagcgcccgacacatggtgatgcagaagctgctccgcaagcaggagtctacagtgatggttctgcgcaacatggtggaccccaaggacatcgatgatgacctggaaggggaggtgacagaggagtgtggcaagttcggggccgtgaaccgcgtcatcatctaccaagagaaacaaggcgaggaggaggatgcagaaatcattgtcaagatctttgtggagttttccatagcctctgagactcataaggccatccaggccctcaatggccgctggtttgctggccgcaaggtggtggctgaagtgtacgaccaggagcgttttgataacagtgacctctctgcg

SEQ ID NO: 4245 - DNA, 1539 bp, Homo sapiens
  source 1..1539: mol_type = genomic DNA
atggcgacggcgaccatagctctcggcacagactccatcaagatggagaacgggcagagcacagccgccaagctggggctgcctcccctgacgcccgagcagcaggaggcccttcagaaggccaagaagtacgccatggagcagagcatcaagagtgtgctggtgaagcagaccatcgcgcaccagcagcagcagctcaccaacctgcagatggcggctcagcggcagcgggcgctggccatcatgtgccgcgtctacgtgggctctatctactatgagctgggggaggacaccatccgccaggcctttgccccctttggccccatcaagagcatcgacatgtcctgggactccgtcaccatgaagcacaagggctttgccttcgtggagtatgaggtccccgaagctgcacagctggccttggagcagatgaactcggtgatgctggggggcaggaacatcaaggtgggcagacccagcaacatagggcaggcccagcccatcatagaccagttggctgaggaggcacgggccttcaaccgcatctacgtggcctctgtgcaccaggacctctcagacgatgacatcaagagcgtgtttgaggcctttggcaagatcaagtcctgcacactggcccgggaccccacaactggcaagcacaagggctacggcttcattgagtacgagaaggcccagtcgtcccaagatgctgtgtcttccatgaacctctttgacctgggtggccagtacttgcgggtgggcaaggctgtcacaccgcccatgcccctactcacaccagccacgcctggaggcctcccacctgccgctgctgtggcagctgctgcagccactgccaagatcacagctcaggaagcagtggccggagcagcggtgctgggtaccctgggcacacctggactggtgtccccagcactgaccctggcccagcccctgggcactttgccccaggctgtcatggctgcccaggcacctggagtcatcacaggtgtgaccccagcccgtcctcctatcccggtcaccatcccctcggtgggagtggtgaaccccatcctggccagccctccaacgctgggtctcctggagcccaagaaggagaaggaagaagaggagctgtttcccgagtcagagcggccagagatgctgagcgagcaggagcacatgagcatctcgggcagtagcgcccgacacatggtgatgcagaagctgctccgcaagcaggagtctacagtgatggttctgcgcaacatggtggaccccaaggacatcgatgatgacctggaaggggaggtgacagaggagtgtggcaagttcggggccgtgaaccgcgtcatcatctaccaagagaaacaaggcgaggaggaggatgcagaaatcattgtcaagatctttgtggagttttccatagcctctgagactcataaggccatccaggccctcaatggccgctggtttgctggccgcaaggtggtggctgaagtgtacgaccaggagcgttttgataacagtgacctctctgcg

SEQ ID NO: 4246 - DNA, 1677 bp, Homo sapiens
  source 1..1677: mol_type = genomic DNA
atggcgacggcgaccatagctctccaggtcaatggccagcaaggaggggggtccgagccggcggcggcggcggcagtggtggcagcgggagacaaatggaaacctccacagggcacagactccatcaagatggagaacgggcagagcacagccgccaagctggggctgcctcccctgacgcccgagcagcaggaggcccttcagaaggccaagaagtacgccatggagcagagcatcaagagtgtgctggtgaagcagaccatcgcgcaccagcagcagcagctcaccaacctgcagatggcagcagtgacaatgggctttggagatcctctctcacctttgcaatcgatggcggctcagcggcagcgggcgctggccatcatgtgccgcgtctacgtgggctctatctactatgagctgggggaggacaccatccgccaggcctttgccccctttggccccatcaagagcatcgacatgtcctgggactccgtcaccatgaagcacaagggctttgccttcgtggagtatgaggtccccgaagctgcacagctggccttggagcagatgaactcggtgatgctggggggcaggaacatcaaggtgggcagacccagcaacatagggcaggcccagcccatcatagaccagttggctgaggaggcacgggccttcaaccgcatctacgtggcctctgtgcaccaggacctctcagacgatgacatcaagagcgtgtttgaggcctttggcaagatcaagtcctgcacactggcccgggaccccacaactggcaagcacaagggctacggcttcattgagtacgagaaggcccagtcgtcccaagatgctgtgtcttccatgaacctctttgacctgggtggccagtacttgcgggtgggcaaggctgtcacaccgcccatgcccctactcacaccagccacgcctggaggcctcccacctgccgctgctgtggcagctgctgcagccactgccaagatcacagctcaggaagcagtggccggagcagcggtgctgggtaccctgggcacacctggactggtgtccccagcactgaccctggcccagcccctgggcactttgccccaggctgtcatggctgcccaggcacctggagtcatcacaggtgtgaccccagcccgtcctcctatcccggtcaccatcccctcggtgggagtggtgaaccccatcctggccagccctccaacgctgggtctcctggagcccaagaaggagaaggaagaagaggagctgtttcccgagtcagagcggccagagatgctgagcgagcaggagcacatgagcatctcgggcagtagcgcccgacacatggtgatgcagaagctgctccgcaagcaggagtctacagtgatggttctgcgcaacatggtggaccccaaggacatcgatgatgacctggaaggggaggtgacagaggagtgtggcaagttcggggccgtgaaccgcgtcatcatctaccaagagaaacaaggcgaggaggaggatgcagaaatcattgtcaagatctttgtggagttttccatagcctctgagactcataaggccatccaggccctcaatggccgctggtttgctggccgcaaggtggtggctgaagtgtacgaccaggagcgttttgataacagtgacctctctgcg

SEQ ID NO: 4247 - DNA, 360 bp, Homo sapiens
  source 1..360: mol_type = genomic DNA
atggatgacagtaaggtggttggaggcaaagtaaagaagcccggtaaacgtggtcggaagccagccaaaattgacttgaaagcaaaacttgagaggagccggcagagtgcaagagaatgccgagcccgaaaaaagctgagatatcagtatttggaagagttggtatccagtcgagaaagagctatatgtgccctcagagaggaactggaaatgtacaagcagtggtgcatggcaatggaccaaggaaaaatcccttctgaaataaaggccctactcactggagaagagcagaacaaatctcagcagaactcaagcaggcataccaaggctgggaagacagatgctaatagcaattcctgg

SEQ ID NO: 4248 - DNA, 1059 bp, Homo sapiens
  source 1..1059: mol_type = genomic DNA
atggccgcggagctggcgatgggcgccgagctgcccagcagcccgctggccatcgagtacgtcaacgacttcgacctgatgaagttcgaggtgaagaaggagcctcccgaggccgagcgcttctgccaccgcctgccgccaggctcgctgtcctcgacgccgctcagcacgccctgctcctccgtgccctcctcgcccagcttctgcgcgcccagcccgggcaccggcggcggcggcggcgcggggggcggcggcggctcgtctcaggccgggggcgcccccgggccgccgagcgggggccccggcgccgtcgggggcacctcggggaagccggcgctggaggatctgtactggatgagcggctaccagcatcacctcaaccccgaggcgctcaacctgacgcccgaggacgcggtggaggcgctcatcggcagcggccaccacggcgcgcaccacggcgcgcaccacccggcggccgccgcagcctacgaggctttccgcggcccgggcttcgcgggcggcggcggagcggacgacatgggcgccggccaccaccacggcgcgcaccacgccgcccaccatcaccacgccgcccaccaccaccaccaccaccaccaccaccatggcggcgcgggacacggcggtggcgcgggccaccacgtgcgcctggaggagcgcttctccgacgaccagctggtgtccatgtcggtgcgcgagctgaaccggcagctccgcggcttcagcaaggaggaggtcatccggctcaagcagaagcggcgcacgctcaagaaccgcggctacgcgcagtcctgccgcttcaagcgggtgcagcagcggcacattctggagagcgagaagtgccaactccagagccaggtggagcagctgaagctggaggtggggcgcctggccaaagagcgggacctgtacaaggagaaatacgagaagctggcgggccggggcggccccgggagcgcgggcggggccggtttcccgcgggagccttcgccgccgcaggccggtcccggcggggccaagggcacggccgacttcttcctg

SEQ ID NO: 4249 - DNA, 405 bp, Homo sapiens
  source 1..405: mol_type = genomic DNA
atggggctgtcggtgcgcgagctgaaccggcatctgcgcgggctctccgccgaggaggtgacacggctcaagcagcggcgccgcacactcaaaaaccgtggctacgccgccagctgccgcgtgaagcgcgtgtgccagaaggaggagctgcagaagcagaagtcggagctggagcgcgaggtggacaagctggcgcgcgagaacgccgccatgcgcctggagctcgacgcgctgcgcggcaagtgcgaggcgctgcagggcttcgcgcgctccgtggccgccgcccgcgggcccgccacgctcgtggcgccggccagcgtcatcaccatcgtcaagtccaccccgggctcggggtctggccccgcccacggcccggaccccgcccacggcccggcctcctgctcc

SEQ ID NO: 4250 - DNA, 1458 bp, Homo sapiens
  source 1..1458: mol_type = genomic DNA
atggcgtggattaaaaggaaatttggtgagcggcctccacctaaacgacttactagggaagctatgcgaaattatttaaaagagcgaggggatcaaacagtacttattcttcatgcaaaagttgcacagaagtcatatggaaatgaaaaaaggtttttttgcccacctccttgtgtatatcttatgggcagtggatggaagaaaaaaaaagaacaaatggaacgcgatggttgttctgaacaagagtctcaaccgtgtgcatttattgggataggaaatagtgaccaagaaatgcagcagctaaacttggaaggaaagaactattgcacagccaaaacattgtatatatctgactcagacaagcgaaagcacttcatgttgtctgtaaagatgttctatggcaacagtgatgacattggtgtgttcctcagcaagcggataaaagtcatctccaaaccttccaaaaagaagcagtcattgaaaaatgctgacttatgcattgcctcaggaacaaaggtggctctgtttaatcgactacgatcccagacagttagtaccagatacttgcatgtagaaggaggtaattttcatgccagttcacagcagtggggagccttttttattcatctcttggatgatgatgaatcagaaggagaagaattcacagtccgagatggctacatccattatggacaaacagtcaaacttgtgtgctcagttactggcatggcactcccaagattgataattaggaaagttgataagcagaccgcattattggatgcagatgatcctgtgtcacaactccataaatgtgcattttaccttaaggatacagaaagaatgtatttgtgcctttctcaagaaagaataattcaatttcaggccactccatgtccaaaagaaccaaataaagagatgataaatgatggcgcttcctggacaatcattagcacagataaggcagagtatacattttatgagggaatgggccctgtccttgccccagtcactcctgtgcctgtggtagagagccttcagttgaatggcggtggggacgtagcaatgcttgaacttacaggacagaatttcactccaaatttacgagtgtggtttggggatgtagaagctgaaactatgtacaggtgtggagagagtatgctctgtgtcgtcccagacatttctgcattccgagaaggttggagatgggtccggcaaccagtccaggttccagtaactttggtccgaaatgatggaatcatttattccaccagccttacctttacctacacaccagaaccagggccgcggccacattgcagtgcagcaggagcaatccttcgagccaattcaagccaggtgccccctaacgaatcaaacacaaacagcgagggaagttacacaaacgccagcacaaattcaaccagtgtcacatcatctacagccacagtggtatcc

SEQ ID NO: 4251 - DNA, 1500 bp, Homo sapiens
  source 1..1500: mol_type = genomic DNA
atggaccacacggagggctcgcccgcggaggagccgcctgcgcatgctccatcgcctgggaaatttggtgagcggcctccacctaaacgacttactagggaagctatgcgaaattatttaaaagagcgaggggatcaaacagtacttattcttcatgcaaaagttgcacagaagtcatatggaaatgaaaaaaggtttttttgcccacctccttgtgtatatcttatgggcagtggatggaagaaaaaaaaagaacaaatggaacgcgatggttgttctgaacaagagtctcaaccgtgtgcatttattgggataggaaatagtgaccaagaaatgcagcagctaaacttggaaggaaagaactattgcacagccaaaacattgtatatatctgactcagacaagcgaaagcacttcatgttgtctgtaaagatgttctatggcaacagtgatgacattggtgtgttcctcagcaagcggataaaagtcatctccaaaccttccaaaaagaagcagtcattgaaaaatgctgacttatgcattgcctcaggaacaaaggtggctctgtttaatcgactacgatcccagacagttagtaccagatacttgcatgtagaaggaggtaattttcatgccagttcacagcagtggggagccttttttattcatctcttggatgatgatgaatcagaaggagaagaattcacagtccgagatggctacatccattatggacaaacagtcaaacttgtgtgctcagttactggcatggcactcccaagattgataattaggaaagttgataagcagaccgcattattggatgcagatgatcctgtgtcacaactccataaatgtgcattttaccttaaggatacagaaagaatgtatttgtgcctttctcaagaaagaataattcaatttcaggccactccatgtccaaaagaaccaaataaagagatgataaatgatggcgcttcctggacaatcattagcacagataaggcagagtatacattttatgagggaatgggccctgtccttgccccagtcactcctgtgcctgtggtagagagccttcagttgaatggcggtggggacgtagcaatgcttgaacttacaggacagaatttcactccaaatttacgagtgtggtttggggatgtagaagctgaaactatgtacaggtgtggagagagtatgctctgtgtcgtcccagacatttctgcattccgagaaggttggagatgggtccggcaaccagtccaggttccagtaactttggtccgaaatgatggaatcatttattccaccagccttacctttacctacacaccagaaccagggccgcggccacattgcagtgcagcaggagcaatccttcgagccaattcaagccaggtgccccctaacgaatcaaacacaaacagcgagggaagttacacaaacgccagcacaaattcaaccagtgtcacatcatctacagccacagtggtatcc

SEQ ID NO: 4252 - DNA, 1461 bp, Homo sapiens
  source 1..1461: mol_type = genomic DNA
atggcgcctgttgtgacagggaaatttggtgagcggcctccacctaaacgacttactagggaagctatgcgaaattatttaaaagagcgaggggatcaaacagtacttattcttcatgcaaaagttgcacagaagtcatatggaaatgaaaaaaggtttttttgcccacctccttgtgtatatcttatgggcagtggatggaagaaaaaaaaagaacaaatggaacgcgatggttgttctgaacaagagtctcaaccgtgtgcatttattgggataggaaatagtgaccaagaaatgcagcagctaaacttggaaggaaagaactattgcacagccaaaacattgtatatatctgactcagacaagcgaaagcacttcatgttgtctgtaaagatgttctatggcaacagtgatgacattggtgtgttcctcagcaagcggataaaagtcatctccaaaccttccaaaaagaagcagtcattgaaaaatgctgacttatgcattgcctcaggaacaaaggtggctctgtttaatcgactacgatcccagacagttagtaccagatacttgcatgtagaaggaggtaattttcatgccagttcacagcagtggggagccttttttattcatctcttggatgatgatgaatcagaaggagaagaattcacagtccgagatggctacatccattatggacaaacagtcaaacttgtgtgctcagttactggcatggcactcccaagattgataattaggaaagttgataagcagaccgcattattggatgcagatgatcctgtgtcacaactccataaatgtgcattttaccttaaggatacagaaagaatgtatttgtgcctttctcaagaaagaataattcaatttcaggccactccatgtccaaaagaaccaaataaagagatgataaatgatggcgcttcctggacaatcattagcacagataaggcagagtatacattttatgagggaatgggccctgtccttgccccagtcactcctgtgcctgtggtagagagccttcagttgaatggcggtggggacgtagcaatgcttgaacttacaggacagaatttcactccaaatttacgagtgtggtttggggatgtagaagctgaaactatgtacaggtgtggagagagtatgctctgtgtcgtcccagacatttctgcattccgagaaggttggagatgggtccggcaaccagtccaggttccagtaactttggtccgaaatgatggaatcatttattccaccagccttacctttacctacacaccagaaccagggccgcggccacattgcagtgcagcaggagcaatccttcgagccaattcaagccaggtgccccctaacgaatcaaacacaaacagcgagggaagttacacaaacgccagcacaaattcaaccagtgtcacatcatctacagccacagtggtatcc

SEQ ID NO: 4253 - DNA, 2556 bp, Homo sapiens
  source 1..2556: mol_type = genomic DNA
atgatggccaaatcagctctaagagagaatggcactaactctgagaccttccgacagcgtttcaggagattccattaccaggaggtggctgggccgcgggaggctttcagccaactctgggaactttgctgtcggtggctaaggccggaggtgcgcaccaaggagcagattgtagaactgttggtgctagagcagttcctgaccgtcttacctggggagatccagaattgggtacaggaacaatgtccagaaaatggagaggaggcagtgactctcgtggaagatttagaaagagagcctggaagacctagatcttcggtcacagtctctgtgaaggggcaggaagtgcgcttggagaagatgacacccccgaaatcatcacaagagttattaagtgttcggcaggagtcagtggaaccccagcccaggggtgtacccaagaaagagagggcaagaagcccagacctgggaccacaggagcagatgaacccaaaggagaagctcaaaccttttcaaaggagcggattgccatttcctaaatccggtgtggtctccaggttggagcaaggagagccatggatcccagatctgctgggctctaaggagaaagaacttccaagtggcagccacataggagacagacgagtgcatgctgatctgttaccatccaagaaagatagaagaagctgggtggaacaggatcactggagctttgaagatgagaaggtggcaggtgtgcactggggctatgaagagaccagaacgctcctcgcaattctcagccagactgagttttatgaggctctcagaaactgccataggaacagccaagtgtatggggctgtggctgagcggctcagggaatatggcttcctccggaccctggaacagtgtcggaccaagttcaaaggtctccagaagagctatcggaaagtcaagagcggccacccacctgagacctgccccttctttgaagagatggaagccctgatgagtgctcaggtcattgccctgcccagtaatggcctggaagcagcagcctctcactctggcctggtaggcagcgatgctgagactgaagagccagggcagaggggctggcagcatgaggagggagcagaagaggctgtggctcaggagtctgacagtgatgacatggatctagaggcgaccccccaggaccccaactcagctgcacctgttgtgttcagaagcccaggtggtgtacactggggctatgaagagaccaagacttaccttgcaattcttagtgagacccagttttatgaagccctccggaactgtcaccgcaacagccagctgtatggagcagtggctgagaggttatgggaatatggctttcttaggaccccagaacagtgtcggaccaagtttaaaagcctgcaaaccagctatcggaaagttaagaatggccaggcaccagagacctgtcccttctttgaagagatggatgctttggtgagtgtccgggttgctgccccacccaatgatggccaggaagagactgcttcttgccccgtccaggggaccagtgaggctgaagctcagaagcaagctgaggaagcagacgaggccacagaggaagattctgatgatgatgaagaggatactgagatacccccaggggctgtcataacccgtgctccagtgttattccaaagcccccgtggttttgaagctggatttgagaatgaagataattcaaaacgggatatttctgaggaagtacaactgcataggacattacttgcaagatctgaaaggaaaattccccggtatcttcatcagggtaaaggcaatgagagtgactgtagatcaggaagacagtgggcaaagacctcaggggagaaaagaggaaaactgacactcccggagaagagcttaagtgaagtcctaagtcaacagagaccttgcttgggagagagaccctataaatatctcaaatacagcaaaagctttggtccaaactcccttctcatgcatcaggtatcccaccaggtggaaaatccatataaatgtgctgattgtgggaaaagcttcagtcggagtgcacgactcattagacaccggagaatccacactggagagaaaccttataaatgtcttgactgtggaaaaagtttccgtgacagttcaaatttcatcacccataggagaatccacacaggagagaaaccttatcaatgtggtgagtgtgggaaatgcttcaatcagagctcaagccttatcattcaccagagaacccacacaggagaaaagccctatcaatgtgaagagtgtggaaaaagcttcaataacagttctcattttagtgcacatcggaggatacacacaggagagagaccccatgtgtgtcctgactgtggaaagagtttcagtaagagttctgacttacgtgcacatcatagaacccacacaggagagaaaccctatgggtgtcatgactgtggtaagtgcttcagtaaaagctctgcccttaataagcacggagaaatccatgcacgggaaaagcttctgacacagtcagctcccaag

SEQ ID NO: 4254 - DNA, 1632 bp, Homo sapiens
  source 1..1632: mol_type = genomic DNA
atgcttaaagagcatccagagatggcggaagctcctcagcagcagttgggtattcctgtggtgaaactggagaaagagttgccatggggcagaggaagggaggaccctagtccagagacttttcggctgaggtttcggcagttccgctaccaggaggcagctggaccccaggaagctcttagggagctccaggagctctgtcgtcggtggctgaggcccgagttgcacaccaaggagcagatcctggagctgctggtgctggagcagttcctcactatcctgccccgcgagttctacgcctggatccgggagcatggcccagagagtggcaaggccctggccgccatggtggaggacctgacagaaagagcactggaggccaaggcggttccatgccacaggcagggagagcaggaggaaacagcactttgcagaggcgcttgggagccaggcatccagctggggccagtggaggtcaagcctgaatgggggatgccccctggggaaggagttcaaggtccagacccaggtaccgaggagcagctcagtcaggaccctggagatgagacacgggccttccaggagcaagcactacctgttctgcaggcgggtcctggcctccccgcagtgaatcccagagaccaagagatggcagctgggttctttactgctggatcgcaggggttggggccatttaaagatatggccctggccttccctgaggaggagtggaggcatgtgaccccagcccagatagactgctttggggagtatgtggaaccgcaggactgcagggtctctccaggcggtgggagcaaggaaaaggaggcaaaacccccacaggaagacctgaaaggggcgctggtggcactgacatcagagaggtttggggaagcctctctccagggccctgggctcggaagggtctgtgagcaggagcctggtggccctgcaggcagtgcgcctgggcttcctcctccccagcacggtgccatccccctgcctgacgaagtcaaaacccacagctccttctggaagcctttccagtgccctgagtgtgggaaaggattcagtcggagctccaatctcgtcaggcaccagcgaacccacgaagagaagtcttatggctgtgtggagtgtgggaagggctttaccctgagagaatacctgatgaagcaccagagaacccacctgggaaagaggccctacgtgtgcagcgagtgctggaaaaccttcagccagagacaccacctggaggtgcaccagcgcagccacactggggagaagccctacaagtgcggggactgctggaagagcttcagccgcaggcagcacctgcaggtgcaccggaggacgcacaccggggagaagccctacacctgcgagtgtggcaagagcttcagcaggaatgccaatctggcggtgcaccggcgtgcccacactggcgagaagccatatgggtgccaggtgtgcgggaagcggttcagcaaaggggagcggctggtccgacaccagagaatccatacaggggagaagccctaccactgtcctgcctgcgggcgaagcttcaaccagaggtccatcctcaaccggcaccagaagacccagcaccgccaggagccgctggtgcag

SEQ ID NO: 4255 - DNA, 810 bp, Homo sapiens
  source 1..810: mol_type = genomic DNA
atggaggctcataatgagggctctaacttggaaaggcatcaggccaagcccaaagagaagattgagtataaatgctcagaacgtgagcagagattcatccagcacttggacctgattgaacatgcgagtacacacacgggaaagaaactctgcgagtctgatgtgtgtcagagttccagtcttacaggacataagaaagtcctctctagagagaaaggtcatcagtgtcatgagtgtgggaaagcctttcagaggagttcacacctcgtcagacatcagaaaatccatcttggtgagaagccttatcagtgcaatgagtgtggcaaagtctttagccagaatgcaggccttttggaacatctcagaattcatactggagagaaaccttatctatgtatccattgtggaaaaaattttaggcgcagctctcaccttaatcgacatcagagaattcacagtcaggaggagccctgtgagtgcaaggagtgtggaaaaacctttagtcaggccttactcctcacccaccatcagagaatccatagtcactccaaaagccatcaatgtaacgagtgtggaaaagctttcagtttgacctcagaccttattcgacaccacagaattcatactggagaaaaacctttcaagtgtaacatatgccagaaagccttccgactaaactcacaccttgctcagcatgtaagaatccacaatgaagaaaaaccctatcagtgtagtgaatgtggagaagccttcaggcaaaggtcaggtctttttcaacatcagagatatcaccacaaagacaaactggct

SEQ ID NO: 4256 - DNA, 1032 bp, Homo sapiens
  source 1..1032: mol_type = genomic DNA
atggcaacagcattggacccagaccagccaaagaaacaaaaaatacttgtggaggagatggcccctctgaaaggagtacaggaacagcaggttcggcatgagtgtgaagttacaaagcctgagaaagagaagggtgaggagacaaggattgagaatgggaagcttattgtagtaacagactcttgtggaagagtagagtcatctgggaaaatatctgaacccatggaggctcataatgagggctctaacttggaaaggcatcaggccaagcccaaagagaagattgagtataaatgctcagaacgtgagcagagattcatccagcacttggacctgattgaacatgcgagtacacacacgggaaagaaactctgcgagtctgatgtgtgtcagagttccagtcttacaggacataagaaagtcctctctagagagaaaggtcatcagtgtcatgagtgtgggaaagcctttcagaggagttcacacctcgtcagacatcagaaaatccatcttggtgagaagccttatcagtgcaatgagtgtggcaaagtctttagccagaatgcaggccttttggaacatctcagaattcatactggagagaaaccttatctatgtatccattgtggaaaaaattttaggcgcagctctcaccttaatcgacatcagagaattcacagtcaggaggagccctgtgagtgcaaggagtgtggaaaaacctttagtcaggccttactcctcacccaccatcagagaatccatagtcactccaaaagccatcaatgtaacgagtgtggaaaagctttcagtttgacctcagaccttattcgacaccacagaattcatactggagaaaaacctttcaagtgtaacatatgccagaaagccttccgactaaactcacaccttgctcagcatgtaagaatccacaatgaagaaaaaccctatcagtgtagtgaatgtggagaagccttcaggcaaaggtcaggtctttttcaacatcagagatatcaccacaaagacaaactggct

SEQ ID NO: 4257 - DNA, 1437 bp, Homo sapiens
  source 1..1437: mol_type = genomic DNA
atggcaacagcattggtgagtgcccattccctggctcccctgaatctgaagaaggaggggcttcgggtagtgagggaggatcactactctacttgggaacagggattcaagctgcaaggaaacagtaaaggccttggacaggagccattgtgcaaacaattcaggcagttgcgttatgaagagaccacaggacctcgagaagcactaagtcggctccgggagctctgtcaacagtggctacagcccgagacccataccaaggagcagatcctggagctgctggtgctggagcagtttctgatcatcctgcctaaggagctccaggcccgggtgcaggagcatcacccagagagcagggaggacgtggttgttgttctggaggatttgcagctggatcttggagaaacaggacaacaggtggacccagaccagccaaagaaacaaaaaatacttgtggaggagatggcccctctgaaaggagtacaggaacagcaggttcggcatgagtgtgaagttacaaagcctgagaaagagaagggtgaggagacaaggattgagaatgggaagcttattgtagtaacagactcttgtggaagagtagagtcatctgggaaaatatctgaacccatggaggctcataatgagggctctaacttggaaaggcatcaggccaagcccaaagagaagattgagtataaatgctcagaacgtgagcagagattcatccagcacttggacctgattgaacatgcgagtacacacacgggaaagaaactctgcgagtctgatgtgtgtcagagttccagtcttacaggacataagaaagtcctctctagagagaaaggtcatcagtgtcatgagtgtgggaaagcctttcagaggagttcacacctcgtcagacatcagaaaatccatcttggtgagaagccttatcagtgcaatgagtgtggcaaagtctttagccagaatgcaggccttttggaacatctcagaattcatactggagagaaaccttatctatgtatccattgtggaaaaaattttaggcgcagctctcaccttaatcgacatcagagaattcacagtcaggaggagccctgtgagtgcaaggagtgtggaaaaacctttagtcaggccttactcctcacccaccatcagagaatccatagtcactccaaaagccatcaatgtaacgagtgtggaaaagctttcagtttgacctcagaccttattcgacaccacagaattcatactggagaaaaacctttcaagtgtaacatatgccagaaagccttccgactaaactcacaccttgctcagcatgtaagaatccacaatgaagaaaaaccctatcagtgtagtgaatgtggagaagccttcaggcaaaggtcaggtctttttcaacatcagagatatcaccacaaagacaaactggct

SEQ ID NO: 4258 - DNA, 1434 bp, Homo sapiens
  source 1..1434: mol_type = genomic DNA
atggcaacagcattggtgagtgcccattccctggctcccctgaatctgaagaaggaggggcttcgggtagtgagggaggatcactactctacttgggaacagggattcaagctgcaaggaaacagtaaaggccttggacaggagccattgtgcaaacaattcaggcagttgcgttatgaagagaccacaggacctcgagaagcactaagtcggctccgggagctctgtcaacagtggctacagcccgagacccataccaaggagcagatcctggagctgctggtgctggagcagtttctgatcatcctgcctaaggagctccaggcccgggtgcaggagcatcacccagagagcagggaggacgtggttgttgttctggaggatttgcagctggatcttggagaaacaggacaacaggacccagaccagccaaagaaacaaaaaatacttgtggaggagatggcccctctgaaaggagtacaggaacagcaggttcggcatgagtgtgaagttacaaagcctgagaaagagaagggtgaggagacaaggattgagaatgggaagcttattgtagtaacagactcttgtggaagagtagagtcatctgggaaaatatctgaacccatggaggctcataatgagggctctaacttggaaaggcatcaggccaagcccaaagagaagattgagtataaatgctcagaacgtgagcagagattcatccagcacttggacctgattgaacatgcgagtacacacacgggaaagaaactctgcgagtctgatgtgtgtcagagttccagtcttacaggacataagaaagtcctctctagagagaaaggtcatcagtgtcatgagtgtgggaaagcctttcagaggagttcacacctcgtcagacatcagaaaatccatcttggtgagaagccttatcagtgcaatgagtgtggcaaagtctttagccagaatgcaggccttttggaacatctcagaattcatactggagagaaaccttatctatgtatccattgtggaaaaaattttaggcgcagctctcaccttaatcgacatcagagaattcacagtcaggaggagccctgtgagtgcaaggagtgtggaaaaacctttagtcaggccttactcctcacccaccatcagagaatccatagtcactccaaaagccatcaatgtaacgagtgtggaaaagctttcagtttgacctcagaccttattcgacaccacagaattcatactggagaaaaacctttcaagtgtaacatatgccagaaagccttccgactaaactcacaccttgctcagcatgtaagaatccacaatgaagaaaaaccctatcagtgtagtgaatgtggagaagccttcaggcaaaggtcaggtctttttcaacatcagagatatcaccacaaagacaaactggct

SEQ ID NO: 4259 - DNA, 3129 bp, Homo sapiens
  source 1..3129: mol_type = genomic DNA
atggctatggccctggaattgcaagcccaggcatctccgcagccagagcctgaagaactcctgattgtgaaactggaagaggactcttggggatcagaatccaaactctgggagaaggaccgtggctctgtctctggcccagaggcctcccgccagcgcttcaggcaattccaatacagggatgcagctggaccccacgaggccttcagccagctctgggctctctgctgtcgttggctgaggccggagatccgtctcaaagagcagatcctggagctgctcgtgctggagcagttcctgactatcttgcctagggaggtccagacctgggtgcaggcacgccaccctgagagtggtgaggaggctgtggccttggtggaggattggcaccgagagaccaggactgcaggacagtcgggactggaattgcatacagaagagaccaggcccttaaagacaggggaagaagctcagagcttccagctgcagccagtggatccctggcctgagggacagtcccagaagaagggggtgaagaatacatgccctgaccttcccaatcacctaaatgccgaggtggcaccacagcctttgaaagagagtgctgtcctcactccccgagtccctactctcccaaagatggggagcgttggagattgggaggtgacagctgagtcccaggaagccctgggccctggcaaacatgctgagaaggagctctgtaaagaccccccaggagacgactgtgggaacagcgtgtgcctgggagttccagtttcaaaaccaagtaatacctccgagaaagagcaaggaccagagttttggggtctaagtcttataaattctgggaaaaggagcactgcagattacagcctggataatgagccagctcaggcattgacctggagggattcaagagcctgggaggaacaataccagtgggatgtggaggacatgaaggtgtcaggtgttcactggggctatgaggagaccaagactttcctggcaattttgagtgaatctcctttctctgaaaagctccggacttgtcaccagaaccgccaggtatatcgggccattgcagagcagctaagggcaaggggcttcctgcggacactggagcaatgtcgctatagggtcaaaaacctcctacggaattaccggaaagccaagagcagccacccaccaggtacctgccccttctatgaggagctggaggccctggtcagggctcggacagccatcagagccacagatggcccaggagaggccgtggcacttcccaggctcgggtatagtgacgcagagatggatgagcaggaggaagggggctgggatcctgaagaaatggcagaagactgtaacggtgctggcctggtcaatgttgagtctacccaggggcccaggattgcaggggccccagctctgttccagagtcgtattgcaggtgtgcactggggctatgaggagaccaaggccttcctggcaattctcagtgagtccccattctcggaaaagcttcgtacctgtcaccagaacagccaggtgtaccgggccattgcagagcggctgtgtgctctgggcttcctgcggacactggagcagtgtcgctacagattcaaaaacctccttcgaagctaccggaaagccaagagcagccacccaccagggacatgccctttctatgaggaactggactcgctgatgagggctcgggctgcagtcagggccatggggactgtccgagaggctgcaggtctccctaggtgtgggcagagtagtgctgagactgatgcccaggaggcctggggtgaagtggccaatgaagatgctgtcaaaccttcaaccttgtgtcctaaagccccagacatgggttttgaaatgaggcatgaggatgaagaccagatttcagagcaggacatttttgagggtttgcctggagccttatcaaaatgtcctacagaagctgtttgccaacctcttgactggggagaagacagtgaaaatgaaaatgaagatgaagggcagtggggaaatccctcacaggaacagtggcaagaaagttcttctgaagaggacttagaaaaacttattgaccatcaaggcctgtaccttgcagagaaaccctacaagtgtgacacatgcatgaagagcttcagtcggagctcccacttcattgcccatcagcgaatccacacaggtgagaagccctacaaatgccttgaatgtggaaaaaactttagtgaccgctctaacctcaatacccatcagagaatccacactggagagaagccctataaatgccttgaatgtgggaaaagctttagtgaccattctaatctcatcactcaccagagaattcacacgggggaaaagccctataaatgtggagaatgttggaaaagcttcaaccagagctcaaaccttctgaaacatcagagaatccacttgggaggaaatcctgaccagtgtagtgagcctgggggaaactttgcccaaagcccatcttttagtgctcactggaggaattctacagaagagacagctcctgaacaacctcaaagtatcagtaaggacttgaattctcctggaccacacagcacaaactcaggggagaaactttatgagtgttctgaatgtggaagaagcttctctaagagctctgccctcattagtcaccaaagaatccatacgggagagaaaccatatgaatgtgccgaatgtgggaaaagcttcagtaagagctccaccctggccaaccaccagcgcacccacactggagagaagccgtataaatgtgtggactgtgggaagtgcttcagtgagcgctccaagctcatcacacaccagagagtgcacacaggagagaagccctacaaatgccttgagtgtggaaaattcttccgtgaccgttctaacctcattactcaccagaggattcatacgggagagaagccgtataagtgcagagagtgtgggaaatgctttaaccagagctccagtcttattattcaccagagaatccacacaggggagaaaccctacaagtgcacagagtgtggcaaagacttcaacaacagttcccacttcagtgctcaccggagaacccatgcaggagggaaggcgtcg

SEQ ID NO: 4260 - DNA, 1350 bp, Homo sapiens
  source 1..1350: mol_type = genomic DNA
atgatgaccaaggtactaggcatggccccagttctgggccctaggcctccacaggagcaggtggggcctctgatggtaaaagtcgaggagaaagaagagaaaggcaagtaccttcctagcctggagatgttccgccagcgcttcaggcagtttgggtaccatgatacccctggaccccgagaggccctgagccaactccgggtgctctgctgtgagtggctgaggcccgagatccacaccaaggagcagatcctggagctactggtgctggagcagttcctgaccatcctgccccaggagctccaggcctgggtgcaggagcattgcccggagagcgctgaagaggctgtcactctcctcgaagatctggagcgggaactggatgagccaggacaccaggtctcaactcctccaaacgaacagaaaccggtgtgggagaagatatcctcctcaggaactgcaaaggaatccccgagcagcatgcagccacagcccttggagaccagtcacaaatacgagtcttgggggcccctgtacatccaagagtctggtgaggagcaggagttcgctcaagatccaagaaaggtccgagattgcagattgagtacccagcacgaggaatcagcagatgagcagaaaggttctgaagcagaggggctcaaaggggatataatttctgtgattatcgccaataaacctgaggccagcttagagaggcagtgcgtaaaccttgaaaatgaaaaaggaacaaaaccccctcttcaagaggcaggctccaagaaaggagaacacacactggggagaaaccttacgtgtgcaccaagtgtgggaaagctttcagccacagctcaaacctcaccctccactacagaacacacttggtggaccggccctatgactgtaagtgtggaaaagcttttgggcagagctcagaccttcttaaacatcagagaatgcacacagaagaggcgccatatcagtgcaaagattgtggcaaggctttcagcgggaaaggcagcctcattcgtcactatcggatccacactggggagaagccttatcagtgtaacgaatgtgggaagagcttcagtcagcatgcgggcctcagctcccaccagagactccacaccggagagaagccatataagtgtaaggagtgtgggaaagccttcaaccacagctccaacttcaataaacaccacagaatccacaccggggaaaagccctactggtgtcatcactgtggaaagaccttctgtagcaagtccaatctttccaaacatcagcgagtccacactggagagggagaagcaccgtaactttcaagcgctcctgttgttgtcgttgttt

SEQ ID NO: 4261 - DNA, 1473 bp, Homo sapiens
  source 1..1473: mol_type = genomic DNA
atggccatccccaagcactccctgagcccagtgccgtgggaagaggacagcttccttcaagtgaaggtggaggaggaagaggaagccagcctctcccagggcggagaatccagccatgaccacattgctcactctgaggctgcacgcctgcgcttccggcacttccgctatgaggaggcatctggtccacacgaggccctggcccacctccgagcgctgtgctgtcagtggctgcagcccgaggcgcactccaaggagcagatactggagctgctggtgctggagcagttcctgggtgcgctgcccccagagatccaagcctgggtgggagcccagagtcccaagagcggagaggaagccgctgtgctggtggaggatctgactcaggtgctggacaagagaggatgggatccaggagccgagcccacagaggcaagctgcaagcagagtgacctgggagagtcagagccatcaaatgtcactgagaccctcatgggaggtgtttcccttggacccgcctttgtcaaggcatgtgaacctgagggcagctcagagaggtctggactatcaggggagatctggacaaagtctgtcacccaacagatccacttcaagaaaacttcagggccttacaaggatgtccccacagaccagcgtggccgtgaatctggtgcctcgaggaacagttctagtgcgtggccaaacctcacctcccaagagaagcctccttcagaagacaaatttgatctggtggatgcttatgggacagagcctccatacacctactcagggaagaggtcctccaagtgtcgcgagtgtaggaagatgttccagagtgcttcggcgctcgaggcacaccagaagacccattctcggaagaccccatatgcctgcagcgagtgtgggaaagccttcagccggagcactcacctcgcccagcaccaggttgtccacacaggggcgaagccccatgagtgtaaggaatgtgggaaggccttcagccgagtcacccacctgactcagcaccaaaggattcatactggagagaaaccctacaaatgtggggaatgtggtaaaaccttcagccgcagcactcacctcacccagcaccagcgggtgcacacgggggagcggccctacgagtgtgacgcgtgtgggaaagccttcagccagagcacgcacctgactcaacaccagcgcatccacaccggggagaagccctacaagtgtgacgcgtgtggccgagccttcagcgactgctcagccctgatccgacatctgagaatccactctggagagaagccatatcagtgtaaggtttgtccgaaggcctttgcacagagctcctccctcattgagcaccagaggatccacacgggagagaagccttataagtgcagcgactgtgggaaggccttcagtcgtagctcagccctgatggttcacttgcggatccacatcacggtgctgcaa

SEQ ID NO: 4262 - DNA, 1167 bp, Homo sapiens
  source 1..1167: mol_type = genomic DNA
atggccataaccttgacccttcagactgcagagatgcaggaaggacttctggcagtgaaggtaaaggaggaagaggaggaacattcctgtgggccagaatcaggcctgtcaagaaataaccctcataccagagagatctttcgtagacgcttcaggcagttctgctatcaggagtcccctgggccccgggaggctcttcaaagactccaggagctctgccatcagtggctgagaccagagatgcacaccaaggagcagatcctagagctgctggtgctggagcagttcctgactatcctgcctgaggagctccaggcctgggtcagacagcaccgtcctgtgagtggagaggaggcagtgactgtgctggaggatttggagagagagctggatgacccaggagagcaggtcctgagccatgctcatgaacaggaagagtttgtaaaggagaaggcaactccaggagcagctcaggagtcatcaaatgaccaattccaaaccttggaagagcaacttgggtataatttgcgagaggtgtgcccagttcaagagattgatggcaaggctgggacttggaatgtggagttagccccaaagagggagatttctcaggaagtgaaatctcttatacaagttcttggaaaacagaatggtaatattactcagattcctgagtatggagatacctgtgaccgtgagggcagattggaaaagcaaagggtgagctcttcagtggagagaccctatatctgtagtgaatgtggaaaaagcttcacccagaattccatccttatcgagcaccagagaacacacacaggtgagaagccttatgaatgtgatgagtgtgggcgggccttcagccagaggtcaggcctattccagcaccagagactccacactggggagaagcgctaccagtgcagtgtttgtggcaaagccttcagccagaatgccgggcttttccatcacctcagaattcacactggggagaagccttaccagtgcaatcagtgcaataagagttttagtcgacgttcagtcctcattaagcatcagagaattcacactggagagagaccttatgaatgtgaagaatgtggcaagaacttcatttaccattgcaacctaatccagcatcggaaagtccacccagtggctgaatcaagc

SEQ ID NO: 4263 - DNA, 576 bp, Homo sapiens
  source 1..576: mol_type = genomic DNA
atggagcttgttccagccactccccattatcctgcagatgtgcttttccagactgatccaactgcagagatggcagctgagtcattgcctttctccttcgggacactgtccagctgggagctggaagcctggtatgaggacctgcaagaggtcctgtcttcagatgaaaatgggggtacctatgtttcacctcctggaaatgaagaggaagaatcaaaaatcttcaccactcttgaccctgcttctctggcttggctgactgaggaggagccagaaccagcagaggtcacaagcacctcccagagccctcactctccagattccagtcagagctccctggctcaggaggaagaggaggaagaccaagggagaaccaggaaacggaaacagagtggtcattccccagcccgggctggaaagcagcgcatgaaggagaaagaacaggagaatgaaaggaaagtggcacagctagctgaagagaatgaacggctcaagcaggaaatcgagcgcctgaccagggaagtagaggcgactcgccgagctctgattgaccgaatggtgaatctgcaccaagca

SEQ ID NO: 4264 - DNA, 2115 bp, Homo sapiens
  source 1..2115: mol_type = genomic DNA
atgggctttatgttacctctcatcttcaggtacagcccacgcttgatggaaaaaattctccaaatggctgaaggtattgatattggggagatgccttcatatgatctggtgctgtccaaaccttccaaaggtcaaaaacgccacctctcaacatgtgatggtcaaaatcctcctaaaaagcaagccggttccaaattccatgcgagacctcgttttgagcctgtacattttgtagctagtagttcaaaagatgaaagacaggaagatccttatggccctcaaacaaaagaggtaaatgaacaaacacattttgccagcatgccaagagacatctaccaagattatactcaagactctttcagtatacaagatgggaattctcagtattgtgattcatcaggattcattctcacaaaagaccagcctgtaacagccaacatgtattttgacagtgggaaccctgccccaagcaccacatcacagcaggcaaactctcagtcaactcctgagccttcaccatcacagacatttcccgagtctgtggtagccgagaagcagtattttattgaaaaattaacggcgacaatctggaagaacctttctaatccagaaatgacttctggatctgataaaattaattatacatatatgttaactcgttgtattcaggcgtgtaagacaaatcctgagtatatatatgctcctttaaaggaaattcctcctgccgacatccccaaaaataaaaaacttctaactgatggctatgcttgtgaagttagatgccaaaatatctacttaactacaggttatgctggcagcaagaatgggtccagggatcgagctacagagctagctgtaaaactcttgcagaaacgtattgaagttagagttgtccggcggaaattcaagcatacatttggagaggacctcgtggtgtgtcagattggcatgtcctcctatgaatttcctccagctctgaagccaccagaagacctggtggtgctgggtaaagatgcttccgggcagccaatttttaatgcttctgccaaacactggaccaattttgtcattacagaaaatgcaaatgatgcaattggtatccttaacaattctgcctcattcaacaagatgtcaattgaatacaaatatgagatgatgccaaatcgcacatggcgttgtcgagtgtttttacaagatcactgcttagctgaaggttatggaaccaagaaaacaagtaaacatgcagctgccgacgaggctttgaaaattcttcaaaaaacacagcccacttatccatctgtcaaaagttcacaatgccatacaggctcttcacccagaggatctggaaagaagaaagatataaaggatcttgtagtttatgagaattcttcaaatcccgtgtgcacgctgaacgacacagctcagtttaaccgaatgacagttgagtatgtctatgaaaggatgacaggcctccgctggaaatgcaaagtgattctagagagtgaagtaattgcagaagcagttggggtgaagaaaactgtcaaatatgaagctgctggggaagctgtgaaaaccctcaaaaagacccagccaactgtcattaacaacttgaagaaaggagctgttgaagatgtgatttcaagaaatgaaattcagggccgctcagcagaggaggcttacaaacagcaaatcaaagaagataatattggaaatcagctgctgagaaagatgggttggactggtggtggtttaggtaaatctggtgagggcatacgggagcctatctcagtgaaagagcagcataagcgggaagggcttggtctggatgtagagagggtgaataaaattgccaagagagatattgaacagatcatcagaaactacgcccgctccgagagccacacagatttgactttctctagagagctgactaatgatgaacggaagcaaatacatcagattgcccagaagtatggtcttaagagtaagtctcatggggtgggccatgataggtacctagtggtaggtagaaaaagacggaaggaagacctactagatcagctcaaacaggaaggccaagtgggccattacgagcttgttatgcctcaagcaaat

SEQ ID NO: 4265 - DNA, 2484 bp, Homo sapiens
  source 1..2484: mol_type = genomic DNA
atggcggctgaagaggcggatgtggatatcgaaggggacgtggtagcggcggcgggggcacagccaggaagtggtgaaaatacagcatcagttttacaaaaagatcactatcttgattcatcttggagaacagagaatggccttattccttggaccttggataacaccatcagtgaagagaacagagctgttattgagaaaatgttgttggaagaagaatattatttatctaaaaaatcacaaccggaaaaagtctggcttgatcaaaaggaagatgataaaaaatacatgaagagtctgcagaaaacagcaaaaatcatggtacactctcctacaaaaccagccagttactcagtaaagtggacgatagaagaaaaagagctgtttgaacaagggctggctaaatttggccgaagatggaccaaaatttcaaagctaattggaagccgcactgttttacaagtgaagagttatgcaagacagtattttaaaaataaggtcaaatgcggtctggataaagaaacaccaaatcagaagaccggccataatcttcaagttaaaaatgaagataaagggacaaaggcatggacaccatcatgtttaaggggacgtgctgatcccaacttgaatgctgtaaaaattgaaaagttatctgatgatgaagaagtagacatcacagatgaggtggacgagttgtcttctcaaacaccccagaagaattctagcagtgatctcttgttagactttcctaatagtaaaatgcatgaaaccaatcaaggagaattcattacttctgacagccaggaagctctcttttctaagtcttccaggggctgtcttcaaaatgaaaagcaagatgaaacactttcaagctcagaaattacactgtggactgagaaacagagcaatggtgacaaaaaatcaattgaattaaatgaccagaaatttaatgaattgattaaaaactgcaacaagcatgatggaaggggaataatagttgatgccaggcagttgccttctccagagccttgtgaaattcagaaaaatttgaatgataatgaaatgctttttcattcttgccaaatggtagaggaaagccatgaggaagaagagcttaagccaccagaacaggaaatagaaatagatagaaatatcattcaagaagaagaaaaacaagcaattcctgagttttttgaggggcgccaagctaaaacaccagaacgctatttgaaaattagaaattatattttggatcaatgggagatatgcaaaccaaaatacttaaataagacctcagtacgtcctggcctgaagaactgtggagatgttaattgtattggacggattcatacatacctcgaattgataggagcaatcaattttggatgtgaacaggctgtgtataataggccacaaacagttgacaaagtacgaatcagagacagaaaagatgcagtagaagcataccaacttgcccagcgtctgcagtctatgcgtacaaggagacgtagggtccgagacccatggggaaactggtgtgatgcaaaggacttagaaggacaaacgtttgagcatctctctgctgaggagttggcaaaaagaagagaagaggaaaaaggcagacctgttaaatctttaaaagtgccaagaccaacaaaaagctcgtttgatcccttccaactgataccttgtaatttttttagtgaagaaaagcaggagccatttcaggtgaaagtggcttcagaagcacttttaataatggatttgcatgctcatgtttctatggcagaagtgattggtctgttaggaggaagatactcagaagttgataaagtagttgaagtctgtgcagcagaaccatgtaacagtctgagtacaggactacagtgtgagatggatcctgtatcacaaacacaggcctcagaaaccttggctgttagaggcttcagtgttattggatggtatcattctcatcctgcttttgatcctaatccttccttacgagatattgacacacaagctaaataccagagttacttctccagaggaggtgcaaagttcattgggatgattgttagtccctataatcgaaataatcccttaccatattctcagattacctgcctggttataagtgaggaaattagcccagatggctcttatcgcttaccttacaaatttgaagtacagcagatgttagaagaacctcagtggggattagtatttgaaaagacaagatggataatagaaaaatacaggctctcccatagcagcgtccccatggataaaatctttcgccgggattctgacctgacttgtttgcagaaacttttggagtgtatgaggaagactctgagcaaagtgaccaattgctttatggctgaagaattcttgactgaaatagaaaatttgttcctttccaattataaaagcaaccaagagaatggagtaaccgaagagaactgtacaaaggaattgttaatg

SEQ ID NO: 4266 - DNA, 3162 bp, Homo sapiens
  source 1..3162: mol_type = genomic DNA
atggccgcagtcaaggagcctttggagttccatgccaagcggccttggcgccccgaggaggcagtagaagatccggacgaggaggatgaggataatactagtgaagccgagaatgggttctccctggaggaagtgttacggctcggaggcaccaagcaagattaccttatgctggctactttggatgagaatgaggaagtgatagatggaggcaaaaaaggagcaatcgatgaccttcagcaaggtgaattggaagcatttattcaaaatcttaatttggcgaagtatacaaaagcttccttagttgaagaagatgaaccagctgaaaaagaaaattccagcaaaaaagaagtaaaaatacctaaaataaataataaaaatacagcagaaagtcaaaggacatcagttaataaggtgaaaaataagaataggccagaaccacattctgatgagaatggcagtaccacaccgaaagtaaagaaagataaacagaacatctttgaattttttgagagacagactttgttacttaggcctggaggcaaatggtatgatctggagtacagcaatgaatattctttgaaaccccagcctcaggatgttgtatctaagtacaaaacccttgctcagaagctgtatcagcatgaaatcaacttattcaaaagtaagacgaatagtcaaaagggagcctcttctacctggatgaaggcaattgtgtcatcggggacactaggtgacaggatggcagccatgattcttcttattcaggatgatgccgttcacacacttcagtttgtagaaactcttgtgaaccttgttaaaaagaagggcagcaaacagcagtgccttatggccttggatactttcaaagagttgcttatcacagaccttttgccagacaatcggaagctgaggattttcagccagcgtccttttgacaaactggaacagttgtccagtggcaacaaggactcaagagatagaagactgatattatggtattttgaacaccagctgaaacacttagtggctgaatttgtgcaggtcttagaaactttaagtcatgatacattagtaaccactaaaactcgagcccttaccgtggctcatgagctgctttgtaacaagcctgaggaagaaaaggctcttcttgtgcaagtggtaaataaactgggagatcctcagaacagaattgccacaaaagcatcccatctgttagagacattactttgtaaacatcccaatatgaaaggagttgtgtctggtgaagtagaaaggctactcttccgctcaaatatcagctccaaagctcaatattatgcaatttgctttttaaatcaaatggctctgtcccatgaagaaagtgaattggctaacaaattaataactgtttacttttgcttttttcggacttgtgtcaaaaaaaaagatgttgaatcaaaaatgcttagcgcccttttaacaggtgtgaatagggcatacccttattcccagactggtgatgacaaagtaagggagcagattgacacactgtttaaagtgttgcatattgtgaattttaataccagtgtccaggctttaatgttgcttttccaagtaatgaattctcagcagacaatatcggatcgatattacacagcattatacaggaagatgttggatccagggttgatgacgtgttccaagcaagctatgtttcttaaccttgtctacaaatctctgaaagctgacattgtgttgcgccgggtgaaggcttttgtgaagaggttacttcaagttacttgtcaacagatgccaccatttatatgtggagctttatatcttgtgtctgagatccttaaagcaaaaccaggtttaagaagccaactagatgatcatccggagtctgatgatgaagaaaattttattgatgcaaatgatgatgaagacatggaaaaattcactgatgcagacaaagaaacagagatagtgaaaaaacttgagacagaggaaacagttcctgaaactgatgtagaaaccaaaaaaccagaggttgcttcctgggtgcactttgataatttgaaaggtgggaaacagttaaataaatacgatccattcagtagaaaccctctgttctgtggagctgaaaatacaagtctttgggaactcaaaaagttatctgtgcattttcatccctccgtggccctttttgcaaagaccatccttcagggaaactatattcagtattcaggggacccactgcaggatttcactctaatgagatttttggatcgatttgtataccgaaatccaaagccccataaaggcaaagaaaacacagatagtgttgtgatgcagccgaaaagaaaacattttattaaggatattcgtcatcttcctgtgaacagtaaggagttccttgcaaaagaagaaagccaaataccagtggatgaagtgtttttccacaggtattataaaaaagttgctgttaaagagaaacaaaaacgggatgcagatgaagaaagtatagaagacgtggatgatgaagaatttgaagagctgattgacacatttgaagatgataactgtttcagctctggaaaggatgatatggattttgctggaaacgtgaaaaagagaacaaaaggagctaaggataacacattagatgaagattcagaaggtagtgatgatgaacttggtaacctggatgacgatgaagtttctttaggaagtatggatgatgaagaatttgctgaagttgatgaagatggaggaacattcatggatgtgttagatgatgaaagtgagagcgttccagaacttgaagtccactccaaagtcagtactaagaaaagcaagagaaaaggtacagatgattttgactttgctggctcatttcaagggccaagaaaaaagaaaagaaacttaaatgattccagcctatttgtatctgctgaagagtttggccatctattggatgaaaatatgggatccaagtttgataacattggcatgaatgccatggctaacaaagataatgcaagtctcaaacagcttagatgggaggctgaacgtgatgactggctacacaacagagatgcaaaaagtatcatcaagaaaaagaaacattttaaaaagaagaggattaaaaccactcaaaaaactaaaaaacaaaggaaa

SEQ ID NO: 4267 - DNA, 1626 bp, Homo sapiens
  source 1..1626: mol_type = genomic DNA
atggccgcgggagccgggacggcgggccccgcttccggcccgggcgtcgtgcgtgacccagcggcgtcacagccgaggaagcggcccggccgggagggcggggagggcgcgcggcgatcggacacgatggcgggaggaggcgggagtagcgacggcagcgggcgggcagctggcaggcgggcgtcccgcagtagcgggcgggcccggcgggggcgccacgagccggggctggggggcccggcggagcgcggcgcgggggaggcacggctggaagaggcagtcaatcgctgggtgctcaagttctacttccacgaggcgctgcgggcctttcggggtagccggtacggggacttcagacagatccgggacatcatgcaggctttgcttgtcaggcccttggggaaggagcacaccgtgtcccgattgctgcgggttatgcagtgtctgtcgcggattgaagaaggggaaaatttagactgttcctttgatatggaggctgagctcacaccactggaatcagctatcaatgtgctggagatgattaaaacggaatttacactgacagaagcagtggtcgaatccagtagaaaactggtcaaggaagctgctgtcattatttgtatcaaaaacaaagaatttgaaaaggcttcaaaaattttgaaaaaacatatgtccaaggaccccacaactcagaagctgagaaatgatctcctgaatattattcgagaaaagaacttggcccatcctgttatccagaacttttcatatgagaccttccagcagaagatgctgcgcttcctggagagccacctggatgacgccgagccctacctcctcacgatggccaaaaaggctttgaaatctgagtccgctgcctcaagtacagggaaggaagataaacagccagcaccagggcctgtggaaaagccacccagagaacccgcaaggcagctacggaatcctccaaccaccattggaatgatgactctgaaagcagctttcaagactctgtctggtgcacaggattctgaggcagcctttgcaaaactggaccagaaggatctggttcttcctactcaagctctcccagcatcaccagccctcaaaaacaagagacccagaaaagatgaaaacgaaagttcagccccggctgacggtgagggtggctcggaactgcagcccaagaacaagcgcatgacaataagcagattggtcttggaggaggacagccagagtactgagcccagcgcaggcctcaactcctcccaggaggccgcttcagcgccaccatccaagcccaccgttctcaaccaacccctccctggagagaagaatcccaaagtacccaaaggcaagtggaacagctctaatggggttgaagaaaaggagacttgggtggaagaggatgaactgtttcaagttcaggcagcaccagatgaagacagtacaaccaatataacaaaaaagcagaagtggactgtagaagaaagcgagtgggtcaaggctggagtgcagaaatatggggaaggaaactgggctgccatttctaaaaattacccatttgttaaccgaacagctgtgatgattaaggatcgctggcggaccatgaaaagacttggcatgaac

SEQ ID NO: 4268 - DNA, 1191 bp, Homo sapiens
  source 1..1191: mol_type = genomic DNA
ctggaggtgagacccaaagaaagctggaaccatgctgactttgtacactgtgaggacacagagtctgttcctggaaagcccagtgtcaacgcagatgaggaagtcggaggtccccaaatctgccgtgtatgtggggacaaggccactggctatcacttcaatgtcatgacatgtgaaggatgcaagggctttttcaggagggccatgaaacgcaacgcccggctgaggtgccccttccggaagggcgcctgcgagatcacccggaagacccggcgacagtgccaggcctgccgcctgcgcaagtgcctggagagcggcatgaagaaggagatgatcatgtccgacgaggccgtggaggagaggcgggccttgatcaagcggaagaaaagtgaacggacagggactcagccactgggagtgcaggggctgacagaggagcagcggatgatgatcagggagctgatggacgctcagatgaaaacctttgacactaccttctcccatttcaagaatttccgggtctctctgcagctgcggggggaggatggcagtgtctggaactacaaacccccagccgacagtggcgggaaagagatcttctccctgctgccccacatggctgacatgtcaacctacatgttcaaaggcatcatcagctttgccaaagtcatctcctacttcagggacttgcccatcgaggaccagatctccctgctgaagggggccgctttcgagctgtgtcaactgagattcaacacagtgttcaacgcggagactggaacctgggagtgtggccggctgtcctactgcttggaagacactgcaggtggcttccagcaacttctactggagcccatgctgaaattccactacatgctgaagaagctgcagctgcatgaggaggagtatgtgctgatgcaggccatctccctcttctccccagaccgcccaggtgtgctgcagcaccgcgtggtggaccagctgcaggagcaattcgccattactctgaagtcctacattgaatgcaatcggccccagcctgctcataggttcttgttcctgaagatcatggctatgctcaccgagctccgcagcatcaatgctcagcacacccagcggctgctgcgcatccaggacatacacccctttgctacgcccctcatgcaggagttgttcggcatcacaggtagc

SEQ ID NO: 4269 - DNA, 1419 bp, Homo sapiens
  source 1..1419: mol_type = genomic DNA
atgacagtcaccaggactcaccacttcaaggaggggtccctcagagcacctgccatacccctgcacagtgctgcggctgagttggcttcaaaccatccaagaggcccagaagcaaacctggaggtgagacccaaagaaagctggaaccatgctgactttgtacactgtgaggacacagagtctgttcctggaaagcccagtgtcaacgcagatgaggaagtcggaggtccccaaatctgccgtgtatgtggggacaaggccactggctatcacttcaatgtcatgacatgtgaaggatgcaagggctttttcaggagggccatgaaacgcaacgcccggctgaggtgccccttccggaagggcgcctgcgagatcacccggaagacccggcgacagtgccaggcctgccgcctgcgcaagtgcctggagagcggcatgaagaaggagatgatcatgtccgacgaggccgtggaggagaggcgggccttgatcaagcggaagaaaagtgaacggacagggactcagccactgggagtgcaggggctgacagaggagcagcggatgatgatcagggagctgatggacgctcagatgaaaacctttgacactaccttctcccatttcaagaatttccggctgccaggggtgcttagcagtggctgcgagttgccagagtctctgcaggccccatcgagggaagaagctgccaagtggagccaggtccggaaagatctgtgctctttgaaggtctctctgcagctgcggggggaggatggcagtgtctggaactacaaacccccagccgacagtggcgggaaagagatcttctccctgctgccccacatggctgacatgtcaacctacatgttcaaaggcatcatcagctttgccaaagtcatctcctacttcagggacttgcccatcgaggaccagatctccctgctgaagggggccgctttcgagctgtgtcaactgagattcaacacagtgttcaacgcggagactggaacctgggagtgtggccggctgtcctactgcttggaagacactgcaggtggcttccagcaacttctactggagcccatgctgaaattccactacatgctgaagaagctgcagctgcatgaggaggagtatgtgctgatgcaggccatctccctcttctccccagaccgcccaggtgtgctgcagcaccgcgtggtggaccagctgcaggagcaattcgccattactctgaagtcctacattgaatgcaatcggccccagcctgctcataggttcttgttcctgaagatcatggctatgctcaccgagctccgcagcatcaatgctcagcacacccagcggctgctgcgcatccaggacatacacccctttgctacgcccctcatgcaggagttgttcggcatcacaggtagc

SEQ ID NO: 4270 - DNA, 1302 bp, Homo sapiens
  source 1..1302: mol_type = genomic DNA
ctggaggtgagacccaaagaaagctggaaccatgctgactttgtacactgtgaggacacagagtctgttcctggaaagcccagtgtcaacgcagatgaggaagtcggaggtccccaaatctgccgtgtatgtggggacaaggccactggctatcacttcaatgtcatgacatgtgaaggatgcaagggctttttcaggagggccatgaaacgcaacgcccggctgaggtgccccttccggaagggcgcctgcgagatcacccggaagacccggcgacagtgccaggcctgccgcctgcgcaagtgcctggagagcggcatgaagaaggagatgatcatgtccgacgaggccgtggaggagaggcgggccttgatcaagcggaagaaaagtgaacggacagggactcagccactgggagtgcaggggctgacagaggagcagcggatgatgatcagggagctgatggacgctcagatgaaaacctttgacactaccttctcccatttcaagaatttccggctgccaggggtgcttagcagtggctgcgagttgccagagtctctgcaggccccatcgagggaagaagctgccaagtggagccaggtccggaaagatctgtgctctttgaaggtctctctgcagctgcggggggaggatggcagtgtctggaactacaaacccccagccgacagtggcgggaaagagatcttctccctgctgccccacatggctgacatgtcaacctacatgttcaaaggcatcatcagctttgccaaagtcatctcctacttcagggacttgcccatcgaggaccagatctccctgctgaagggggccgctttcgagctgtgtcaactgagattcaacacagtgttcaacgcggagactggaacctgggagtgtggccggctgtcctactgcttggaagacactgcaggtggcttccagcaacttctactggagcccatgctgaaattccactacatgctgaagaagctgcagctgcatgaggaggagtatgtgctgatgcaggccatctccctcttctccccagaccgcccaggtgtgctgcagcaccgcgtggtggaccagctgcaggagcaattcgccattactctgaagtcctacattgaatgcaatcggccccagcctgctcataggttcttgttcctgaagatcatggctatgctcaccgagctccgcagcatcaatgctcagcacacccagcggctgctgcgcatccaggacatacacccctttgctacgcccctcatgcaggagttgttcggcatcacaggtagc

SEQ ID NO: 4271 - DNA, 1317 bp, Homo sapiens
  source 1..1317: mol_type = genomic DNA
atggcggaggatgtttcctcagcggccccgagcccgcggggctgtgcggatggtagggatgccgaccctactgaggagcagatggcagaaacagagagaaacgacgaggagcagttcgaatgccaggaactgctcgagtgccaggtgcaggtgggggcccccgaggaggaggaggaggaggaggaggacgcgggcctggtggccgaggccgaggccgtggctgccggctggatgctcgatttcctctgcctctctctttgccgagctttccgcgacggccgctccgaggacttccgcaggacccgcaacagcgcagaggctattattcatggactatccagtctaacagcttgccagttgagaacgatatacatatgtcagtttttgacaagaattgcagcaggaaaaacccttgatgcacagtttgaaaatgatgaacgaattacacccttggaatcagccctgatgatttggggttcaattgaaaaggaacatgacaaacttcatgaagaaatacagaatttaattaaaattcaggctatagctgtttgtatggaaaatggcaactttaaagaagcagaagaagtctttgaaagaatatttggtgatccaaattctcatatgcctttcaaaagcaaattgcttatgataatctctcagaaagatacatttcattccttttttcaacacttcagctacaaccacatgatggagaaaattaagagttatgtgaattatgtgctaagtgaaaaatcatcaacctttctaatgaaggcagcggcaaaagtagtagaaagcaaaaggacaagaacaataacttctcaagataaacctagtggtaatgatgttgaaatggaaactgaagctaatttggatacaagaaaaagtgttagtgacaaacagtctgcggtaactgaatcctcagagggtacagtatccttattgaggtctcacaagaatcttttcttatctaagttgcaacatggaacccagcaacaagaccttaataagaaagaaagaagagtaggaactcctcaaagtacaaaaaagaaaaaagaaagcagaagagccactgaaagcagaatacctgtttcaaagagtcagccggtaactcctgaaaaacatcgagctagaaaaagacaggcatggctttgggaagaagacaagaatttgagatctggcgtgaggaaatatggagagggaaactggtctaaaatactgttgcattataaattcaacaaccggacaagtgtcatgttaaaagacagatggaggaccatgaagaaactaaaactgatttcctcagacagcgaagac

SEQ ID NO: 4272 - DNA, 1092 bp, Homo sapiens
  source 1..1092: mol_type = genomic DNA
atgagtttggctgggggccgggcaccccggaagaccgctgggaaccggctttctgggcttttggaggcagaggaggaagatgagttctaccagacgacttatgggggtttcacagaggaatccggagatgatgagtatcaaggggaccagtcagacacagaggacgaagtggactctgactttgacattgatgaaggggatgaaccatccagtgatggagaagcagaagagccaagaaggaagcgccgagtagtcaccaaggcctataaggaacctctcaagagcttaaggcctcgaaaggtcaacaccccggctggtagctctcagaaggcgcgagaagagaaggcactactgccattagaactacaagatgacggctctgacagtcggaagtctatgcgtcagtctacagctgagcatacacgacaaacgttccttcgggtacaggagaggcagggccagtcaagacggcgaaaggggccccactgtgagcggccactaacccaggaggaactgctccgggaggccaagatcacagaagagcttaatttacggtcactggagacatatgagcggctcgaggctgataaaaagaagcaggttcataagaagcggaagtgccccgggcccataatcacctatcattcagtgacagtgccacttgttggggagccaggccccaaggaagagaacgttgacatagaaggacttgatcctgctccctcggtgtctgcattgactcctcatgctgggactggacccgtcaacccccctgctcgctgctcacgtaccttcatcacttttagtgatgatgcaactttcgaggaatggttcccccaagggcggcccccaaaagtccctgttcgtgaggtctgtccagtgacccatcgtccagccctataccgggaccctgttacagacataccctatgccactgctcgagccttcaagatcattcgtgaggcttacaagaagtacattactgcccatggactgccgcccactgcctcagccctgggccccggcccgccacctcctgagcccctccctggctctgggccccgagccttgcgccagaaaattgtcattaaa

SEQ ID NO: 4273 - DNA, 1125 bp, Homo sapiens
  source 1..1125: mol_type = genomic DNA
atgagtttggctgggggccgggcaccccggaagaccgctgggaaccggctttctgggcttttggaggcagaggaggaagatgagttctaccagacgacttatgggggtttcacagaggaatccggagatgatgagtatcaaggggaccagtcagacacagaggacgaagtggactctgactttgacattgatgaaggggatgaaccatccagtgatggagaagcagaagagccaagaaggaagcgccgagtagtcaccaaggcctataaggaacctctcaagagcttaaggcctcgaaaggtcaacaccccggctggtagctctcagaaggcgcgagaagagaaggcactactgccattagaactacaagatgacggctctgacagtcggaagtctatgcgtcagtctacagctgagcatacacgacaaacgttccttcgggtacaggagaggcagggccagtcaagacggcgaaaggggccccactgtgagcggccactaacccaggaggaactgctccgggaggccaagatcacagaagagcttaatttacggtcactggagacatatgagcggctcgaggctgataaaaagaagcaggttcataagaagcggaagtgccccgggcccataatcacctatcattcagtgacagtgccacttgttggggagccaggccccaaggaagagaacgttgacatagaaggctctttgtgtttttccttgtcttttgtcctcagacttgatcctgctccctcggtgtctgcattgactcctcatgctgggactggacccgtcaacccccctgctcgctgctcacgtaccttcatcacttttagtgatgatgcaactttcgaggaatggttcccccaagggcggcccccaaaagtccctgttcgtgaggtctgtccagtgacccatcgtccagccctataccgggaccctgttacagacataccctatgccactgctcgagccttcaagatcattcgtgaggcttacaagaagtacattactgcccatggactgccgcccactgcctcagccctgggccccggcccgccacctcctgagcccctccctggctctgggccccgagccttgcgccagaaaattgtcattaaa

SEQ ID NO: 4274 - DNA, 3330 bp, Homo sapiens
  source 1..3330: mol_type = genomic DNA
atggcggaaaacaaaggcggcggcgaggctgagagcggcggcgggggcagcggcagcgcgccggtaactgccggggccgccgggcccgccgcgcaggaggcggagccgcctctcaccgcggtgctggtggaggaggaggaggaggaaggcggcagggccggcgctgagggcggcgcggccgggcccgacgacgggggggtggccgcggcctcctcgggctcggcccaggctgcttcatctcctgcggcctcagtgggcactggagttgccgggggcgcagtatcgacgccggctccagctccagcctcggctcccgctccgggtccctcggcagggccgcctcctggaccgccagcctcgctcctggacacctgcgccgtgtgtcagcagagcttgcagagccggcgtgaggcggagcccaagctgctgccctgtcttcactccttctgcctgcgctgcctgcccgagccggagcgccagctcagcgtgcccatcccggggggcagcaacggcgacatccagcaagttggtgtaatacggtgcccagtatgccgccaagaatgcagacagatagaccttgtggataattattttgtgaaagacacatctgaagctcctagcagttctgatgaaaaatcagaacaggtatgtactagttgtgaagacaatgcaagtgcagttggcttttgtgtagaatgtggagagtggctatgtaagacatgtatcgaagcacatcaaagagtaaaatttactaaagatcacttgatcaggaagaaagaagatgtctcagagtctgttggagcatctggtcaacgccctgttttctgccctgtacacaaacaagaacagttgaaacttttctgtgaaacatgtgatagattgacatgtagagactgtcagctattggaacacaaagaacataggtatcagtttttggaagaagcttttcaaaatcagaagggtgcaattgagaatctactggcgaaacttcttgagaagaagaattatgttcattttgcagctactcaggtgcagaataggataaaagaagtaaatgagactaacaaacgagtagaacaggaaattaaagtggccattttcacccttatcaatgaaattaataagaaaggaaaatctctcttacaacagctagagaatgttacaaaggaaagacagatgaagttactacagcagcagaatgacatcacaggcctttcccggcaggtgaagcatgttatgaacttcacaaattgggcaattgcaagtggcagcagcacagcactactatacagcaagcgactgattactttccagttgcgtcatattttgaaagcacggtgtgatcctgtccctgctgctaatggagcaatacgtttccattgtgatcccaccttctgggcaaagaatgtagtcaatttaggtaatctagtaatagagagtaaaccagctcctggttatactcctaatgttgtagttgggcaagttcctccagggacaaaccacattagtaaaacccctggacagattaacttagcacagcttcgactccagcacatgcaacaacaagtatatgcacagaaacatcagcagttgcaacagatgaggatgcagcaaccaccagcacctgtaccaactacaacaacaacaacacaacagcatcctagacaagcagcccctcagatgttacaacaacagcctcctcgattgatcagtgtgcaaacaatgcaaagaggcaacatgaactgtggagcttttcaagcccatcagatgagactggctcagaatgctgccagaataccagggatacccaggcacagcggccctcaatattccatgatgcagccacacctccaaagacaacactcaaacccagggcatgctggaccctttcccgtagtatcggtacacaacaccacaatcaacccaacgagccctactacagcaactatggcaaatgcaaaccgaggtcccaccagcccatctgttacagcaatagagctaatcccctcagttaccaatccagaaaaccttccatcgctgccagatattccacccatacagttggaagatgctggctcaagtagtttagataatctactaagtagatacatctcaggcagtcacctacccccacagcctacaagcaccatgaatccttctccaggtccctctgccctttctccgggatcatcaggtttatccaattctcacacacctgtgagacccccaagtacttctagtactggcagtcgaggcagctgtgggtcatcaggaagaactgctgagaagacaagtcttagtttcaaatctgatcaggtgaaggtcaagcaagaacctgggactgaagatgaaatatgtagcttttcaggaggtgtaaaacaagaaaaaacagaggatggcaggaggagtgcttgcatgttgagcagtcctgagagtagcttgacaccacctctctcaaccaacctgcatctagaaagtgaattggatgcattggcaagcctggaaaaccatgtgaaaattgaacctgcagatatgaatgaaagctgcaaacagtcagggctcagcagccttgttaatggaaagtccccaattcgaagcctcatgcacaggtcggcaaggattggaggagatggcaacaataaagatgatgacccaaatgaagactggtgtgctgtctgccaaaacggaggagatctcttgtgctgcgaaaaatgtccaaaggtctttcatctaacttgtcatgttccaacactacttagctttccaagtggggactggatatgcacattttgtagagatattggaaagccagaagttgaatatgattgtgataatttgcaacatagtaagaaggggaaaactgcgcaggggttaagccccgtggaccaaaggaaatgtgaacgtcttctgctttacctctattgccatgaattaagtattgaattccaggagcctgttcctgcttcgataccaaactactataaaattataaagaaaccaatggatttatccaccgtgaaaaagaagcttcagaaaaaacattcccaacactaccaaatcccggatgactttgtggccgatgtccgtttgatcttcaagaactgtgaaaggtttaatgaagctgattcagaagtagctcaggcagggaaagcagttgcattgtactttgaagataaactcacagagatctactcagacaggaccttcgcacctttgccagagtttgagcaggaagaggatgatggtgaggtaactgaggactctgatgaagactttatacagccccgcagaaaacgcctaaagtcagatgagagaccagtacatataaag

SEQ ID NO: 4275 - DNA, 3381 bp, Homo sapiens
  source 1..3381: mol_type = genomic DNA
atggcggaaaacaaaggcggcggcgaggctgagagcggcggcgggggcagcggcagcgcgccggtaactgccggggccgccgggcccgccgcgcaggaggcggagccgcctctcaccgcggtgctggtggaggaggaggaggaggaaggcggcagggccggcgctgagggcggcgcggccgggcccgacgacgggggggtggccgcggcctcctcgggctcggcccaggctgcttcatctcctgcggcctcagtgggcactggagttgccgggggcgcagtatcgacgccggctccagctccagcctcggctcccgctccgggtccctcggcagggccgcctcctggaccgccagcctcgctcctggacacctgcgccgtgtgtcagcagagcttgcagagccggcgtgaggcggagcccaagctgctgccctgtcttcactccttctgcctgcgctgcctgcccgagccggagcgccagctcagcgtgcccatcccggggggcagcaacggcgacatccagcaagttggtgtaatacggtgcccagtatgccgccaagaatgcagacagatagaccttgtggataattattttgtgaaagacacatctgaagctcctagcagttctgatgaaaaatcagaacaggtatgtactagttgtgaagacaatgcaagtgcagttggcttttgtgtagaatgtggagagtggctatgtaagacatgtatcgaagcacatcaaagagtaaaatttactaaagatcacttgatcaggaagaaagaagatgtctcagagtctgttggagcatctggtcaacgccctgttttctgccctgtacacaaacaagaacagttgaaacttttctgtgaaacatgtgatagattgacatgtagagactgtcagctattggaacacaaagaacataggtatcagtttttggaagaagcttttcaaaatcagaagggtgcaattgagaatctactggcgaaacttcttgagaagaagaattatgttcattttgcagctactcaggtgcagaataggataaaagaagtaaatgagactaacaaacgagtagaacaggaaattaaagtggccattttcacccttatcaatgaaattaataagaaaggaaaatctctcttacaacagctagagaatgttacaaaggaaagacagatgaagttactacagcagcagaatgacatcacaggcctttcccggcaggtgaagcatgttatgaacttcacaaattgggcaattgcaagtggcagcagcacagcactactatacagcaagcgactgattactttccagttgcgtcatattttgaaagcacggtgtgatcctgtccctgctgctaatggagcaatacgtttccattgtgatcccaccttctgggcaaagaatgtagtcaatttaggtaatctagtaatagagagtaaaccagctcctggttatactcctaatgttgtagttgggcaagttcctccagggacaaaccacattagtaaaacccctggacagattaacttagcacagcttcgactccagcacatgcaacaacaagtatatgcacagaaacatcagcagttgcaacagatgaggatgcagcaaccaccagcacctgtaccaactacaacaacaacaacacaacagcatcctagacaagcagcccctcagatgttacaacaacagcctcctcgattgatcagtgtgcaaacaatgcaaagaggcaacatgaactgtggagcttttcaagcccatcagatgagactggctcagaatgctgccagaataccagggatacccaggcacagcggccctcaatattccatgatgcagccacacctccaaagacaacactcaaacccagggcatgctggaccctttcccgtagtatcggtacacaacaccacaatcaacccaacgagccctactacagcaactatggcaaatgcaaaccgaggtcccaccagcccatctgttacagcaatagagctaatcccctcagttaccaatccagaaaaccttccatcgctgccagatattccacccatacagttggaagatgctggctcaagtagtttagataatctactaagtagatacatctcaggcagtcacctacccccacagcctacaagcaccatgaatccttctccaggtccctctgccctttctccgggatcatcaggtttatccaattctcacacacctgtgagacccccaagtacttctagtactggcagtcgaggcagctgtgggtcatcaggaagaactgctgagaagacaagtcttagtttcaaatctgatcaggtgaaggtcaagcaagaacctgggactgaagatgaaatatgtagcttttcaggaggtgtaaaacaagaaaaaacagaggatggcaggaggagtgcttgcatgttgagcagtcctgagagtagcttgacaccacctctctcaaccaacctgcatctagaaagtgaattggatgcattggcaagcctggaaaaccatgtgaaaattgaacctgcagatatgaatgaaagctgcaaacagtcagggctcagcagccttgttaatggaaagtccccaattcgaagcctcatgcacaggtcggcaaggattggaggagatggcaacaataaagatgatgacccaaatgaagactggtgtgctgtctgccaaaacggaggagatctcttgtgctgcgaaaaatgtccaaaggtctttcatctaacttgtcatgttccaacactacttagctttccaagtggggactggatatgcacattttgtagagatattggaaagccagaagttgaatatgattgtgataatttgcaacatagtaagaaggggaaaactgcgcaggggttaagccccgtggaccaaaggaaatgtgaacgtcttctgctttacctctattgccatgaattaagtattgaattccaggagcctgttcctgcttcgataccaaactactataaaattataaagaaaccaatggatttatccaccgtgaaaaagaagcttcagaaaaaacattcccaacactaccaaatcccggatgactttgtggccgatgtccgtttgatcttcaagaactgtgaaaggtttaatgaaatgatgaaagttgttcaagtttatgcagacacacaagagattaatttgaaggctgattcagaagtagctcaggcagggaaagcagttgcattgtactttgaagataaactcacagagatctactcagacaggaccttcgcacctttgccagagtttgagcaggaagaggatgatggtgaggtaactgaggactctgatgaagactttatacagccccgcagaaaacgcctaaagtcagatgagagaccagtacatataaag

SEQ ID NO: 4276 - DNA, 666 bp, Homo sapiens
  source 1..666: mol_type = genomic DNA
atgagctcctacgtagccaattcattctataagcagagccccaatatccctgcctataacatgcaaacttgtgggaactatggatcggcctcagaggtgcaggcatccaggtactgctacggcggattggacttaagcatcactttcccaccgcctgcgccttccaactctctccacggggtagacatggctgccaacccccgggctcaccccgaccgccccgcctgcagcgccgcggccgctccgggacacgctccgggcagagacgaagcggctcctctgaaccccgggatgtacagtcagaaggcggctcgcccggcgctggaggagcgagctaagagcagtggggagatcaaagaggagcaggcgcagacagggcagcccgccggactgagccagccaccggccccgccacagatttacccgtggatgaccaaactgcacatgagccacgagacggacggcaagcggtcccgaaccagttacacgcgctaccagactctggaactcgagaaagaattccactttaaccgctacctcactcgccgcaggcgcatagagatcgccaacaacttgtgtctcaatgagagacagatcaagatctggttccagaaccgcaggatgaagtggaagaaagattccaaaatgaaaagcaaagaggctctt

SEQ ID NO: 4277 - DNA, 792 bp, Homo sapiens
  source 1..792: mol_type = genomic DNA
atgatcatgagctcgtatttgatggactctaactacatcgatccgaaatttcctccatgcgaagaatattcgcaaaatagctacatccctgaacacagtccggaatattacggccggaccagggaatcgggattccagcatcaccaccaggagctgtacccaccaccgcctccgcgccctagctaccctgagcgccagtatagctgcaccagtctccaggggcccggcaattcgcgaggccacgggccggcccaggcgggccaccaccaccccgagaaatcacagtcgctctgcgagccggcgcctctctcaggcgcctccgcctccccgtccccagccccgccagcctgcagccagccagcccccgaccatccctccagcgccgccagcaagcaacccatagtctacccatggatgaaaaaaattcacgttagcacggtgaaccccaattataacggaggggaacccaagcgctcgaggacagcctatacccggcagcaagtcctggaattagagaaagagtttcattacaaccgctacctgacccgaaggagaaggatcgagatcgcccactcgctgtgcctctctgagaggcagatcaaaatctggttccaaaaccgtcgcatgaaatggaagaaggaccaccgactccccaacaccaaagtcaggtcagcacccccggccggcgctgcgcccagcaccctttcggcagctaccccgggtacttctgaagaccactcccagagcgccacgccgccggagcagcaacgggcagaggacattaccaggtta

SEQ ID NO: 4278 - DNA, 459 bp, Homo sapiens
  source 1..459: mol_type = genomic DNA
atgctctcaaactgcagacaaaacaccttaggacataacacacagacctcaatcgctcaggattttagttctgagcagggcaggactgcgccccaggaccagaaagccagtatccagatttacccctggatgcagcgaatgaattcgcacagtggggtcggctacggagcggaccggaggcgcggccgccagatctactcgcggtaccagaccctggaactggagaaggaatttcacttcaatcgctacctaacgcggcgccggcgcatcgagatcgccaacgcgctttgcctgaccgagcgacagatcaaaatctggttccagaaccgccggatgaagtggaaaaaagaatctaatctcacatccactctctcggggggcggcggaggggccaccgccgacagcctgggcggaaaagaggaaaagcgggaagagacagaagaggagaagcagaaagag

SEQ ID NO: 4279 - DNA, 705 bp, Homo sapiens
  source 1..705: mol_type = genomic DNA
atgaattcctacttcactaacccttccttatcctgccacctcgccgggggccaggacgtcctccccaacgtcgccctcaattccaccgcctatgatccagtgaggcatttctcgacctatggagcggccgttgcccagaaccggatctactcgactcccttttattcgccacaggagaatgtcgtgttcagttccagccgggggccgtatgactatggatctaattccttttaccaggagaaagacatgctctcaaactgcagacaaaacaccttaggacataacacacagacctcaatcgctcaggattttagttctgagcagggcaggactgcgccccaggaccagaaagccagtatccagatttacccctggatgcagcgaatgaattcgcacagtggggtcggctacggagcggaccggaggcgcggccgccagatctactcgcggtaccagaccctggaactggagaaggaatttcacttcaatcgctacctaacgcggcgccggcgcatcgagatcgccaacgcgctttgcctgaccgagcgacagatcaaaatctggttccagaaccgccggatgaagtggaaaaaagaatctaatctcacatccactctctcggggggcggcggaggggccaccgccgacagcctgggcggaaaagaggaaaagcgggaagagacagaagaggagaagcagaaagag

SEQ ID NO: 4280 - DNA, 270 bp, Homo sapiens
  source 1..270: mol_type = genomic DNA
atgaccaaaataaaggcagatcccgacgggcccgaggctcaggcggaggcgtgttccggggagcgcacctaccaggagctgctggtcaaccagaaccccatcgcgcagcccctggcttctcgccgcctcacgcggaagctctacaaatgcatcaagaaagcggtgaagcagaagcagattcggcgcggggtgaaagaggttcagaaatttgtcaacaaaggagaaaaagggacctgggtgcagccgcaggctccaagcgccccacctgtg

SEQ ID NO: 4281 - DNA, 942 bp, Homo sapiens
  source 1..942: mol_type = genomic DNA
atgcctggctttacgtgctgcgtgccaggctgctacaacaactcgcaccgggacaaggcgctgcacttctacacgtttccaaaggacgctgagttgcggcgcctctggctcaagaacgtgtcgcgtgccggcgtcagtgggtgcttctccaccttccagcccaccacaggccaccgtctctgcagcgttcacttccagggcggccgcaagacctacacggtacgcgtccccaccatcttcccgctgcgcggcgtcaatgagcgcaaagtagcgcgcagacccgctggggccgcggccgcccgccgcaggcagcagcagcaacagcagcagcagcagcaacagcagcaacagcagcagcagcagcaacagcagcagcagcagcagcagcagcagcagtcctcaccctctgcctccactgcccagactgcccagctgcagccgaacctggtatctgcttccgcggccgtgcttctcacccttcaggccactgtagacagcagtcaggctccgggatccgtacagccggcgcccatcactcccactggagaagacgtgaagcccatcgatctcacagtgcaagtggagtttgcagccgcagagggcgcagccgctgcggccgccgcgtcggagttacaggctgctaccgcagggctggaggctgccgagtgccctatgggcccccagttggtggtggtaggggaagagggcttccctgatactggctccgaccattcgtactccttgtcgtcaggcaccacggaggaggagctcctgcgcaagctgaatgagcagcgggacatcctggctctgatggaagtgaagatgaaagagatgaaaggcagcattcgccacctgcgtctcactgaggccaagctgcgcgaagaactgcgtgagaaggatcggctgcttgccatggctgtcatccgcaagaagcacggaatg

SEQ ID NO: 4282 - DNA, 1044 bp, Homo sapiens
  source 1..1044: mol_type = genomic DNA
atggccagtagggaagatgagctgaggaactgtgtggtatgtggggaccaagccacaggctaccactttaatgcgctgacttgtgagggctgcaagggtttcttcaggagaacagtcagcaaaagcattggtcccacctgcccctttgctggaagctgtgaagtcagcaagactcagaggcgccactgcccagcctgcaggttgcagaagtgcttagatgctggcatgaggaaagacatgatactgtcggcagaagccctggcattgcggcgagcaaagcaggcccagcggcgggcacagcaaacacctgtgcaactgagtaaggagcaagaagagctgatccggacactcctgggggcccacacccgccacatgggcaccatgtttgaacagtttgtgcagtttaggcctccagctcatctgttcatccatcaccagcccttgcccaccctggcccctgtgctgcctctggtcacacacttcgcagacatcaacactttcatggtactgcaagtcatcaagtttactaaggacctgcccgtcttccgttccctgcccattgaagaccagatctcccttctcaagggagcagctgtggaaatctgtcacatcgtactcaataccactttctgtctccaaacacaaaacttcctctgcgggcctcttcgctacacaattgaagatggagcccgtgtggggttccaggtagagtttttggagttgctctttcacttccatggaacactacgaaaactgcagctccaagagcctgagtatgtgctcttggctgccatggccctcttctctcctgaccgacctggagttacccagagagatgagattgatcagctgcaagaggagatggcactgactctgcaaagctacatcaagggccagcagcgaaggccccgggatcggtttctgtatgcgaagttgctaggcctgctggctgagctccggagcattaatgaggcctacgggtaccaaatccagcacatccagggcctgtctgccatgatgccgctgctccaggagatctgcagc

SEQ ID NO: 4283 - DNA, 1020 bp, Homo sapiens
  source 1..1020: mol_type = genomic DNA
atggccagtagggaagatgagctgaggaactgtgtggtatgtggggaccaagccacaggctaccactttaatgcgctgacttgtgagggctgcaagggtttcttcaggagaacagtcagcaaaagcattggtcccacctgcccctttgctggaagctgtgaagtcagcaagactcagaggcgccactgcccagcctgcaggttgcagaagtgcttagatgctggcatgaggaaagacatgatactgtcggcagaagccctggcattgcggcgagcaaagcaggcccagcggcgggcacagcaaacacctgtgcaactgagtaaggagcaagaagagctgatccggacactcctgggggcccacacccgccacatgggcaccatgtttgaacagtttgtgcagtttaggcctccagctcatctgttcatccatcaccagcccttgcccaccctggcccctgtgctgcctctggtcacacacttcgcagacatcaacactttcatggtactgcaagtcatcaagtttactaaggacctgcccgtcttccgttccctgcccattgaagaccagatctcccttctcaagggagcagctgtggaaatctgtcacatcgtactcaataccactttctgtctccaaacacaaaacttcctctgcgggcctcttcgctacacaattgaagatggagcccgtgtggggttccaggtagagtttttggagttgctctttcacttccatggaacactacgaaaactgcagctccaagagcctgagtatgtgctcttggctgccatggccctcttctctcctgctccctatcttacagaccgacctggagttacccagagagatgagattgatcagctgcaagaggagatggcactgactctgcaaagctacatcaagggccagcagcgaaggccccgggatcgctcacctggaacaccctggatacactggagtgggaaaatgctgggaccaaagattgggccgggttcaaagggagcccagtggttgcaa

SEQ ID NO: 4284 - DNA, 927 bp, Homo sapiens
  source 1..927: mol_type = genomic DNA
atggccagtagggaagatgagctgaggaactgtgtggtatgtggggaccaagccacaggctaccactttaatgcgctgacttgtgagggctgcaagggtttcttcaggagaacagtcagcaaaagcattggtcccacctgcccctttgctggaagctgtgaagtcagcaagactcagaggcgccactgcccagcctgcaggttgcagaagtgcttagatgctggcatgaggaaagacatgatactgtcggcagaagccctggcattgcggcgagcaaagcaggcccagcggcgggcacagcaaacacctgtgcaactgagtaaggagcaagaagagctgatccggacactcctgggggcccacacccgccacatgggcaccatgtttgaacagtttgtgcagtttaggcctccagctcatctgttcatccatcaccagcccttgcccaccctggcccctgtgctgcctctggtcacacacttcgcagacatcaacactttcatggtactgcaagtcatcaagtttactaaggacctgcccgtcttccgttccctgcccattgaagaccagatctcccttctcaagggagcagctgtggaaatctgtcacatcgtactcaataccactttctgtctccaaacacaaaacttcctctgcgggcctcttcgctacacaattgaagatggagcccgtgaccgacctggagttacccagagagatgagattgatcagctgcaagaggagatggcactgactctgcaaagctacatcaagggccagcagcgaaggccccgggatcggtttctgtatgcgaagttgctaggcctgctggctgagctccggagcattaatgaggcctacgggtaccaaatccagcacatccagggcctgtctgccatgatgccgctgctccaggagatctgcagc

SEQ ID NO: 4285 - DNA, 942 bp, Homo sapiens
  source 1..942: mol_type = genomic DNA
atggccagtagggaagatgagctgaggaactgtgtggtatgtggggaccaagccacaggctaccactttaatgcgctgacttgtgagggctgcaagggtttcttcaggagaacagtcagcaaaagcattggtcccacctgcccctttgctggaagctgtgaagtcagcaagactcagaggcgccactgcccagcctgcaggttgcagaagtgcttagatgctggcatgaggaaagacatgatactgtcggcagaagccctggcattgcggcgagcaaagcaggcccagcggcgggcacagcaaacacctgtgcaactgagtaaggagcaagaagagctgatccggacactcctgggggcccacacccgccacatgggcaccatgtttgaacagtttgtgcagtttaggcctccagctcatctgttcatccatcaccagcccttgcccaccctggcccctgtgctgcctctggtcacacacttcgcagacatcaacactttcatggtactgcaagtcatcaagtttactaaggacctgcccgtcttccgttccctgcccattgaagaccagatctcccttctcaagggagcagctgtggaaatctgtcacatcgtactcaataccactttctgtctccaaacacaaaacttcctctgcgggcctcttcgctacacaattgaagatggagcccgtgctccctatcttacagaccgacctggagttacccagagagatgagattgatcagctgcaagaggagatggcactgactctgcaaagctacatcaagggccagcagcgaaggccccgggatcggtttctgtatgcgaagttgctaggcctgctggctgagctccggagcattaatgaggcctacgggtaccaaatccagcacatccagggcctgtctgccatgatgccgctgctccaggagatctgcagc

SEQ ID NO: 4286 - DNA, 918 bp, Homo sapiens
  source 1..918: mol_type = genomic DNA
atgctgcctaagagaagcaggagaacagtcagcaaaagcattggtcccacctgcccctttgctggaagctgtgaagtcagcaagactcagaggcgccactgcccagcctgcaggttgcagaagtgcttagatgctggcatgaggaaagacatgatactgtcggcagaagccctggcattgcggcgagcaaagcaggcccagcggcgggcacagcaaacacctgtgcaactgagtaaggagcaagaagagctgatccggacactcctgggggcccacacccgccacatgggcaccatgtttgaacagtttgtgcagtttaggcctccagctcatctgttcatccatcaccagcccttgcccaccctggcccctgtgctgcctctggtcacacacttcgcagacatcaacactttcatggtactgcaagtcatcaagtttactaaggacctgcccgtcttccgttccctgcccattgaagaccagatctcccttctcaagggagcagctgtggaaatctgtcacatcgtactcaataccactttctgtctccaaacacaaaacttcctctgcgggcctcttcgctacacaattgaagatggagcccgtgtggggttccaggtagagtttttggagttgctctttcacttccatggaacactacgaaaactgcagctccaagagcctgagtatgtgctcttggctgccatggccctcttctctcctgaccgacctggagttacccagagagatgagattgatcagctgcaagaggagatggcactgactctgcaaagctacatcaagggccagcagcgaaggccccgggatcgctcacctggaacaccctggatacactggagtgggaaaatgctgggaccaaagattgggccgggttcaaagggagcccagtggttgcaa

SEQ ID NO: 4287 - DNA, 1017 bp, Homo sapiens
  source 1..1017: mol_type = genomic DNA
atggccagtagggaagatgagctgaggaactgtgtggtatgtggggaccaagccacaggctaccactttaatgcgctgacttgtgagggctgcaagggtttcttcaggagaacagtcagcaaaagcattggtcccacctgcccctttgctggaagctgtgaagtcagcaagactcagaggcgccactgcccagcctgcaggttgcagaagtgcttagatgctggcatgaggaaagacatgatactgtcggcagaagccctggcattgcggcgagcaaagcaggcccagcggcgggcacagcaaacacctgtgcaactgagtaaggagcaagaagagctgatccggacactcctgggggcccacacccgccacatgggcaccatgtttgaacagtttgtgcagtttaggcctccagctcatctgttcatccatcaccagcccttgcccaccctggcccctgtgctgcctctggtcacacacttcgcagacatcaacactttcatggtactgcaagtcatcaagtttactaaggacctgcccgtcttccgttccctgcccattgaagaccagatctcccttctcaagggagcagctgtggaaatctgtcacatcgtactcaataccactttctgtctccaaacacaaaacttcctctgcgggcctcttcgctacacaattgaagatggagcccgtgtatctcccacagtggggttccaggtagagtttttggagttgctctttcacttccatggaacactacgaaaactgcagctccaagagcctgagtatgtgctcttggctgccatggccctcttctctcctgaccgacctggagttacccagagagatgagattgatcagctgcaagaggagatggcactgactctgcaaagctacatcaagggccagcagcgaaggccccgggatcgctcacctggaacaccctggatacactggagtgggaaaatgctgggaccaaagattgggccgggttcaaagggagcccagtggttgcaa

SEQ ID NO: 4288 - DNA, 801 bp, Homo sapiens
  source 1..801: mol_type = genomic DNA
atgctgcctaagagaagcaggagaacagtcagcaaaagcattggtcccacctgcccctttgctggaagctgtgaagtcagcaagactcagaggcgccactgcccagcctgcaggttgcagaagtgcttagatgctggcatgaggaaagacatgatactgtcggcagaagccctggcattgcggcgagcaaagcaggcccagcggcgggcacagcaaacacctgtgcaactgagtaaggagcaagaagagctgatccggacactcctgggggcccacacccgccacatgggcaccatgtttgaacagtttgtgcagtttaggcctccagctcatctgttcatccatcaccagcccttgcccaccctggcccctgtgctgcctctggtcacacacttcgcagacatcaacactttcatggtactgcaagtcatcaagtttactaaggacctgcccgtcttccgttccctgcccattgaagaccagatctcccttctcaagggagcagctgtggaaatctgtcacatcgtactcaataccactttctgtctccaaacacaaaacttcctctgcgggcctcttcgctacacaattgaagatggagcccgtgaccgacctggagttacccagagagatgagattgatcagctgcaagaggagatggcactgactctgcaaagctacatcaagggccagcagcgaaggccccgggatcgctcacctggaacaccctggatacactggagtgggaaaatgctgggaccaaagattgggccgggttcaaagggagcccagtggttgcaa

SEQ ID NO: 4289 - DNA, 933 bp, Homo sapiens
  source 1..933: mol_type = genomic DNA
atgctgcctaagagaagcaggagaacagtcagcaaaagcattggtcccacctgcccctttgctggaagctgtgaagtcagcaagactcagaggcgccactgcccagcctgcaggttgcagaagtgcttagatgctggcatgaggaaagacatgatactgtcggcagaagccctggcattgcggcgagcaaagcaggcccagcggcgggcacagcaaacacctgtgcaactgagtaaggagcaagaagagctgatccggacactcctgggggcccacacccgccacatgggcaccatgtttgaacagtttgtgcagtttaggcctccagctcatctgttcatccatcaccagcccttgcccaccctggcccctgtgctgcctctggtcacacacttcgcagacatcaacactttcatggtactgcaagtcatcaagtttactaaggacctgcccgtcttccgttccctgcccattgaagaccagatctcccttctcaagggagcagctgtggaaatctgtcacatcgtactcaataccactttctgtctccaaacacaaaacttcctctgcgggcctcttcgctacacaattgaagatggagcccgtgtggggttccaggtagagtttttggagttgctctttcacttccatggaacactacgaaaactgcagctccaagagcctgagtatgtgctcttggctgccatggccctcttctctcctgctccctatcttacagaccgacctggagttacccagagagatgagattgatcagctgcaagaggagatggcactgactctgcaaagctacatcaagggccagcagcgaaggccccgggatcgctcacctggaacaccctggatacactggagtgggaaaatgctgggaccaaagattgggccgggttcaaagggagcccagtggttgcaa

SEQ ID NO: 4290 - DNA, 945 bp, Homo sapiens
  source 1..945: mol_type = genomic DNA
atgctgcctaagagaagcaggagaacagtcagcaaaagcattggtcccacctgcccctttgctggaagctgtgaagtcagcaagactcagaggcgccactgcccagcctgcaggttgcagaagtgcttagatgctggcatgaggaaagacatgatactgtcggcagaagccctggcattgcggcgagcaaagcaggcccagcggcgggcacagcaaacacctgtgcaactgagtaaggagcaagaagagctgatccggacactcctgggggcccacacccgccacatgggcaccatgtttgaacagtttgtgcagtttaggcctccagctcatctgttcatccatcaccagcccttgcccaccctggcccctgtgctgcctctggtcacacacttcgcagacatcaacactttcatggtactgcaagtcatcaagtttactaaggacctgcccgtcttccgttccctgcccattgaagaccagatctcccttctcaagggagcagctgtggaaatctgtcacatcgtactcaataccactttctgtctccaaacacaaaacttcctctgcgggcctcttcgctacacaattgaagatggagcccgtgtatctcccacagtggggttccaggtagagtttttggagttgctctttcacttccatggaacactacgaaaactgcagctccaagagcctgagtatgtgctcttggctgccatggccctcttctctcctgctccctatcttacagaccgacctggagttacccagagagatgagattgatcagctgcaagaggagatggcactgactctgcaaagctacatcaagggccagcagcgaaggccccgggatcgctcacctggaacaccctggatacactggagtgggaaaatgctgggaccaaagattgggccgggttcaaagggagcccagtggttgcaa

SEQ ID NO: 4291 - DNA, 1071 bp, Homo sapiens
  source 1..1071: mol_type = genomic DNA
atggccagtagggaagatgagctgaggaactgtgtggtatgtggggaccaagccacaggctaccactttaatgcgctgacttgtgagggctgcaagggtttcttcaggagaacagtcagcaaaagcattggtcccacctgcccctttgctggaagctgtgaagtcagcaagactcagaggcgccactgcccagcctgcaggttgcagaagtgcttagatgctggcatgaggaaagacatgatactgtcggcagaagccctggcattgcggcgagcaaagcaggcccagcggcgggcacagcaaacacctgtgcaactgagtaaggagcaagaagagctgatccggacactcctgggggcccacacccgccacatgggcaccatgtttgaacagtttgtgcagtttaggcctccagctcatctgttcatccatcaccagcccttgcccaccctggcccctgtgctgcctctggtcacacacttcgcagacatcaacactttcatggtactgcaagtcatcaagtttactaaggacctgcccgtcttccgttccctgcccattgaagaccagatctcccttctcaagggagcagctgtggaaatctgtcacatcgtactcaataccactttctgtctccaaacacaaaacttcctctgcgggcctcttcgctacacaattgaagatggagcccgtgtatctcccacagtggggttccaggtagagtttttggagttgctctttcacttccatggaacactacgaaaactgcagctccaagagcctgagtatgtgctcttggctgccatggccctcttctctcctgctccctatcttacagaccgacctggagttacccagagagatgagattgatcagctgcaagaggagatggcactgactctgcaaagctacatcaagggccagcagcgaaggccccgggatcggtttctgtatgcgaagttgctaggcctgctggctgagctccggagcattaatgaggcctacgggtaccaaatccagcacatccagggcctgtctgccatgatgccgctgctccaggagatctgcagc

SEQ ID NO: 4292 - DNA, 840 bp, Homo sapiens
  source 1..840: mol_type = genomic DNA
atgctgcctaagagaagcaggagaacagtcagcaaaagcattggtcccacctgcccctttgctggaagctgtgaagtcagcaagactcagaggcgccactgcccagcctgcaggttgcagaagtgcttagatgctggcatgaggaaagacatgatactgtcggcagaagccctggcattgcggcgagcaaagcaggcccagcggcgggcacagcaaacacctgtgcaactgagtaaggagcaagaagagctgatccggacactcctgggggcccacacccgccacatgggcaccatgtttgaacagtttgtgcagtttaggcctccagctcatctgttcatccatcaccagcccttgcccaccctggcccctgtgctgcctctggtcacacacttcgcagacatcaacactttcatggtactgcaagtcatcaagtttactaaggacctgcccgtcttccgttccctgcccattgaagaccagatctcccttctcaagggagcagctgtggaaatctgtcacatcgtactcaataccactttctgtctccaaacacaaaacttcctctgcgggcctcttcgctacacaattgaagatggagcccgtgaccgacctggagttacccagagagatgagattgatcagctgcaagaggagatggcactgactctgcaaagctacatcaagggccagcagcgaaggccccgggatcggtttctgtatgcgaagttgctaggcctgctggctgagctccggagcattaatgaggcctacgggtaccaaatccagcacatccagggcctgtctgccatgatgccgctgctccaggagatctgcagc

SEQ ID NO: 4293 - DNA, 957 bp, Homo sapiens
  source 1..957: mol_type = genomic DNA
atgctgcctaagagaagcaggagaacagtcagcaaaagcattggtcccacctgcccctttgctggaagctgtgaagtcagcaagactcagaggcgccactgcccagcctgcaggttgcagaagtgcttagatgctggcatgaggaaagacatgatactgtcggcagaagccctggcattgcggcgagcaaagcaggcccagcggcgggcacagcaaacacctgtgcaactgagtaaggagcaagaagagctgatccggacactcctgggggcccacacccgccacatgggcaccatgtttgaacagtttgtgcagtttaggcctccagctcatctgttcatccatcaccagcccttgcccaccctggcccctgtgctgcctctggtcacacacttcgcagacatcaacactttcatggtactgcaagtcatcaagtttactaaggacctgcccgtcttccgttccctgcccattgaagaccagatctcccttctcaagggagcagctgtggaaatctgtcacatcgtactcaataccactttctgtctccaaacacaaaacttcctctgcgggcctcttcgctacacaattgaagatggagcccgtgtggggttccaggtagagtttttggagttgctctttcacttccatggaacactacgaaaactgcagctccaagagcctgagtatgtgctcttggctgccatggccctcttctctcctgaccgacctggagttacccagagagatgagattgatcagctgcaagaggagatggcactgactctgcaaagctacatcaagggccagcagcgaaggccccgggatcggtttctgtatgcgaagttgctaggcctgctggctgagctccggagcattaatgaggcctacgggtaccaaatccagcacatccagggcctgtctgccatgatgccgctgctccaggagatctgcagc

SEQ ID NO: 4294 - DNA, 972 bp, Homo sapiens
  source 1..972: mol_type = genomic DNA
atgctgcctaagagaagcaggagaacagtcagcaaaagcattggtcccacctgcccctttgctggaagctgtgaagtcagcaagactcagaggcgccactgcccagcctgcaggttgcagaagtgcttagatgctggcatgaggaaagacatgatactgtcggcagaagccctggcattgcggcgagcaaagcaggcccagcggcgggcacagcaaacacctgtgcaactgagtaaggagcaagaagagctgatccggacactcctgggggcccacacccgccacatgggcaccatgtttgaacagtttgtgcagtttaggcctccagctcatctgttcatccatcaccagcccttgcccaccctggcccctgtgctgcctctggtcacacacttcgcagacatcaacactttcatggtactgcaagtcatcaagtttactaaggacctgcccgtcttccgttccctgcccattgaagaccagatctcccttctcaagggagcagctgtggaaatctgtcacatcgtactcaataccactttctgtctccaaacacaaaacttcctctgcgggcctcttcgctacacaattgaagatggagcccgtgtggggttccaggtagagtttttggagttgctctttcacttccatggaacactacgaaaactgcagctccaagagcctgagtatgtgctcttggctgccatggccctcttctctcctgctccctatcttacagaccgacctggagttacccagagagatgagattgatcagctgcaagaggagatggcactgactctgcaaagctacatcaagggccagcagcgaaggccccgggatcggtttctgtatgcgaagttgctaggcctgctggctgagctccggagcattaatgaggcctacgggtaccaaatccagcacatccagggcctgtctgccatgatgccgctgctccaggagatctgcagc

SEQ ID NO: 4295 - DNA, 888 bp, Homo sapiens
  source 1..888: mol_type = genomic DNA
atggccagtagggaagatgagctgaggaactgtgtggtatgtggggaccaagccacaggctaccactttaatgcgctgacttgtgagggctgcaagggtttcttcaggagaacagtcagcaaaagcattggtcccacctgcccctttgctggaagctgtgaagtcagcaagactcagaggcgccactgcccagcctgcaggttgcagaagtgcttagatgctggcatgaggaaagacatgatactgtcggcagaagccctggcattgcggcgagcaaagcaggcccagcggcgggcacagcaaacacctgtgcaactgagtaaggagcaagaagagctgatccggacactcctgggggcccacacccgccacatgggcaccatgtttgaacagtttgtgcagtttaggcctccagctcatctgttcatccatcaccagcccttgcccaccctggcccctgtgctgcctctggtcacacacttcgcagacatcaacactttcatggtactgcaagtcatcaagtttactaaggacctgcccgtcttccgttccctgcccattgaagaccagatctcccttctcaagggagcagctgtggaaatctgtcacatcgtactcaataccactttctgtctccaaacacaaaacttcctctgcgggcctcttcgctacacaattgaagatggagcccgtgaccgacctggagttacccagagagatgagattgatcagctgcaagaggagatggcactgactctgcaaagctacatcaagggccagcagcgaaggccccgggatcgctcacctggaacaccctggatacactggagtgggaaaatgctgggaccaaagattgggccgggttcaaagggagcccagtggttgcaa

SEQ ID NO: 4296 - DNA, 6000 bp, Homo sapiens
  source 1..6000: mol_type = genomic DNA
atgaaggcggcagacactgtgatcctgtgggcaagaagtaaaaatgaccagctgaggatttcttttcctccaggactgtgttggggtgacaggatgcctgataaggatgacattcggctgctgccgtcagcattgggtgtgaagaagagaaaacgaggacccaagaagcagaaggagaacaagccaggaaaaccccgaaaacgcaagaagcgtgacagtgaggaggaatttggttctgagcgagatgagtaccgggagaagtcagagagtgggggcagtgaatatggaaccggaccgggtcggaaacgaagaaggaagcaccgagaaaaaaaggagaagaagacaaagcggcggaaaaagggggagggagatggggggcaaaagcaagtggaacagaagtcatcagcaactctgcttctgacctggggcctggaggatgtggagcatgtgttctctgaggaggattaccacacgctcaccaactacaaagccttcagccagttcatgaggcccctaattgctaagaagaatcctaagatcccaatgtctaagatgatgaccatccttggggccaaatggagagagttcagtgccaacaaccccttcaaggggtcagcagctgctgtggcggcggcagcggcagcagcagcagcagctgtagctgagcaggtgtcagctgctgtctcgtcggccacccccatagcaccctccggaccccccgcccttccaccaccccctgctgctgatatccagcccccacccatccgaagagccaaaaccaaagagggcaaaggtccaggccataagaggcggagtaagagcccccgagtgcctgatggacgcaagaagcttcggggaaagaaaatggcaccactcaaaataaaactagggcttctgggtggcaagaggaagaaaggaggctcgtatgtttttcagagcgacgaaggtcctgaaccagaggctgaggaatcagacctggacagtggcagtgtccacagtgcctcaggccggcctgatggccctgtccgcaccaagaaactaaagagaggccggccaggaaggaagaagaagaaggtcctgggctgtcctgcagtggccggggaggaggaggttgatggctacgagacggatcaccaggattactgtgaggtgtgccagcagggtggggaaattattctgtgtgacacctgccctcgtgcctaccacctcgtctgccttgatcctgagcttgaccgggctccagagggcaaatggagctgccctcactgtgagaaggagggggtccagtgggaggccaaggaggaagaagaagaatacgaagaggagggagaggaagaaggggagaaggaggaggaggatgatcacatggagtactgccgcgtatgcaaggacggcggggagctcctgtgctgtgacgcgtgcatctcctcctaccacattcattgtctaaaccctcccctgcctgacattcccaatggtgaatggctgtgtccccgatgcacatgccccgtgctgaagggtcgagtgcagaagatcctacattggcggtggggggagccacctgtagcagtgccagcccctcaacaggcagatggaaatccagatgtcccacccccccgtcctcttcaaggcagatcagagcgagagttctttgtcaagtgggtaggactatcctactggcactgctcctgggccaaggagcttcagctggaaatcttccatttggttatgtatcgaaactaccagcggaagaatgacatggatgagcccccacccctggactatggctccggcgaggatgatgggaagagcgacaagcgtaaagtgaaagacccgcactatgctgagatggaggagaagtactatcgttttggcatcaagccagagtggatgaccgtccaccgcatcatcaaccacagtgtggataaaaaggggaattaccactatctagtaaaatggagggacttaccatatgaccagtccacgtgggaggaagatgaaatgaatatccctgaatacgaagaacataagcaaagctactggagacaccgagaactaattatgggggaagaccctgcccagccccgcaagtataagaagaagaagaaggagctacagggtgatgggcctcccagttctcccactaatgatcctaccgtgaaatatgagactcagccacggtttatcacagccactggaggcaccctgcacatgtatcagttggaagggctgaactggctacgcttctcctgggcccagggcactgacaccattctagctgatgagatggggctaggcaagaccatacaaaccatcgtcttcctctactcactctacaaggagggccacacaaaaggtcccttcctggtgagtgccccactctctaccatcattaactgggagcgggagttccagatgtgggcacccaaattctatgtggtgacatacacgggtgacaaggacagccgggccatcattcgtgagaatgaattctcctttgaggacaatgccatcaaagggggcaagaaagcttttaagatgaagagggaggcacaggtgaagttccatgttctcctgacatcgtatgagctgatcaccattgatcaggcagcacttggttccatccgctgggcctgtcttgtggtagatgaggcccatcgactcaagaacaaccagtccaagtttttcagggttctcaatggttacaagatagatcataagttgctgctgacaggaaccccattgcagaataatctggaggagctcttccatctcctgaacttcctcaccccagagagatttaacaacttggagggcttcctggaggagtttgctgacatatccaaagaggaccagatcaagaaactgcatgatttgctggggccacacatgctgcggagactcaaggcagatgtctttaagaacatgccagccaagacagagctcatcgttcgggtggagctaagccccatgcagaagaaatactacaaatacatcctgactcgaaattttgaggccttgaattcacgaggtggtgggaaccaggtgtcgctgcttaatatcatgatggatcttaagaagtgctgcaaccatccatacctttttcccgtggctgctatggagtcccccaaactccccagtggggcttatgagggtggggcacttattaagtcgtctgggaagctcatgctgctccagaagatgctgcgaaagctgaaggagcaaggacaccgagtgctcatcttctcgcagatgaccaaaatgttagacttgcttgaggacttcttagactatgaaggctacaagtatgagcgcatcgatggtggtatcacgggtgccctgaggcaggaggccatcgatcggtttaatgctcctggggcccaacaattctgcttcctcctgtccacccgagctgggggcctgggcatcaatctggccactgctgacactgtcatcatctttgattctgactggaacccccataatgacatccaggcctttagccgggctcatcggattggccaggccaacaaagtgatgatttaccggtttgtgactcgcgcgtcagtggaagagcgaatcacacaagtggccaagagaaagatgatgctgacacacctggttgtgcggcctgggctgggctccaaggcaggctccatgtccaagcaggagcttgacgacattctcaaatttggcactgaagagctattcaaggatgaaaacgagggggagaacaaggaggaggacagcagtgtgattcattatgacaatgaggccatcgctcggctgttggaccggaaccaggatgcaactgaggacactgacgtgcagaacatgaatgagtatctcagctccttcaaggtggcacagtacgtcgtgcgggaagaagacaagattgaggaaattgagcgagagatcatcaagcaggaggagaatgtggaccctgactactgggagaagctgctgaggcatcactatgagcaacagcaggaagacctagcccggaatctaggcaagggcaagcgggttcgcaagcaagttaactacaatgatgctgctcaggaagaccaagacaaccagtcagagtactcggtgggttcagaggaggaggatgaagacttcgatgaacgtcctgaagggcgtagacagtcaaagaggcagctccggaatgagaaagataagccactgcctccactgctggcccgagtcgggggcaacattgaggtgctgggcttcaacacccgtcagcggaaggctttcctcaatgctgtgatgcgctgggggatgccaccacaggatgccttcaccacacagtggctggtgcgggacctgaggggcaagactgagaaggagtttaaggcctatgtgtctttgttcatgcgccatctgtgtgagcctggggcagacggctctgaaacctttgccgatggggtccctcgggagggactgagtcgccagcaggtgttgacccgcattggagtcatgtctctcgtcaaaaagaaggtgcaggagtttgagcacatcaatgggcgttggtcaatgccggaactgatgcctgaccccagcgccgattctaagcgctcctccagagcctcctctcctaccaaaacgtctcccaccactcctgaggcttctgctaccaacagtccctgcacctctaaacctgctactccagctccaagtgagaaaggagaaggcataaggacacctcttgagaaggaggaagctgaaaaccaggaggaaaagccagagaagaacagcagaattggggagaagatggagacagaggctgatgcccccagcccagccccatcacttggggagcggctggagccaaggaagattcctctagaggatgaggtgccaggggtgcctggagagatggagcctgaacctgggtaccgtggggacagagagaagtcagccacagagtcgacgccaggagaaaggggggaggagaagccgttggatggacaggaacacagggagaggccggagggggaaacaggggatttgggcaagagagaagatgtaaaaggtgaccgggagcttcgaccagggcctcgagatgagccacggtccaatgggcgacgagaggaaaagacagagaagccccggttcatgttcaatatcgccgatggtggcttcacagagcttcacacactgtggcagaatgaggaacgggcagctatttcctcggggaaactcaatgagatctggcacagaagacatgactattggcttctggctgggattgtcctccatggctatgcacggtggcaggacatccagaatgatgctcaatttgccattatcaacgagccatttaaaactgaagccaataaggggaactttctggagatgaaaaataagttcctggcccggaggttcaagctcctggagcaggcgctggtgattgaggagcagctgcggcgggcggcctacctgaacctgtcgcaggagccggcgcaccccgccatggccctccacgcccgcttcgccgaggccgagtgcctggccgagagccaccagcacctctccaaggagtcgctggcggggaacaagccggccaacgccgtcctgcacaaggttctgaaccagctggaggagttgctgagcgacatgaaggcggacgtgacccgcctgccagccacgctgtcccgaataccccccatcgcagcccgccttcagatgtccgagcgcagcatcctcagccggctggccagcaagggcacggagcctcaccccacaccggcctacccgccgggtccctacgctacacctccggggtacggggcggccttcagcgccgcacccgtaggggccctggccgccgcaggcgccaattacagccagatgcctgcagggtccttcatcacagccgccaccaacggccctccagtgcttgtgaagaaggagaaggaaatggtgggggcattggtgtcagacgggctggatcggaaggagccccgagccggggaggtgatctgtatagacgac

SEQ ID NO: 4297 - DNA, 5898 bp, Homo sapiens
  source 1..5898: mol_type = genomic DNA
atgaaggcggcagacactgtgatcctgtgggcaagaagtaaaaatgaccagctgaggatttcttttcctccaggactgtgttggggtgacaggatgcctgataaggatgacattcggctgctgccgtcagcattgggtgtgaagaagagaaaacgaggacccaagaagcagaaggagaacaagccaggaaaaccccgaaaacgcaagaagcgtgacagtgaggaggaatttggttctgagcgagatgagtaccgggagaagtcagagagtgggggcagtgaatatggaaccggaccgggtcggaaacgaagaaggaagcaccgagaaaaaaaggagaagaagacaaagcggcggaaaaagggggagggagatggggggcaaaagcaagtggaacagaagtcatcagcaactctgcttctgacctggggcctggaggatgtggagcatgtgttctctgaggaggattaccacacgctcaccaactacaaagccttcagccagttcatgaggcccctaattgctaagaagaatcctaagatcccaatgtctaagatgatgaccatccttggggccaaatggagagagttcagtgccaacaaccccttcaaggggtcagcagctgctgtggcggcggcagcggcagcagcagcagcagctgtagctgagcaggtgtcagctgctgtctcgtcggccacccccatagcaccctccggaccccccgcccttccaccaccccctgctgctgatatccagcccccacccatccgaagagccaaaaccaaagagggcaaaggtccaggccataagaggcggagtaagagcccccgagtgcctgatggacgcaagaagcttcggggaaagaaaatggcaccactcaaaataaaactagggcttctgggtggcaagaggaagaaaggaggctcgtatgtttttcagagcgacgaaggtcctgaaccagaggctgaggaatcagacctggacagtggcagtgtccacagtgcctcaggccggcctgatggccctgtccgcaccaagaaactaaagagaggccggccaggaaggaagaagaagaaggtcctgggctgtcctgcagtggccggggaggaggaggttgatggctacgagacggatcaccaggattactgtgaggtgtgccagcagggtggggaaattattctgtgtgacacctgccctcgtgcctaccacctcgtctgccttgatcctgagcttgaccgggctccagagggcaaatggagctgccctcactgtgagaaggagggggtccagtgggaggccaaggaggaagaagaagaatacgaagaggagggagaggaagaaggggagaaggaggaggaggatgatcacatggagtactgccgcgtatgcaaggacggcggggagctcctgtgctgtgacgcgtgcatctcctcctaccacattcattgtctaaaccctcccctgcctgacattcccaatggtgaatggctgtgtccccgatgcacatgccccgtgctgaagggtcgagtgcagaagatcctacattggcggtggggggagccacctgtagcagtgccagcccctcaacaggcagatggaaatccagatgtcccacccccccgtcctcttcaaggcagatcagagcgagagttctttgtcaagtgggtaggactatcctactggcactgctcctgggccaaggagcttcagctggaaatcttccatttggttatgtatcgaaactaccagcggaagaatgacatggatgagcccccacccctggactatggctccggcgaggatgatgggaagagcgacaagcgtaaagtgaaagacccgcactatgctgagatggaggagaagtactatcgttttggcatcaagccagagtggatgaccgtccaccgcatcatcaaccacagtgtggataaaaaggggaattaccactatctagtaaaatggagggacttaccatatgaccagtccacgtgggaggaagatgaaatgaatatccctgaatacgaagaacataagcaaagctactggagacaccgagaactaattatgggggaagaccctgcccagccccgcaagtataagaagaagaagaaggagctacagggtgatgggcctcccagttctcccactaatgatcctaccgtgaaatatgagactcagccacggtttatcacagccactggaggcaccctgcacatgtatcagttggaagggctgaactggctacgcttctcctgggcccagggcactgacaccattctagctgatgagatggggctaggcaagaccatacaaaccatcgtcttcctctactcactctacaaggagggccacacaaaaggtcccttcctggtgagtgccccactctctaccatcattaactgggagcgggagttccagatgtgggcacccaaattctatgtggtgacatacacgggtgacaaggacagccgggccatcattcgtgagaatgaattctcctttgaggacaatgccatcaaagggggcaagaaagcttttaagatgaagagggaggcacaggtgaagttccatgttctcctgacatcgtatgagctgatcaccattgatcaggcagcacttggttccatccgctgggcctgtcttgtggtagatgaggcccatcgactcaagaacaaccagtccaagtttttcagggttctcaatggttacaagatagatcataagttgctgctgacaggaaccccattgcagaataatctggaggagctcttccatctcctgaacttcctcaccccagagagatttaacaacttggagggcttcctggaggagtttgctgacatatccaaagaggaccagatcaagaaactgcatgatttgctggggccacacatgctgcggagactcaaggcagatgtctttaagaacatgccagccaagacagagctcatcgttcgggtggagctaagccccatgcagaagaaatactacaaatacatcctgactcgaaattttgaggccttgaattcacgaggtggtgggaaccaggtgtcgctgcttaatatcatgatggatcttaagaagtgctgcaaccatccatacctttttcccgtggctgctatggagtcccccaaactccccagtggggcttatgagggtggggcacttattaagtcgtctgggaagctcatgctgctccagaagatgctgcgaaagctgaaggagcaaggacaccgagtgctcatcttctcgcagatgaccaaaatgttagacttgcttgaggacttcttagactatgaaggctacaagtatgagcgcatcgatggtggtatcacgggtgccctgaggcaggaggccatcgatcggtttaatgctcctggggcccaacaattctgcttcctcctgtccacccgagctgggggcctgggcatcaatctggccactgctgacactgtcatcatctttgattctgactggaacccccataatgacatccaggcctttagccgggctcatcggattggccaggccaacaaagtgatgatttaccggtttgtgactcgcgcgtcagtggaagagcgaatcacacaagtggccaagagaaagatgatgctgacacacctggttgtgcggcctgggctgggctccaaggcaggctccatgtccaagcaggagcttgacgacattctcaaatttggcactgaagagctattcaaggatgaaaacgagggggagaacaaggaggaggacagcagtgtgattcattatgacaatgaggccatcgctcggctgttggaccggaaccaggatgcaactgaggacactgacgtgcagaacatgaatgagtatctcagctccttcaaggtggcacagtacgtcgtgcgggaagaagacaagattgaggaaattgagcgagagatcatcaagcaggaggagaatgtggaccctgactactgggagaagctgctgaggcatcactatgagcaacagcaggaagacctagcccggaatctaggcaagggcaagcgggttcgcaagcaagttaactacaatgatgctgctcaggaagaccaagacaaccagtcagagtactcggtgggttcagaggaggaggatgaagacttcgatgaacgtcctgaagggcgtagacagtcaaagaggcagctccggaatgagaaagataagccactgcctccactgctggcccgagtcgggggcaacattgaggtgctgggcttcaacacccgtcagcggaaggctttcctcaatgctgtgatgcgctgggggatgccaccacaggatgccttcaccacacagtggctggtgcgggacctgaggggcaagactgagaaggagtttaaggcctatgtgtctttgttcatgcgccatctgtgtgagcctggggcagacggctctgaaacctttgccgatggggtccctcgggagggactgagtcgccagcaggtgttgacccgcattggagtcatgtctctcgtcaaaaagaaggtgcaggagtttgagcacatcaatgggcgttggtcaatgccggaactgatgcctgaccccagcgccgattctaagcgctcctccagagcctcctctcctaccaaaacgtctcccaccactcctgaggcttctgctaccaacagtccctgcacctctaaacctgctactccagctccaagtgagaaaggagaaggcataaggacacctcttgagaaggaggaagctgaaaaccaggaggaaaagccagagaagaacagcagaattggggagaagatggagacagaggctgatgcccccagcccagccccatcacttggggagcggctggagccaaggaagattcctctagaggatgaggtgccaggggtgcctggagagatggagcctgaacctgggtaccgtggggacagagagaagtcagaagatgtaaaaggtgaccgggagcttcgaccagggcctcgagatgagccacggtccaatgggcgacgagaggaaaagacagagaagccccggttcatgttcaatatcgccgatggtggcttcacagagcttcacacactgtggcagaatgaggaacgggcagctatttcctcggggaaactcaatgagatctggcacagaagacatgactattggcttctggctgggattgtcctccatggctatgcacggtggcaggacatccagaatgatgctcaatttgccattatcaacgagccatttaaaactgaagccaataaggggaactttctggagatgaaaaataagttcctggcccggaggttcaagctcctggagcaggcgctggtgattgaggagcagctgcggcgggcggcctacctgaacctgtcgcaggagccggcgcaccccgccatggccctccacgcccgcttcgccgaggccgagtgcctggccgagagccaccagcacctctccaaggagtcgctggcggggaacaagccggccaacgccgtcctgcacaaggttctgaaccagctggaggagttgctgagcgacatgaaggcggacgtgacccgcctgccagccacgctgtcccgaataccccccatcgcagcccgccttcagatgtccgagcgcagcatcctcagccggctggccagcaagggcacggagcctcaccccacaccggcctacccgccgggtccctacgctacacctccggggtacggggcggccttcagcgccgcacccgtaggggccctggccgccgcaggcgccaattacagccagatgcctgcagggtccttcatcacagccgccaccaacggccctccagtgcttgtgaagaaggagaaggaaatggtgggggcattggtgtcagacgggctggatcggaaggagccccgagccggggaggtgatctgtatagacgac

SEQ ID NO: 4298 - DNA, 6177 bp, Homo sapiens
  source 1..6177: mol_type = genomic DNA
atggcttcccctctgagggacgaggaggaggaggaggaggagatggtggtgtcggaggaggaagaagaggaggaagaagagggcgacgaggaggaggaggaggaggtggaggcggccgacgaggacgatgaggaggacgacgacgagggagtactcgggcgcgggccgggccacgaccggggccgcgaccgccacagcccccccggctgccacctcttcccgccgccgccgccgccgccgccaccgctgcccccgccgccgccgcccccgccgccagataaggatgacattcggctgctgccgtcagcattgggtgtgaagaagagaaaacgaggacccaagaagcagaaggagaacaagccaggaaaaccccgaaaacgcaagaagcgtgacagtgaggaggaatttggttctgagcgagatgagtaccgggagaagtcagagagtgggggcagtgaatatggaaccggaccgggtcggaaacgaagaaggaagcaccgagaaaaaaaggagaagaagacaaagcggcggaaaaagggggagggagatggggggcaaaagcaagtggaacagaagtcatcagcaactctgcttctgacctggggcctggaggatgtggagcatgtgttctctgaggaggattaccacacgctcaccaactacaaagccttcagccagttcatgaggcccctaattgctaagaagaatcctaagatcccaatgtctaagatgatgaccatccttggggccaaatggagagagttcagtgccaacaaccccttcaaggggtcagcagctgctgtggcggcggcagcggcagcagcagcagcagctgtagctgagcaggtgtcagctgctgtctcgtcggccacccccatagcaccctccggaccccccgcccttccaccaccccctgctgctgatatccagcccccacccatccgaagagccaaaaccaaagagggcaaaggtccaggccataagaggcggagtaagagcccccgagtgcctgatggacgcaagaagcttcggggaaagaaaatggcaccactcaaaataaaactagggcttctgggtggcaagaggaagaaaggaggctcgtatgtttttcagagcgacgaaggtcctgaaccagaggctgaggaatcagacctggacagtggcagtgtccacagtgcctcaggccggcctgatggccctgtccgcaccaagaaactaaagagaggccggccaggaaggaagaagaagaaggtcctgggctgtcctgcagtggccggggaggaggaggttgatggctacgagacggatcaccaggattactgtgaggtgtgccagcagggtggggaaattattctgtgtgacacctgccctcgtgcctaccacctcgtctgccttgatcctgagcttgaccgggctccagagggcaaatggagctgccctcactgtgagaaggagggggtccagtgggaggccaaggaggaagaagaagaatacgaagaggagggagaggaagaaggggagaaggaggaggaggatgatcacatggagtactgccgcgtatgcaaggacggcggggagctcctgtgctgtgacgcgtgcatctcctcctaccacattcattgtctaaaccctcccctgcctgacattcccaatggtgaatggctgtgtccccgatgcacatgccccgtgctgaagggtcgagtgcagaagatcctacattggcggtggggggagccacctgtagcagtgccagcccctcaacaggcagatggaaatccagatgtcccacccccccgtcctcttcaaggcagatcagagcgagagttctttgtcaagtgggtaggactatcctactggcactgctcctgggccaaggagcttcagctggaaatcttccatttggttatgtatcgaaactaccagcggaagaatgacatggatgagcccccacccctggactatggctccggcgaggatgatgggaagagcgacaagcgtaaagtgaaagacccgcactatgctgagatggaggagaagtactatcgttttggcatcaagccagagtggatgaccgtccaccgcatcatcaaccacagtgtggataaaaaggggaattaccactatctagtaaaatggagggacttaccatatgaccagtccacgtgggaggaagatgaaatgaatatccctgaatacgaagaacataagcaaagctactggagacaccgagaactaattatgggggaagaccctgcccagccccgcaagtataagaagaagaagaaggagctacagggtgatgggcctcccagttctcccactaatgatcctaccgtgaaatatgagactcagccacggtttatcacagccactggaggcaccctgcacatgtatcagttggaagggctgaactggctacgcttctcctgggcccagggcactgacaccattctagctgatgagatggggctaggcaagaccatacaaaccatcgtcttcctctactcactctacaaggagggccacacaaaaggtcccttcctggtgagtgccccactctctaccatcattaactgggagcgggagttccagatgtgggcacccaaattctatgtggtgacatacacgggtgacaaggacagccgggccatcattcgtgagaatgaattctcctttgaggacaatgccatcaaagggggcaagaaagcttttaagatgaagagggaggcacaggtgaagttccatgttctcctgacatcgtatgagctgatcaccattgatcaggcagcacttggttccatccgctgggcctgtcttgtggtagatgaggcccatcgactcaagaacaaccagtccaagtttttcagggttctcaatggttacaagatagatcataagttgctgctgacaggaaccccattgcagaataatctggaggagctcttccatctcctgaacttcctcaccccagagagatttaacaacttggagggcttcctggaggagtttgctgacatatccaaagaggaccagatcaagaaactgcatgatttgctggggccacacatgctgcggagactcaaggcagatgtctttaagaacatgccagccaagacagagctcatcgttcgggtggagctaagccccatgcagaagaaatactacaaatacatcctgactcgaaattttgaggccttgaattcacgaggtggtgggaaccaggtgtcgctgcttaatatcatgatggatcttaagaagtgctgcaaccatccatacctttttcccgtggctgctatggagtcccccaaactccccagtggggcttatgagggtggggcacttattaagtcgtctgggaagctcatgctgctccagaagatgctgcgaaagctgaaggagcaaggacaccgagtgctcatcttctcgcagatgaccaaaatgttagacttgcttgaggacttcttagactatgaaggctacaagtatgagcgcatcgatggtggtatcacgggtgccctgaggcaggaggccatcgatcggtttaatgctcctggggcccaacaattctgcttcctcctgtccacccgagctgggggcctgggcatcaatctggccactgctgacactgtcatcatctttgattctgactggaacccccataatgacatccaggcctttagccgggctcatcggattggccaggccaacaaagtgatgatttaccggtttgtgactcgcgcgtcagtggaagagcgaatcacacaagtggccaagagaaagatgatgctgacacacctggttgtgcggcctgggctgggctccaaggcaggctccatgtccaagcaggagcttgacgacattctcaaatttggcactgaagagctattcaaggatgaaaacgagggggagaacaaggaggaggacagcagtgtgattcattatgacaatgaggccatcgctcggctgttggaccggaaccaggatgcaactgaggacactgacgtgcagaacatgaatgagtatctcagctccttcaaggtggcacagtacgtcgtgcgggaagaagacaagattgaggaaattgagcgagagatcatcaagcaggaggagaatgtggaccctgactactgggagaagctgctgaggcatcactatgagcaacagcaggaagacctagcccggaatctaggcaagggcaagcgggttcgcaagcaagttaactacaatgatgctgctcaggaagaccaagacaaccagtcagagtactcggtgggttcagaggaggaggatgaagacttcgatgaacgtcctgaagggcgtagacagtcaaagaggcagctccggaatgagaaagataagccactgcctccactgctggcccgagtcgggggcaacattgaggtgctgggcttcaacacccgtcagcggaaggctttcctcaatgctgtgatgcgctgggggatgccaccacaggatgccttcaccacacagtggctggtgcgggacctgaggggcaagactgagaaggagtttaaggcctatgtgtctttgttcatgcgccatctgtgtgagcctggggcagacggctctgaaacctttgccgatggggtccctcgggagggactgagtcgccagcaggtgttgacccgcattggagtcatgtctctcgtcaaaaagaaggtgcaggagtttgagcacatcaatgggcgttggtcaatgccggaactgatgcctgaccccagcgccgattctaagcgctcctccagagcctcctctcctaccaaaacgtctcccaccactcctgaggcttctgctaccaacagtccctgcacctctaaacctgctactccagctccaagtgagaaaggagaaggcataaggacacctcttgagaaggaggaagctgaaaaccaggaggaaaagccagagaagaacagcagaattggggagaagatggagacagaggctgatgcccccagcccagccccatcacttggggagcggctggagccaaggaagattcctctagaggatgaggtgccaggggtgcctggagagatggagcctgaacctgggtaccgtggggacagagagaagtcagccacagagtcgacgccaggagaaaggggggaggagaagccgttggatggacaggaacacagggagaggccggagggggaaacaggggatttgggcaagagagaagatgtaaaaggtgaccgggagcttcgaccagggcctcgagatgagccacggtccaatgggcgacgagaggaaaagacagagaagccccggttcatgttcaatatcgccgatggtggcttcacagagcttcacacactgtggcagaatgaggaacgggcagctatttcctcggggaaactcaatgagatctggcacagaagacatgactattggcttctggctgggattgtcctccatggctatgcacggtggcaggacatccagaatgatgctcaatttgccattatcaacgagccatttaaaactgaagccaataaggggaactttctggagatgaaaaataagttcctggcccggaggttcaagctcctggagcaggcgctggtgattgaggagcagctgcggcgggcggcctacctgaacctgtcgcaggagccggcgcaccccgccatggccctccacgcccgcttcgccgaggccgagtgcctggccgagagccaccagcacctctccaaggagtcgctggcggggaacaagccggccaacgccgtcctgcacaaggttctgaaccagctggaggagttgctgagcgacatgaaggcggacgtgacccgcctgccagccacgctgtcccgaataccccccatcgcagcccgccttcagatgtccgagcgcagcatcctcagccggctggccagcaagggcacggagcctcaccccacaccggcctacccgccgggtccctacgctacacctccggggtacggggcggccttcagcgccgcacccgtaggggccctggccgccgcaggcgccaattacagccagatgcctgcagggtccttcatcacagccgccaccaacggccctccagtgcttgtgaagaaggagaaggaaatggtgggggcattggtgtcagacgggctggatcggaaggagccccgagccggggaggtgatctgtatagacgac

SEQ ID NO: 4299 - DNA, 5862 bp, Homo sapiens
  source 1..5862: mol_type = genomic DNA
atgcggggcccagtgggcaccgaggaggagctgccgcggctgttcgccgaggagatggagaatgaggacgagatgtcagaagaagaagatggtggtcttgaagccttcgatgactttttccctgtggagcccgtgagccttcctaagaagaagaaacccaagaagctcaaggaaaacaagtgtaaagggaagcggaagaagaaagaggggagcaatgatgagctatcagagaatgaagaggatctggaagagaagtcggagagtgaaggcagtgactactccccgaataaaaagaagaagaagaaactcaaggacaagaaggagaaaaaagccaagcgaaaaaagaaggatgaggatgaggatgataatgatgatggatgcttaaaggagcccaagtcctcggggcagctcatggccgagtggggcctggacgacgtggactacctgttctcggaggaggattaccacacgctgaccaactacaaggccttcagccagttcctcaggccactcattgccaagaagaacccgaagatccccatgtccaaaatgatgaccgtcctgggtgccaagtggcgggagttcagcgccaacaaccccttcaagggcagctccgcggcagcagcggcggcggcggtggctgcggctgtagagacggtcaccatctcccctccgctagccgtcagccccccgcaggtgccccagcctgtgcctatccgcaaggccaagaccaaggagggcaaagggcctggagtgaggaagaagatcaaaggctccaaagatgggaagaaaaagggcaaagggaaaaagacggccgggctcaagttccgcttcggggggatcagcaacaagaggaagaaaggctcctcgagtgaagaagatgagagggaggagtcggacttcgacagcgccagcatccacagtgcctccgtgcgctccgaatgctctgcagccctgggcaagaagagcaagaggaggcgcaagaagaagaggattgatgatggtgacggctatgagacagaccaccaggattactgtgaggtgtgccagcagggtggggagatcatcctgtgcgacacctgcccgagggcctaccatctcgtatgcctggacccagagctggagaaggctcccgagggcaagtggagctgcccccactgtgagaaggaggggatccagtgggagccgaaggacgacgacgatgaagaggaggagggcggctgcgaggaggaggaggacgaccacatggagttctgccgcgtgtgcaaggacgggggcgagctgctctgctgcgacgcctgcccctcctcctaccacctgcattgcctcaacccgccgctgcccgagatcccaaacggtgaatggctctgcccgcgctgtacttgccccccactgaagggcaaagtccagcggattctacactggaggtggacggagccccctgcccccttcatggtggggctgccggggcctgacgtggagcccagcctccctccacctaagcccctggagggcatccctgagagagagttctttgtcaagtgggcagggctgtcctactggcattgctcctgggtgaaggagctacagctggagctgtaccacacggtgatgtatcgcaactaccaaagaaagaacgacatggatgagccgcccccctttgactacggctctggggatgaagacggcaagagcgagaagaggaagaacaaggaccccctctatgccaagatggaggagcgcttctaccgctatggcatcaagccagagtggatgatgattcaccgaatcctgaaccatagctttgacaagaagggggatgtgcactacctgatcaagtggaaagacctgccctacgaccagtgcacctgggagatcgatgacatcgacatcccctactacgacaacctcaagcaggcctactggggccacagggagctgatgctgggagaagacaccaggctgcccaagaggctgctcaagaagggcaagaagctgagggacgacaagcaggagaagccgccggacacgcccattgtggaccccacggtcaagttcgacaagcagccatggtacatcgactccacaggcggcacactgcacccgtaccagctggagggcctcaactggctgcgcttctcttgggcccagggcactgacaccatcctggccgatgagatgggtctgggcaagacggtgcagaccatcgtgttcctttactccctctacaaggagggccactccaaagggccctacctggttagcgcgcccctctccaccatcatcaactgggaacgcgagtttgagatgtgggcgcccgacttctacgtggtcacctacacgggggacaaggagagccgctcggtgattcgggagaacgagttttcctttgaggacaacgccattcggagtgggaagaaggtattccgtatgaagaaagaagtgcagatcaaattccacgtgctgctcacctcctatgagctcatcaccattgaccaggccatcctgggctccatcgagtgggcctgcctggtggtagatgaggcccaccgcctcaagaacaaccagtccaagttttttagggtcttaaacagctacaagattgattacaagctgctgctgacagggaccccccttcagaacaacctggaggagctgttccatctcctcaacttcctgactccagagaggttcaacaacctggagggcttcctggaggagtttgctgacatctccaaggaagaccagatcaagaagctgcatgacctgctggggccgcacatgctcaggcggctcaaggctgacgtgttcaagaacatgccggccaagaccgagctcattgtccgggtggagctgagccagatgcagaagaagtactacaagttcatcctcacacggaactttgaggcactgaactccaaggggggcgggaaccaagtatcgctgctcaacatcatgatggacctgaaaaagtgctgcaaccacccctacctcttccctgtggctgccgtggaggcccctgtcttgcccaatggctcctacgatggaagctccctggtcaagtcttcagggaagctcatgctgctacagaagatgctgaagaaactgcgggatgaggggcaccgtgtgctcatcttctcccagatgaccaagatgctggacctcctggaggacttcctggagtacgaaggctacaagtatgagcggattgatggtggcatcaccgggggcctccggcaggaggcaatcgacagattcaatgcccccggggcccagcagttctgcttcctcctctcaacccgggcaggtggtctgggcatcaacctggccacggcggacactgtcatcatctacgactcggactggaacccgcacaatgacatccaggccttcagccgcgcccaccgcatcggccagaacaagaaggtgatgatctaccgcttcgtgactcgggcctcggtggaggagcgcatcacgcaggtggccaagcgcaagatgatgctcacccacctggtggtgcggcccggcctcggctccaagtcggggtccatgaccaagcaggagctggacgacatcctcaagttcggcacggaggaactcttcaaggacgacgtggagggcatgatgtctcagggccagaggccggtcacacccatccctgatgtccagtcctccaaaggggggaacttggccgccagtgcaaagaagaagcacggtagcaccccgccaggtgacaacaaggacgtggaggacagcagtgtgatccactatgacgatgcggccatctccaagctgctggaccggaaccaggacgctacagatgacacggagctacagaacatgaacgagtacctgagctccttcaaggtggcgcagtacgtggtgcgcgaggaggacggcgtggaggaggtggagcgggaaatcatcaagcaggaggagaacgtggaccccgactactgggagaagctgctgcggcaccactatgagcagcagcaggaggacctggcccgcaacctgggcaagggcaagcgcatccgcaagcaggtcaactacaacgatgcctcccaggaggaccaggagtggcaggatgagctctctgataaccagtcagaatattccattggctctgaggatgaggatgaggactttgaagagaggccggaagggcagagtggacgacgacaatcccggaggcagctgaagagtgacagggacaagcccctgcccccgcttctcgcccgagttggtggcaacatcgaggtgctgggcttcaatgcccgacagcggaaggcctttctgaacgccatcatgcgctggggcatgcccccgcaggacgccttcaactcccactggctggtgcgggaccttcgagggaagagcgagaaggagtttagagcctatgtgtccctcttcatgcggcacctgtgtgagccgggggcggatggtgcagagaccttcgcagacggcgtgccccgggagggcctctccaggcagcacgtgctgacccgcatcggggtcatgtcactagttaggaagaaggttcaggagtttgagcatgtcaacgggaagtacagcaccccagacttgatccctgaggggcccgaggggaagaagtcgggcgaggtgatctcctcggaccccaacacaccagtgcccgccagccctgcccacctcctgccagccccgctgggcctgccagacaaaatggaagcccagctgggctacatggatgagaaagaccccggggcacagaagccaaggcagcccctggaagtccaggcccttccagccgccttggatagagtggagagtgaggacaagcacgagagcccagccagcaaggagagagcccgagaggagcggccagaggagacggagaaggccccgccctccccggagcagctgccgagagaggaggtgcttcctgagaaggagaagatcctggacaagctggagctgagcttgatccacagcagaggggacagttccgaactcaggccagatgacaccaaggctgaggagaaggagcccattgaaacacagcaaaatggtgacaaagaggaagatgacgaggggaagaaggaggacaagaaggggaaattcaagttcatgttcaacatcgcggacgggggcttcacggagttgcacacgctgtggcagaacgaggagcgggctgctgtatcctctgggaaaatctacgacatctggcaccggcgccatgactactggctgctggcgggcatcgtgacgcacggctacgcccgctggcaggacatccagaatgacccacggtacatgatcctcaacgagcccttcaagtctgaggtccacaagggcaactacctggagatgaagaacaagttcctggcccgcaggtttaagctgctggagcaggcgttggtcattgaggagcagctccggagggccgcgtacctgaacatgacgcaggaccccaaccaccccgccatggccctcaacgcccgcctggctgaagtggagtgcctcgccgagagccaccagcacctgtccaaggagtcccttgctgggaacaagcctgccaatgccgtcctgcacaaggtcctgaaccagctggaggagctgctgagcgacatgaaggccgacgtgacccggctgccatccatgctgtcccgcatccccccggtggccgcccggctgcagatgtcggagcgcagcatcctgagccgcctgaccaaccgcgccggggaccccaccatccagcagggcgctttcggctcctcccagatgtacagcaacaactttgggcccaacttccggggccctggaccgggagggattgtcaactacaaccagatgcccctggggccctatgtgaccgatatc

SEQ ID NO: 4300 - DNA, 2844 bp, Homo sapiens
  source 1..2844: mol_type = genomic DNA
atggcagatccaggaatgatgagtctttttggcgaggatgggaatattttcagtgaaggtcttgaaggcctcggagaatgtggttacccggaaaatccagtaaatcctatgggtcagcaaatgccaatagaccaaggctttgcctctttacagccatcccttcatcatccttcaactaatcaaaatcaaacaaagctgacacattttgatcactataatcagtatgaacaacaaaagatgcatctgatggatcagccgaacagaatgatgagcaacacccctgggaacggactcgcgtctccgcactcgcagtatcacacccctcccgttcctcaggtgccccatggtggcagtggtggcggtcagatgggtgtctaccctggcatgcagaatgagaggcatgggcaatcctttgtggacagcagctccatgtggggccccagggctgttcaggtaccagaccagatacgagccccctaccagcagcagcagccacagccgcagccaccgcagccggctccgtcggggccccctgcacagggccaccctcagcacatgcagcagatgggcagctatatggcacgtggggatttttccatgcagcagcatggtcagccacagcagaggatgagccagttttcccaaggccaagagggcctcaatcagggaaatccttttattgccacctcaggacctggccacttgtcccacgtgccccagcagagtcccagcatggcaccttccttgcgtcactcggtgcagcagttccatcaccacccctctactgctctccatggagaatccgttgcccacagtcccagattctccccgaatcctccccaacaaggggctgttaggccgcaaacccttaactttagttctcggagccagacagtcccctctcctactataaacaactcagggcagtattctcgatatccttacagtaacctaaatcagggattagttaacaatacagggatgaatcaaaatttaggccttacaaataatactccaatgaatcagtccgtaccaagataccccaatgctgtaggattcccatcaaacagtggtcaaggactaatgcaccagcagcccatccaccccagtggctcacttaaccaaatgaacacacaaactatgcatccttcacagcctcagggaacttatgcctctccacctcccatgtcacccatgaaagcaatgagtaatccagcaggcactcctcctccacaagtcaggccgggaagtgctgggataccaatggaagttggcagttatccaaatatgccccatcctcagccatctcaccagccccctggtgccatgggaatcggacagaggaatatgggccccagaaacatgcagcagtctcgtccatttataggcatgtcctcggcaccaagggaattgactgggcacatgaggccaaatggttgtcctggtgttggccttggagacccacaagcaatccaggaacgactgatacctggccaacaacatcctggtcaacagccatcttttcagcagttgccaacctgtcctccactgcagcctcacccgggcttgcaccaccagtcttcacctccacaccctcatcaccagccttgggcacagctccacccatcaccccagaacaccccgcagaaagtgcctgtgcatcagcattccccgtcggagccctttctagagaaaccagtgccggatatgactcagaaaccgaaacagaaacgacatagatgtcgaaaccctaataaattggatataaacactttgacaggagaagaaagggtgcctgttgtcaataaacgaaatgggaagaagatgggtggagctatggcgcctccaatgaaggatctacccaggtggctggaagaaaatcctgaatttgcagttgctccagactggactgatatagttaagcagtctggttttgttcctgagtcgatgtttgaccgccttctcactgggcctgtagtgcggggagagggagcgagcagaagaggaagaaggcccaaaagtgagatcgccagagcagccgcggccgccgctgctgtggcctccacgtcagggatcaaccctttgctggtgaacagcctgtttgctggaatggacctgacgagccttcagaatctccagaatctccagtcgctccagctggcaggcctcatgggcttccctccaggactggcaacagctgccaccgccggaggcgatgcgaagaaccctgctgctgtgctgcccctgatgctgccaggaatggcgggcctgcccaacgtgtttggcttgggcgggctgttgaataaccctctgtcagctgctactggaaacaccactactgcttctagtcaaggagaaccggaagacagcacttcaaaaggagaggagaaaggaaatgagaatgaagacgagaacaaagactctgagaaaagcacagatgctgtttcggctgctgactctgcgaatggatctgttggtgctgctactgccccggctggattgccctcaaacccgctagccttcaaccctttcctcctgtccacaatggccccgggcctcttctacccatccatgtttctacctccaggactggggggattgacgctgcctgggttcccagcattggcaggacttcagaatgccgtgggctccagcgaagaaaaggctgctgacaaggctgagggaggaccctttaaagatggagagacccttgaaggcagcgatgccgaggagagcctggataagactgcagagtcctccctcttagaagacgaaatagcacagggtgaagagctagactcacttgatgggggggatgaaatagaaaacaatgaaaatgatgaa

SEQ ID NO: 4301 - DNA, 8991 bp, Homo sapiens
  source 1..8991: mol_type = genomic DNA
atggcagatccaggaatgatgagtctttttggcgaggatgggaatattttcagtgaaggtcttgaaggcctcggagaatgtggttacccggaaaatccagtaaatcctatgggtcagcaaatgccaatagaccaaggctttgcctctttacagccatcccttcatcatccttcaactaatcaaaatcaaacaaagctgacacattttgatcactataatcagtatgaacaacaaaagatgcatctgatggatcagccgaacagaatgatgagcaacacccctgggaacggactcgcgtctccgcactcgcagtatcacacccctcccgttcctcaggtgccccatggtggcagtggtggcggtcagatgggtgtctaccctggcatgcagaatgagaggcatgggcaatcctttgtggacagcagctccatgtggggccccagggctgttcaggtaccagaccagatacgagccccctaccagcagcagcagccacagccgcagccaccgcagccggctccgtcggggccccctgcacagggccaccctcagcacatgcagcagatgggcagctatatggcacgtggggatttttccatgcagcagcatggtcagccacagcagaggatgagccagttttcccaaggccaagagggcctcaatcagggaaatccttttattgccacctcaggacctggccacttgtcccacgtgccccagcagagtcccagcatggcaccttccttgcgtcactcggtgcagcagttccatcaccacccctctactgctctccatggagaatccgttgcccacagtcccagattctccccgaatcctccccaacaaggggctgttaggccgcaaacccttaactttagttctcggagccagacagtcccctctcctactataaacaactcagggcagtattctcgatatccttacagtaacctaaatcagggattagttaacaatacagggatgaatcaaaatttaggccttacaaataatactccaatgaatcagtccgtaccaagataccccaatgctgtaggattcccatcaaacagtggtcaaggactaatgcaccagcagcccatccaccccagtggctcacttaaccaaatgaacacacaaactatgcatccttcacagcctcagggaacttatgcctctccacctcccatgtcacccatgaaagcaatgagtaatccagcaggcactcctcctccacaagtcaggccgggaagtgctgggataccaatggaagttggcagttatccaaatatgccccatcctcagccatctcaccagccccctggtgccatgggaatcggacagaggaatatgggccccagaaacatgcagcagtctcgtccatttataggcatgtcctcggcaccaagggaattgactgggcacatgaggccaaatggttgtcctggtgttggccttggagacccacaagcaatccaggaacgactgatacctggccaacaacatcctggtcaacagccatcttttcagcagttgccaacctgtcctccactgcagcctcacccgggcttgcaccaccagtcttcacctccacaccctcatcaccagccttgggcacagctccacccatcaccccagaacaccccgcagaaagtgcctgtgcatcagcattccccgtcggagccctttctagagaaaccagtgccggatatgactcaggttagtggaccgaatgctcagctagtgaagagtgatgattacctgccatcaatagaacagcagccacaacaaaagaagaagaaaaagaaaaacaaccacattgtagcagaggatcccagtaaaggttttggtaaagatgacttccctggtggggtagataaccaagaactaaataggaactcactggatgggtcccaagaagaaaaaaagaaaaagaaaaggtcaaaggcaaaaaaagacccgaaggaaccgaaagaacccaaggagaaaaaagagcccaaggaacccaagaccccgaaagcccctaagattcccaaagagccaaaggaaaagaaagcaaaaactgccacgccaaaacccaaatccagcaaaaagtcaagtaataagaaacctgactcagaagcaagtgctttgaagaaaaaggtcaacaagggaaaaacagaaggttctgaaaattcagacttagacaaaacacccccaccatctcctcctcctgaagaagatgaggacccaggtgttcagaagagacggtccagcagacaggtgaagagaaagcgctacactgaagacctggagttcaagatttctgatgaggaggcagatgatgcagatgctgctgggagggattccccctccaacacctcccagtcagaacagcaggaatctgttgatgcagaaggcccagtggtagaaaaaattatgagcagtcgttcagtaaaaaagcagaaggaatctggagaggaggtagaaattgaggaattctatgtgaaatacaaaaacttctcttatcttcattgtcagtgggcatctatagaagatctggaaaaagataagagaattcagcaaaaaattaaacgatttaaggcaaagcagggccagaacaagttcctttcagagattgaggatgagctttttaatccagattatgtggaggttgaccggataatggactttgcacgtagcacagatgaccggggagagcctgtgactcactatctggtgaagtggtgttcacttccttatgaagacagcacgtgggagcggaggcaggacatagatcaagcaaagatcgaggagtttgagaaactaatgtccagggagccggaaacagagcgtgtggagcgacctcctgctgatgattggaagaaatcggagagttccagggagtataaaaacaataacaaactcagggaataccagttggagggagtaaactggctacttttcaattggtacaacatgcgaaactgcattttagcagatgaaatgggtttgggaaaaactatccagtccattacatttctctatgagatatatttgaaaggaatccatggcccttttttagtaattgccccattgtccacaatccccaactgggaaagggaattccgaacctggacagagttgaacgtggttgtgtatcatgggagtcaagctagtcgtcggaccattcagttgtatgaaatgtacttcaaagatccccagggtcgagtgataaaggggtcctataagtttcatgccatcatcactacatttgagatgattttgactgattgtcctgagctgcggaatattccatggcgctgtgtagtcattgatgaagcccacaggctgaagaacaggaactgcaagctgttggagggactcaagatgatggacttggaacacaaagtgctgctgacgggaaccccactccagaacactgtggaagaactcttcagcttgcttcatttcttggaaccaagtcgcttcccttcagaaaccacatttatgcaagaatttggtgatctaaaaacagaagagcaggtgcaaaaacttcaagctattctaaagccaatgatgttgagacgtctcaaagaggatgtagaaaagaacttggcccccaaagaagaaactattattgaagttgagctaacaaacattcagaagaaatattaccgagccatccttgagaagaatttcacatttctttccaaaggcggtggtcaagctaacgtacctaacctattaaacactatgatggaattgcggaagtgctgcaatcatccgtaccttatcaatggtgctgaagagaaaattttggaagagtttaaagaaacacacaatgcagagtctccagattttcagctccaggcaatgatccaggctgctggcaagctagtgctgattgacaagctgctgccaaaactgaaggctggtggccacagggtgcttatcttttcccagatggtgcgctgcttggacatactggaagactacctcattcaaagacggtacccatatgaaaggatcgacggccgagtaagaggcaacctccgccaggcagctatcgacagattctccaaacctgattctgataggtttgttttcctcctgtgtacaagggcaggaggtttaggcattaacctcactgctgctgatacctgcatcatctttgattcagactggaatccccaaaatgacctccaggctcaggctagatgtcatagaataggacagagcaaatctgtgaaaatctacaggctgattacaagaaattcctatgaaagggaaatgttcgacaaggctagtttgaaactgggcctggataaagctgtgctacagtctatgagtggaagagaaaatgctaccaatggggtacaacagctttccaagaaagaaatagaggatcttctacgaaaaggggcctatggtgcactcatggatgaggaggatgaagggtctaaattctgtgaagaagatattgatcagatcctcctacgtcgaacccacaccattaccattgagtcagaagggaaaggttccacatttgctaaggccagttttgttgcatctggaaataggacagatatttccttggatgatccaaatttctggcaaaagtgggctaagaaggctgaattggatattgatgccttaaatgggaggaacaacctggttattgatactccaagagtgagaaagcagaccaggctctacagtgcagtgaaggaagatgagctgatggagttctcagacttggaaagtgattctgaagaaaagccctgtgcaaagccacggcgtccccaggataagtcacagggctatgcaaggagtgaatgtttcagggtggagaagaatctgcttgtctatggttggggacggtggacagacattctttcccacggacgctataaacgccaactcactgagcaagatgtagaaaccatctgcagaaccatcctggtgtactgtcttaatcattacaaaggggatgagaatatcaaaagcttcatctgggatctgatcacacccacagcggatggccagactcgagccttggtcaaccattccggtttgtcagctcctgtgccaaggggaaggaagggaaagaaggtgaaagcccagagcacacagccggtggtgcaggatgccgactggctggccagctgcaacccagatgccctgttccaggaggacagctacaagaaacacctgaagcatcactgtaacaaggtcctgctgcgtgtccgcatgctgtactacctaagacaagaagtgataggagaccaggcggataagatcttagagggtgctgactcaagtgaagccgatgtgtggatccctgaacctttccatgctgaagttcctgcagattggtgggataaggaagcagacaaatccctcttaattggagtgttcaaacatggctatgagaagtacaactccatgcgagctgaccccgcgctgtgctttctggaacgagtcggtatgcctgatgccaaggccatagctgccgagcaaagaggaacagacatgctagcagatggtggtgacgggggagaatttgatagagaagatgaagacccagaatataaaccaaccagaacaccgttcaaagatgaaatagatgaatttgcaaattctccttcagaggataaggaagaatccatggaaatacatgccacaggcaagcacagtgagagtaatgctgagttaggccaactttactggcctaacacttcaaccctgactacacgtctgcgccggctcattactgcctatcagcgcagctataaaaggcaacagatgaggcaagaggccctaatgaagactgaccggcgcagacggcggcctcgagaggaagtgagagctctggaagcggaaagggaagctattatatctgagaagcggcaaaagtggacaagaagagaagaggctgatttttaccgtgtggtatccacctttggggttatttttgaccctgtgaaacagcaatttgactggaaccaatttagagcctttgccaggcttgacaaaaaatctgatgagagtttggagaaatacttcagttgttttgtggccatgtgtaggcgagtatgtcgaatgcccgtcaagccagatgatgaaccgcccgacctctcctccataattgagccgatcacagaggagcgagcctctcgaactctgtaccgcattgagctgctacggaagatccgcgagcaggttctccatcacccccagctgggagagaggcttaagctctgccagccaagcttggatctgccagagtggtgggagtgtggacggcatgaccgagacttgctggttggtgctgctaaacacggggtcagtcggacggattatcacatcctcaatgaccctgagttatccttcttggatgcacataaaaactttgctcaaaacagaggggcaggtaatacatcttccttgaacccactggcagttggatttgtccagactcctccagtcatctcatctgctcatattcaagatgagagggtactggaacaagccgaaggcaaagtggaggagcctgaaaacccagctgccaaggagaaatgtgagggcaaagaagaggaagaagaaaccgatggcagcgggaaggagagcaagcaggaatgtgaggcagaggccagctctgtgaaaaatgaactgaaaggtgttgaggtcggcgcagacactgggtccaaatctatttcagagaaaggttccgaagaggatgaagaggaaaagctggaggatgacgataagtcggaagagtcttcccagcccgaagcaggagctgtctctagagggaagaattttgatgaagaaagcaatgcttccatgagcactgctagagatgaaacccgagatggattctacatggaggacggagatccttcagtagctcagctccttcatgaaagaacatttgccttctcgttttggcctaaggatagagtaatgataaaccgcttagacaacatctgtgaagcagtgttgaaaggcaaatggccagtaaataggcgccagatgtttgatttccaaggcctcatcccaggttacacacccaccacagtggacagccccttgcagaagaggagctttgctgagctctccatggtcggccaagccagcattagtgggagtgaggacatcactacgtctcctcagttgtcaaaggaagatgccctcaacctctctgtccctcgccagcggaggaggaggaggagaaaaatcgaaattgaggccgaaagagctgccaagaggcgaaatctcatggagatggttgcccagcttcgagagtctcaggtggtctcagaaaatggacaagaaaaagttgtagatttatcaaaggcctcaagagaggcaacaagctctacctcaaatttttcatctctttcttcaaagtttatcttgcctaatgtctcaacaccagtgtctgatgcctttaagactcaaatggaactgctccaagcaggcctttcgcgcacacccacaaggcatctccttaatggctccctagtggatggagagcctcccatgaagaggaggcggggaaggaggaaaaatgtggagggacttgatctgcttttcatgagccacaaacggacgtcattgagtgcagaggatgctgaggtgaccaaagcttttgaagaagatatagagaccccaccaacaagaaacattccttctcccggacagctggacccagacacacggatccctgttatcaatcttgaagatgggactaggctggtgggggaagatgctcctaaaaataaggatttagttgaatggctgaagctgcaccctacttacactgttgatatgccaagttatgtaccaaagaatgcagatgtgctgttttcctcatttcagaaaccgaaacagaaacgacatagatgtcgaaaccctaataaattggatataaacactttgacaggagaagaaagggtgcctgttgtcaataaacgaaatgggaagaagatgggtggagctatggcgcctccaatgaaggatctacccaggtggctggaagaaaatcctgaatttgcagttgctccagactggactgatatagttaagcagtctggttttgttcctgagtcgatgtttgaccgccttctcactgggcctgtagtgcggggagagggagcgagcagaagaggaagaaggcccaaaagtgagatcgccagagcagccgcggccgccgctgctgtggcctccacgtcagggatcaaccctttgctggtgaacagcctgtttgctggaatggacctgacgagccttcagaatctccagaatctccagtcgctccagctggcaggcctcatgggcttccctccaggactggcaacagctgccaccgccggaggcgatgcgaagaaccctgctgctgtgctgcccctgatgctgccaggaatggcgggcctgcccaacgtgtttggcttgggcgggctgttgaataaccctctgtcagctgctactggaaacaccactactgcttctagtcaaggagaaccggaagacagcacttcaaaaggagaggagaaaggaaatgagaatgaagacgagaacaaagactctgagaaaagcacagatgctgtttcggctgctgactctgcgaatggatctgttggtgctgctactgccccggctggattgccctcaaacccgctagccttcaaccctttcctcctgtccacaatggccccgggcctcttctacccatccatgtttctacctccaggactggggggattgacgctgcctgggttcccagcattggcaggacttcagaatgccgtgggctccagcgaagaaaaggctgctgacaaggctgagggaggaccctttaaagatggagagacccttgaaggcagcgatgccgaggagagcctggataagactgcagagtcctccctcttagaagacgaaatagcacagggtgaagagctagactcacttgatgggggggatgaaatagaaaacaatgaaaatgatgaa

SEQ ID NO: 4302 - DNA, 8145 bp, Homo sapiens
  source 1..8145: mol_type = genomic DNA
atgaaaatgaaaatacagaaaaaagagaagcagttgtcaaatttaaaagttttgaatcactccccaatgtctgatgcctctgtcaattttgactacaaatctccatccccatttgactgcagcactgatcaagaagagaaaattgaagatgttgctagtcactgtctgcctcagaaggacctgtatactgctgaagaggaagctgctaccctttttcctaggaaaatgacatcccataatgggatggaggacagtggaggaggaggtactggagtgaagaagaaacggaagaaaaaggagccaggagaccaagagggtgcagcaaagggaagcaaggacagagagcccaagccaaagaggaaacgagaaccgaaagagccaaaggaacccagaaaggccaaggagccgaagaaggccaaggagcacaaggagccgaagcaaaaagatggggcaaagaaggcacggaagccccgggaggcctcgggcaccaaggaggccaaagagaagaggagctgcactgactctgcagccaggacgaagtccaggaaggccagcaaggagcaaggaccaaccccagtggagaaaaagaagaaaggaaaaaggaaaagtgaaactacagtggagagtttagagctggatcagggcctgacgaacccatctctgcggagtcctgaggagtccactgagtctacagacagccagaaacgacgctcgggaaggcaagtaaagcgcagaaaatacaatgaggacctggacttcaaagtggtggatgatgatggggaaacaattgctgttcttggagctggtcgaacatctgcactctcagcctctacactggcctggcaggcggaggagcctccagaagatgatgcaaacatcattgagaagatcctggcatctaagactgtccaggaggttcacccaggagaacctccgttcgacttggagctgttctacgttaagtatagaaatttttcctacttacattgtaaatgggccacaatggaagagctcgaaaaggatcctcgcatcgcacagaagatcaagcgatttaggaataaacaagcccagatgaagcacatttttacggagcctgatgaagacttgttcaatccagactatgtagaagttgatcgcatcttggaggtggcccacaccaaggatgcagaaacaggggaggaggtaacacattacctggtgaagtggtgctcactaccatatgaagaaagcacgtgggagctagaggaagatgtagatcctgcaaaagttaaagaatttgaatctcttcaagttctccctgaaattaagcatgtggagcggcctgcttcagactcctggcagaaacttgagaagtctcgcgagtataagaacagtaaccagctccgggagtaccagctggaagggatgaactggcttctttttaactggtataacagaaaaaactgtattttggctgatgagatgggcctagggaaaaccatccagtccatcacattcctttcagaaatatttctgagaggaatccacggcccttttctcattatcgcccctctctccaccatcactaactgggagcgggagttccggacatggacagagatgaatgccattgtgtaccacggcagccagatcagcaggcagatgatccagcagtatgaaatggtgtacagagacgcccagggaaaccccctttcaggagtcttcaagttccacgtcgtcatcacaacatttgaaatgatcctagcagactgcccagagttgaagaagattcactggagctgtgtgataattgatgaagcccacagactgaagaataggaactgcaaacttctggagggtctaaagcttatggccctggaacataaagtgcttctcactggaacacccttgcagaactctgtggaggagctcttcagtttgttaaattttctggagccatcacagtttccttcagagaccgctttcttggaggaatttggagatctgaaaacagaggagcaggtaaagaaactgcagtctatcctaaaaccaatgatgcttcggcggctgaaagatgatgtggaaaagaaccttgctcccaaacaagagacgatcattgaggtggaactgaccaatatccagaaaaagtactaccgtgccatcctcgagaagaacttttccttcctgaccaagggggcaaatcagcacaacatgcccaatctcatcaacaccatgatggagctgaggaagtgctgtaaccatccctacctgatcaatggagcagaggagaaaattctagaagatttccgaaaaacccacagccctgatgcccctgactttcagctgcaggccatgattcaggcagcaggaaagcttgtgttgattgataaactactccctaagctgattgcaggtggccacaaagtactcatcttctcccagatggtgcgctgcctcgacatcctagaagattacctcatccagagaagatacacctatgagcgaattgatgggcgagtacggggaaacctgcgccaggcagccatcgaccggttctgtaagccagattcagaccgctttgtctttcttctgtgcaccagagcgggaggcctggggatcaatctcacagctgctgatacctgcatcatatttgattctgactggaacccacaaaatgacttgcaggctcaggcccgatgtcaccgcataggccagagcaaagctgtgaaggtgtatcgcctcatcactcgaaattcctacgagcgcgagatgtttgacaaggccagcctaaagctggggctggacaaggctgttcttcaggacatcaaccgaaagggcggcaccaatggggtacagcagctctcaaaaatggaggtggaggacctactccggaaaggtgcttatggagccttaatggatgaagaagatgaaggctccaagttctgtgaagaagacatagaccagattctgcagaggcgaacgcacaccatcaccatccagtctgaggggaaagggtccacttttgccaaggctagctttgtggcttcaggaaacagaacagatatttccttagatgatcctaacttttggcagaaatgggctaaaatagctgaactagacactgaagcaaagaatgaaaaggaaagcttagtgatcgaccgacctcgcgtgagaaagcagaccaaacactacaactcgtttgaggaagacgagctcatggagttttcagagttagacagcgactcagacgaaaggcccacgagatccaggcgcctcaatgacaaagccaggcgctacctccgagcggagtgcttccgggtagagaagaacctgctcatctttggctggggccggtggaaggacatcctgactcatggccgattcaagtggcatctgaacgagaaggacatggagatgatttgccgtgccctcctggtgtactgtgtcaagcattataagggggacgagaagatcaagagtttcatttgggaactgatcacacctaccaaagatgggcaagcccagaccctccagaaccactcaggcttatctgccccagtccccagagggaggaaggggaagaagacgaagaaccagttgctaatcccagagctaaaggatgcagattggctagccacctgcaaccccgaggtggtcttgcatgatgatggctataagaaacacctcaaacagcactgcaacaaagtacttttgcgagtccggatgctgtactacctaaaagctgaaatactgggagaagcagctgagaaagcatttgaaggatctcctgccagggagctggatgtacctctgcctgacatcgactacatggagatcccagtggactggtgggatgctgaagccgataagtcacttctcattggcgtgttcaagcatggttatgaaaggtacaatgccatgcgagcagacccagcactttgcttcctggagaaagttgggatgcccgatgagaagtccctttctgcagaacagggtgttacagatgggacctcagacattcctgaaagaggcaacacagataaagaagacaatgctgaggacaaagtagatggcctccagaaacaaacggagagttccagtgatggaggtgatggcgtttttagcgaaaagaaggatgacagccgggcagcccaggatggctccgacccagacaaatcgccctggccagtttcctccgccctcacagctcgtctcagacgtctggtcactgtttaccagcgctgcaaccgcaaggaactgtgccggcctgaaattctgggaccaggtaaccaaggatattgggttcaggaagagatgttcaggagaacctcagaaatggacctcatcaacaaggaagcccaaaagaggtggactaggagagaacaagcagacttctatagaacagtgtcttcctttggtgttgtttacgatcaagaaaagaaaacctttgactggacacagttccgcatcatttcccgtttggacaagaagtcggatgagagcctggaacagtatttttatagttttgtggccatgtgccggaatgtctgtcgtctacccacatggaaagatggcggtcccccagataccaccatctacgttgaacccatcactgaggaacgtgctgcaagaactctgtaccgcattgaactgttacggaaagtccgagagcaagtgctcaagtgccctcagctgcatgaacgcctccagctgtgcaggcccagcctctacctcccagtctggtgggagtgtgggaagcatgatcgagacctgctcatcggcactgccaaacatgggctgaaccgcactgactgttacatcatgaacgacccccagctgtccttcctggatgcctatagaaactatgcccagcataaaagatctggcacccaggcaccaggaaatctctgttgcctttaccagaccaactccaagttatatgaatctcttacatattctcaaatgagtaggacttcagagtcccttgaaaatgaacctgaaaatctagtgagagtagaaagcagagatgatcatctcagcctgcctgatgtgacatgtgaaaactttatttctaaagttcaggatgtcatttccatcaaccatgatgaaagtctgctgcctgagtccttagagagcatgatgtatggtaagaaggtgctcagccaagaaccaagctcttttcaggagagcccaagtaccaatactgaatctagaaaagatgttattaccatctcaataagcaaagatgggaactgccagtctggtggccctgaggcagaaatagcttctggccctacttttatgggtagcttagaagcaggaggagtagctcaagcaaacatcaaaaatggaaaacatttgttgatgtctatttcaaaggaaggggagctctgctgcagtgaggcaggacagagacctgaaaacattggccagctggaagccaagtgtttagcttccccttccttgaatccaggaaatgaaagtgggtttgtagatatgtgcagtcttagtgtctgtgactccaaaagaaacctgtcatcagatcagcaattaattgatttattggaaaacaaaagcttagaaagtaaattgattttgagtcagaaccacagtgatgaggaggaagaagaggaggaaaacgaggaggaaaacttagccatggcagtaggcatgggggaaaggccagaggtattgcatctcacggagcccactactaacatctcaagggaaaagaaccaaggcttccaagatgaaaccaagaaaggaagcttagaggtggcaaaccagactcctgggctacagagggctttccccgctccagcagcctgtcagtgccactgcaaacacatggagaggtggatgcatggcctcgagaatgatgaatttgaaatcgagaaacccaaggcttatatcccagatctgttcaaaagtaaaaccaatactatcgccatggagggtgaacccactgctattccatcacagccgtttaaagtgaagcatgagcttttaaaagaaccttggaaagaaagtgcagaggggcaaaacgttttccccacatatcctcttgaaggaagtgagctcaaatcagaagacatggattttgagaataaagatgattatgatagagacggaaactgccatagtcaagattatccagggaagtactctgaagaggagagcaagagctcaacatcgggcatcacaggagacattggggatgagctacaggaggctcgagctcccactattgctcagctgctacaggagaaaactctctattccttctctgagtggccaaaggaccgcgtgataattaaccgcctagataatatctgccacgtggtgttaaaggggaagtggccctctagccagcagtatgagccctcaggcacactgcccaccccggtattaaccagcagtgctggttctcgaaccagcctctcagagccggaagcagcagaacacagcttcagcaacggcgcagcattggcggcccagatccacaaggagagcttcttagctccagtattcacaaaggatgaacaaaagcacaggcgtccctatgagtttgaggtggagagggatgcaaaggctcggggcctggagcagttctctgccacccacgggcacacccctatcatcctcaatggctggcatggggagtcagctatggacctctcctgctcatcagaggggtccccaggagccacatcccctttcccagtgagcgccagcacccctaagattggggctatcagttcacttcagggagcccttggcatggacttgtctgggattctgcaagctggcctgatccatcctgtgactggacagattgtcaatggaagcctcagaagagatgatgcagccacgaggaggcggagagggaggcggaaacatgttgaaggagggatggacctcatctttttgaaggagcagacacttcaggcgggaatcttggaagtccatgaagacccagggcaggccaccttgagcaccacacaccctgaggggccagggcctgccacctcggctcctgagccagctacggcagccagcagccaagccgagaaatccattcccagcaagagtctgcttgactggctaaggcagcaggctgactactccttagaagttcctggctttggggcaaatttttcagacaaaccaaagcagaggaggccacgctgtaaagaacctggaaaattagatgtcagctccctgagcggggaagagagagttcctgccatccccaaggagccaggactgagggggtttcttccagaaaacaagttcaatcacactctggctgagcctattcttcgagatacgggcccccgcaggagggggaggcggcctcggagcgaactcctgaaggctccttccattgtggcagactctccctctggaatggggccactgttcatgaatggactgattgctgggatggacctggtaggacttcagaacatgagaaatatgccaggcatccccctcaccgggctggtggggtttccagctggctttgccacgatgccaacaggtgaagaggtcaaaagtaccctgagcatgctgcccatgatgctgccaggcatggctgctgtgccccagatgtttggtgttgggggactcctcagtccacccatggcaaccacctgcacttccactgctccggcgtctctatcaagcacaacgaaaagtggtacggcagtgactgaaaagactgcggaagacaagccgagtagccatgatgtgaaaacagacactttagctgaggacaagcctggtccaggtccattttctgatcagtctgaacctgcaataactactagtagtcctgtggcttttaacccatttctcatcccaggagtatctcctggactcatttacccatccatgttcctctcccctggtatgggcatggctctgccagccatgcagcaggccagacactcggaaatagtaggtctggagagccagaagaggaagaagaagaagacaaagggggacaaccccaactcccacccagagcctgctcccagctgtgaaagggagcccagcggtgatgagaactgtgccgaacccagtgcccctttgcccgcagagagagaacatggggcacaggctggggagggggcactcaaagactccaacaacgacaccaat

SEQ ID NO: 4303 - DNA, 1746 bp, Homo sapiens
  source 1..1746: mol_type = genomic DNA
atgagcatagagacgctactggaggcggcccgcttcctggaatggcaagcgcagcaacaacagagagcacgtgaggagcaggagcggcttcgcttggagcaggagcgagagcaggaacagaagaaggccaatagcctggccaggctggcacatacccttcctgtggaggaaccccgcatggaggcgccacccctgcctctgtctccaccggctcccccgccggcacccccaccaccacttgccacccctgccccactgactgtcatccctatccctgtggtgaccaactcccctcagcctctacccccacccccacccttgcccgcggcagcccagcctctgcccctggcgcctcgtcagccggccctggttggcgcccccggactcagcattaaggagcctgcccccctgcccagcaggccgcaggtgcccacccctgctcccctactgccggactcgaaggccaccattccacccaatggcagccccaagcctttgcagcccctccccacgcctgtcctgaccatagcgccacaccctggagtccagcctcagctggccccccagcagccgcccccacccacgctggggaccctgaagttggcaccagctgaagaagtcaaatccagtgaacagaagaagaggcccggggggatcggaaccagagaagtccacaacaaattggagaagaacaggagggcccatctgaaagagtgctttgagaccctgaagcggaacatccccaacgtggatgacaagaagacgtccaatctgagcgtgctgcggacggcgctgcggtacatccagtccctgaagaggaaggagaaggaatatgagcatgaaatggagcggctggcacgtgagaagattgccacgcagcagcggctggcagagctcaagcacgagctgagccagtggatggacgtactggagattgaccgcgtgctgcggcagacgggccagcccgaggatgaccaggcctccacctccaccgcctctgagggtgaggacaacatagacgaggatatggaggaggaccgggcgggcctgggcccacctaagctgagccatcgtccccagccggagctgctgaagtccaccctgccaccccccagcaccacccctgcgcctctgcctccacacccacaccctcacccccactccgtggccctacctcctgcccacctccccgtgcagcagcagcagccacagcagaagacccctctgccagcccctcctcccccaccggctgcccctgcccagacactggtgccagctccagcccatctggtggcgacggctgggggtggctccacggtcatcgcccacacagccaccactcacgcttcagtcatccagactgtgaaccacgttctgcaggggccaggcggcaagcacatcgcccacatcgccccctcggcccccagccctgcggtgcaactggcgcctgccacaccccccattgggcacatcactgtgcaccctgccaccctcaaccatgtggcccacctgggctcccagctgcccttgtacccgcagcccgtggcagtgagccacatcgcccacaccctctcgcaccagcaagtcaacggcacggccggcctggggcccccggctactgtcatggcaaagccggccgtgggggctcaggtggtgcaccacccccagctggtgggccagaccgtgctcaaccctgtgaccatggtcaccatgccctccttcccagtcagcacactcaagctggct

SEQ ID NO: 4304 - DNA, 930 bp, Homo sapiens
  source 1..930: mol_type = genomic DNA
atgctggcatggcaggacggcggggccaaggcggctccctcccaccacaagatttctttctctgtcctggacatcctggacccacagaaattcacccgcgcagcgctccctgccgtgcgcccggctccccgggaagccaggaaaagtttggcggaggtcgaagcggggaaagatgccagctccagggaccctgtccgacagctggagacccctgatgctgcgggcccaggcgccggccaggcgtcccccctggagggttccgaggcggaagaggaggaggatgcggaggatccgaggaggccgcggctgcgggagcgggctgcgcgcttgctgccgggcctagcgcgctcacctgacgccccggccggggcattggcgtctggggagccctgcgaggacggcgggggcggccctgtgaggtcccccccgggatcccccggctccccgcgtcccaggcgccggcgcctggagcccaactgcgccaagccgcggcgcgcgcgcaccgccttcacctacgagcagctggtggccttggagaacaagttccgggccacgcgctacctgtcagtgtgcgagcgcctgaacctcgcgctgtctctcagcctcaccgagacgcaggtcaaaatctggttccagaatcgcaggaccaagtggaagaagcagaacccgggtgccgacggcgcggcgcaggtggggggtggcgcgccccagccaggggcggcggggggcggcggcggcggcggctcggggggcagtcctggccctcccggcaccggcgctctgcacttccagactttcccctcctactccgcggccaatgtcctcttcccgtccgccgcctccttcccgctgacggctgccgcccccgggagccctttcgcgccgttccttgggccttcctacctgacccccttctacgccccgcgtcta

SEQ ID NO: 4305 - DNA, 603 bp, Homo sapiens
  source 1..603: mol_type = genomic DNA
atgtccttcgccacgctgcgcccggcgccgccgggccgctacctgtaccccgaggtgagcccgctgtcggaggacgaggaccgcggcagcgacagctcgggctccgacgagaaaccctgtcgcgtgcacgcggcgcgctgcggcctccagggcgcccggcggagggcggggggccggcgggccgggggcggggggccagggggccggccaggccgtgagccccggcagcggcacacggcgaacgcgcgcgagcgagaccgcaccaacagcgtgaacacggccttcacggcgctgcgcacgctgatccccaccgagcccgccgaccgcaagctctccaagattgagacgctgcgcctggcctccagctacatctcgcacctgggcaacgtgctgctggcgggcgaggcctgcggcgacggacagccctgccactccgggcccgccttcttccacgcggcgcgcgccggcagccccccgccgccgcccccgccgcctcccgcccgcgacggcgagaacacccagcccaaacagatctgcaccttctgcctcagcaaccagagaaagttgagcaaggaccgcgacagaaagacagcgattcgcagt

SEQ ID NO: 4306 - DNA, 1332 bp, Homo sapiens
  source 1..1332: mol_type = genomic DNA
atgccaaggtcaggggctcccaaagagcgccctgcggagcctctcacccctcccccatcctatggccaccagccacagacagggtctggggagtcttcaggagcctcgggggacaaggaccacctgtacagcacggtatgcaagcctcggtccccaaagcctgcagccccggcggcccctccattctcctcttccagcggtgtcttgggtaccgggctctgtgagctagatcggttgcttcaggaacttaatgccactcagttcaacatcacagatgaaatcatgtctcagttcccatctagcaaggtggcttcaggagagcagaaggaggaccagtctgaagataagaaaagacccagcctcccttccagcccgtctcctggcctcccaaaggcttctgccacctcagccactctggagctggatagactgatggcctcactctctgacttccgcgttcaaaaccatcttccagcctctgggccaactcagccaccggtggtgagctccacaaatgagggctccccatccccaccagagccgactggcaagggcagcctagacaccatgctggggctgctgcagtccgacctcagccgccggggtgttcccacccaggccaaaggcctctgtggctcctgcaataaacctattgctgggcaagtggtgacggctctgggccgcgcctggcaccccgagcacttcgtttgcggaggctgttccaccgccctgggaggcagcagcttcttcgagaaggatggagcccccttctgccccgagtgctactttgagcgcttctcgccaagatgtggcttctgcaaccagcccatccgacacaagatggtgaccgccttgggcactcactggcacccagagcatttctgctgcgtcagttgcggggagcccttcggagatgagggtttccacgagcgcgagggccgcccctactgccgccgggacttcctgcagctgttcgccccgcgctgccagggctgccagggccccatcctggataactacatctcggcgctcagcgcgctctggcacccggactgtttcgtctgcagggaatgcttcgcgcccttctcgggaggcagctttttcgagcacgagggccgcccgttgtgcgagaaccacttccacgcacgacgcggctcgctgtgcgccacgtgtggcctccctgtgaccggccgctgcgtgtcggccctgggtcgccgcttccacccggaccacttcacatgcaccttctgcctgcgcccgctcaccaaggggtccttccaggagcgcgccggcaagccctactgccagccctgcttcctgaagctcttcggc

SEQ ID NO: 4307 - DNA, 1383 bp, Homo sapiens
  source 1..1383: mol_type = genomic DNA
atggaggacctggatgccctgctctctgacctggagactaccacctcgcacatgccaaggtcaggggctcccaaagagcgccctgcggagcctctcacccctcccccatcctatggccaccagccacagacagggtctggggagtcttcaggagcctcgggggacaaggaccacctgtacagcacggtatgcaagcctcggtccccaaagcctgcagccccggcggcccctccattctcctcttccagcggtgtcttgggtaccgggctctgtgagctagatcggttgcttcaggaacttaatgccactcagttcaacatcacagatgaaatcatgtctcagttcccatctagcaaggtggcttcaggagagcagaaggaggaccagtctgaagataagaaaagacccagcctcccttccagcccgtctcctggcctcccaaaggcttctgccacctcagccactctggagctggatagactgatggcctcactctctgacttccgcgttcaaaaccatcttccagcctctgggccaactcagccaccggtggtgagctccacaaatgagggctccccatccccaccagagccgactggcaagggcagcctagacaccatgctggggctgctgcagtccgacctcagccgccggggtgttcccacccaggccaaaggcctctgtggctcctgcaataaacctattgctgggcaagtggtgacggctctgggccgcgcctggcaccccgagcacttcgtttgcggaggctgttccaccgccctgggaggcagcagcttcttcgagaaggatggagcccccttctgccccgagtgctactttgagcgcttctcgccaagatgtggcttctgcaaccagcccatccgacacaagatggtgaccgccttgggcactcactggcacccagagcatttctgctgcgtcagttgcggggagcccttcggagatgagggtttccacgagcgcgagggccgcccctactgccgccgggacttcctgcagctgttcgccccgcgctgccagggctgccagggccccatcctggataactacatctcggcgctcagcgcgctctggcacccggactgtttcgtctgcagggaatgcttcgcgcccttctcgggaggcagctttttcgagcacgagggccgcccgttgtgcgagaaccacttccacgcacgacgcggctcgctgtgcgccacgtgtggcctccctgtgaccggccgctgcgtgtcggccctgggtcgccgcttccacccggaccacttcacatgcaccttctgcctgcgcccgctcaccaaggggtccttccaggagcgcgccggcaagccctactgccagccctgcttcctgaagctcttcggc

SEQ ID NO: 4308 - DNA, 1830 bp, Homo sapiens
  source 1..1830: mol_type = genomic DNA
atggactcagtggcctttgaagatgtggctgtgaacttcacacaagaggagtgggctttgctgggtccatcacagaagagtctctacagaaatgtcatgcaggaaaccattaggaacctggactgtatagaaatgaaatgggaggaccagaacattggagatcagtgccaaaatgccaagagaaatctaagaagtcatacatgtgaaattaaagatgacagtcaatgtggagaaacttttggccagattccagatagtattgtgaacaagaacactcctcgagtaaatccatgtgacagtggtgagtgtggagaagtcgtcttgggtcattcgtctcttaattgcaacatcagagttgacactggacacaaatcatgtgagcatcaggaatatggagagaagccatatacacataaacaacgtgggaaagccatcagtcatcagcactccttccagacacatgaaaggccccccaccggaaagaaacccttcgattgtaaagaatgtgcaaaaacctttagttctcttggaaacctccgaagacacatggcggcacaccatggagatggaccttataaatgtaagttgtgtgggaaagcctttgtttggcccagtttatttcatttgcacgaaagaacacacactggagagaaaccgtatgaatgtaagcagtgttctaaagcctttcctttttacagttcctatctaagacatgaaagaatccacacgggagagaaagcgtatgaatgtaagcagtgttccaaagcctttcctgattacagtacctatctaagacatgagagaactcacaccggagagaaaccctataaatgtacacaatgtgggaaagccttcagctgttactattacactcgactacatgaaaggactcacacgggagaacaaccctatgcatgtaagcaatgtgggaaaacgttttatcatcacacaagctttcgaagacacatgataaggcacactggagacggaccacataaatgtaagatatgtgggaaaggctttgattgtcctagttcagttcgaaatcatgaaactactcacactggagagaaaccctatgaatgtaagcagtgtgggaaagtgttatctcatagctcgagctttcgaagtcacatgataacacacacaggagatggaccccagaaatgcaagatatgtgggaaagcctttggttgtcccagtttatttcaaagacatgaaaggactcacactggagagaaaccctatcaatgtaaacaatgtggtaaagccttcagtcttgccggttcccttcgaagacatgaagcaactcacactggagtgaaaccctataaatgtcagtgtgggaaagcctttagtgatctctcttcctttcaaaatcatgagacaactcacactggagagaagccatatgagtgtaaggaatgtgggaaagcattcagttgtttcaaatacctttctcaacataaaaggacccacacagtagaaaaaccttatgagtgtaaaacatgtagaaaagccttcagtcatttcagtaacttaaaagtccatgaaaggattcactctggagagaagccatatgaatgtaaggaatgtggaaaagcattctcttggctcacttgccttctacgacatgaaagaattcacactggagagaaaccctatgaatgtctacaatgtggtaaagccttcactcgttcccgtttccttcgaggacatgaaaaaactcacactggagagaagctgtatgaatgtaaggaatgtgggaaagcattgagttctctccgttccttgcatagacataaaaggactcactggaaagatactctc

SEQ ID NO: 4309 - DNA, 417 bp, Homo sapiens
  source 1..417: mol_type = genomic DNA
atgtcccgtcggaaacagacaaatccaaataaagttcactgggatcaagtatttgctgggctagaagagcaagcccgccaggcgatgatgaaaactgattttcctggagaccttggcagtcagcgacaagctatccaacaactaagagatcaggactccagtagcagtgacagtgagggtgatgaagaggagacgacacaagatgaagtctcttcccacacatcagaggaagatggaggggtggtcaaagtggagaaagagttagaaaatacagaacagcctgttggtgggaacgaagtggtagagcacgaggtcacagggaatttgaattctgaccccttgcttgaactctgccagtgtcccctctgccagctagactgcgggagccgggagcagttgattgctcacgtgtaccag

SEQ ID NO: 4310 - DNA, 1110 bp, Homo sapiens
  source 1..1110: mol_type = genomic DNA
atgtcccgtcggaaacagacaaatccaaataaagttcactgtgacagtgagggtgatgaagaggagacgacacaagatgaagtctcttcccacacatcagaggaagatggaggggtggtcaaagtggagaaagagttagaaaatacagaacagcctgttggtgggaacgaagtggtagagcacgaggtcacagggaatttgaattctgaccccttgcttgaactctgccagtgtcccctctgccagctagactgcgggagccgggagcagttgattgctcacgtgtaccagcacactgcagcagtggtgagcgccaagagctacatgtgtcctgtctgtggccgggcccttagctccccggggtcattgggtcgccacctcttaatccactcggaggaccagcgatctaactgtgctgtgtgtggagcccggttcaccagccatgccacttttaacagtgagaaacttcctgaagtactaaatatggaatccctacccacagtccacaatgagggtccctccagtgctgaggggaaggatattgcctttagtcctccagtgtaccctgctggaattctgcttgtgtgcaacaactgtgctgcctaccgtaaactgctggaagcccagactcccagtgtacgcaagtgggctctacgtcgacagaatgagcctttggaagtacggctgcagcggctggaacgagagcgcacggccaagaagagccggcgggacaatgagacccccgaggagcgggaggtgaggcgcatgagggaccgtgaagccaagcgcttgcagcgcatgcaggagacagacgagcagcgggcacgccggctgcagcgggatcgggaggccatgaggctgaagcgggccaatgaaaccccggaaaagcggcaggcccggctcatccgagagcgagaggccaagcggctcaagaggaggctggagaaaatggacatgatgttgcgagctcagtttggccaggacccttctgccatggcagccttagcagctgaaatgaacttcttccagctgcctgtaagtggggtggagttggacagccagcttctgggcaagatggcctttgaagagcagaacagcagctctctgcac

SEQ ID NO: 4311 - DNA, 1236 bp, Homo sapiens
  source 1..1236: mol_type = genomic DNA
atgtcccgtcggaaacagacaaatccaaataaagttcactgggatcaagtatttgctgggctagaagagcaagcccgccaggcgatgatgaaaactgattttcctggagaccttggcagtcagcgacaagctatccaacaactaagagatcaggactccagtagcagtgacagtgagggtgatgaagaggagacgacacaagatgaagtctcttcccacacatcagaggaagatggaggggtggtcaaagtggagaaagagttagaaaatacagaacagcctgttggtgggaacgaagtggtagagcacgaggtcacagggaatttgaattctgaccccttgcttgaactctgccagtgtcccctctgccagctagactgcgggagccgggagcagttgattgctcacgtgtaccagcacactgcagcagtggtgagcgccaagagctacatgtgtcctgtctgtggccgggcccttagctccccggggtcattgggtcgccacctcttaatccactcggaggaccagcgatctaactgtgctgtgtgtggagcccggttcaccagccatgccacttttaacagtgagaaacttcctgaagtactaaatatggaatccctacccacagtccacaatgagggtccctccagtgctgaggggaaggatattgcctttagtcctccagtgtaccctgctggaattctgcttgtgtgcaacaactgtgctgcctaccgtaaactgctggaagcccagactcccagtgtacgcaagtgggctctacgtcgacagaatgagcctttggaagtacggctgcagcggctggaacgagagcgcacggccaagaagagccggcgggacaatgagacccccgaggagcgggaggtgaggcgcatgagggaccgtgaagccaagcgcttgcagcgcatgcaggagacagacgagcagcgggcacgccggctgcagcgggatcgggaggccatgaggctgaagcgggccaatgaaaccccggaaaagcggcaggcccggctcatccgagagcgagaggccaagcggctcaagaggaggctggagaaaatggacatgatgttgcgagctcagtttggccaggacccttctgccatggcagccttagcagctgaaatgaacttcttccagctgcctgtaagtggggtggagttggacagccagcttctgggcaagatggcctttgaagagcagaacagcagctctctgcac

SEQ ID NO: 4312 - DNA, 3243 bp, Homo sapiens
  source 1..3243: mol_type = genomic DNA
atgcccaggaggaagcaggagcagcccaagcgccttccctcacatgttagtaggcaggaagaggcggagggagagctcagtgaaggagaacactggtatggaaactcttcagagactccgtcagaagcatcctatggggaagtccaggagaactataagttgtctctggaggaccggatccaggagcagtccacgtccccggacacctccttgggaagcacgactcccagcagccacacgttggagctggtggcactggacagtgaggtcctgcgagactcactgcagtgtcaagatcacctttccccgggagtgtcttctttgtgtgacgatgacccaggctccaacaagcccctgagcagcaatttgaggcggctgctggaggctggttccctcaaactcgatgctgcagccacggctaatggcagagtggagtcccccgtaaacgttggctcgaacctctccttttccccgccttcccaccacgcccagcagctcagtgttctggccaggaagttggccgagaagcaggaacagaatgaccaatacactccaagtaaccgttttatatggaatcaaggtaagtggttgccaaactcaaccaccacctgcagcttgtctccggattcagccatcctaaaactgaaagctgcagccaatgccgttctgcaggacaaatctctcaccaggactgaggagaccatgcgatttgagtccttttcctccccttttagctcccagtctgccagttctaccttggccgctttgtccaagaaggtcagtgaaagaagtttgactcctggtcaggagcaccctccaccggccagctccttcctttccctggcttctatgacctcctcagcggcccttctgaaggaggtggccgcaagggctgcgggcagtcttctggctgagaaatcatcgctgctgcctgaggaccctctaccgcccccgccttcagagaagaaaccagaaaaagtcactccgccacctccaccgccacctccaccacctccaccaccaccaccacaatccctggaattattattactcccagttcctaagggaagagtttctaaaccctccaattcagcctcagaagaggaaagtggaaagcctttccagtgtccaatatgtggtttggttattaaaaggaagagttactggaagcggcacatggtgattcacacaggtttaaaaagtcatcagtgtccgctctgtccattccggtgtgctcgcaaggacaatctcaaatcccacatgaaggttcatcagcaccaggatcggggagagacctttcagtgccagctgtgcccttttacttcctcacgccacttcagcctgaaactccacatgcgttgccatcagcacttcctgaggacagaagccaaggtgaaggaggagatcccagacccagatgtcaagggatctccccacctcagtgacagtgcctgcctggggcagcaaagggaaggaggagggacagagctagtggggaccatgatgacgtctaacactccagagaggactagccagggaggggctggcgtctcgcctttgctggtgaaggaggaacccaaggaagataacggcctgcccacctcctttactttgaatgctgccgacaggcccgccaaccacacaaagctgaaagacccctccgagtatgtggccaacagtgcgtcagcattgttcagccaggacatctctgttaagatggcgtctgattttctcatgaagctgtcagctgcaaatcagaaggagcccatgaatcttaattttaaagtgaaagaggagcctaaggaaggggagtccctaagcacgactttgcctcggtccagctatgtgttcagcccggaatctgaagtgtcagccccaggcgtctctgaggacgcactaaagccccaggaagggaagggaagtgtgctaaggcgggatgtgtcagtcaaagcagcctctgaacttctcatgaaactctcagcggaaagctacaaggaaacacagatggtgaagattaaagaggaacccatggaggttgacatccaggactcccatgtctcgatatcacccagccggaatgttggctacagcactttaatcgggcgagagaaaaccgaacccttacagaagatgccagagggcagagtacccccagagagaaacctcttcagtcaggatatctctgtgaaaatggcttccgagctcctctttcaactgtcagaaaaagtgagcaaagagcacaatcatacaaaagaaaacaccatccggaccacgaccagccctttcttttcagaagacacatttagacaatcaccattcacctccaattcaaaagaactgctgcccagtgactccgtgctgcacggaagaatatcagctccagaaacagaaaagatagtcctagaggcaggaaatggattaccatcctggaaattcaatgaccagctttttccctgtgacgtgtgtgggaaagtgtttggccgacagcagacattgtcccgacacctctcgctgcacacagaggaaagaaaatacaaatgccacttgtgcccctatgctgctaagtgccgtgcaaatctgaaccagcacttgaccgtccattccgtgaagctggtgagtacagacaccgaggacattgtcagcgccgtcacctctgaaggcagtgatgggaagaaacatccttattattacagttgtcacgtgtgtggatttgagaccgagctcaatgtccagtttgtcagccacatgtcactccacgtggacaaggagcagtggatgttttcgatctgctgcactgcctgcgacttcgtcaccatggaggaagcagagataaagactcacattggcaccaagcacacaggggaagacaggaagacccccagcgaatcaaatagcccctcttcatcctccctctcagctctgagtgattcagccaacagcaaagatgattcagatggctcccagaaaaacaagggcgggaacaatctgctggtcatctctgtcatgcctgggagccagccctcactgaacagtgaggaaaagccagagaaagggttcgaatgtgttttttgcaactttgtctgcaagacgaagaacatgtttgagcgtcatctgcagatacacctcatcacccggatgtttgagtgtgatgtgtgccacaagttcatgaagacccccgaacagctgctggagcataagaaatgccacactgtccccaccggtgggctcaactcaggacagtgg

SEQ ID NO: 4313 - DNA, 3231 bp, Homo sapiens
  source 1..3231: mol_type = genomic DNA
atgcccaggaggaagcaggagcagcccaagcgccttccctcacatgttagtaggcaggaagaggcggagggagagctcagtgaaggagaacactggtatggaaactcttcagagactccgtcagaagcatcctatggggaagtccaggagaactataagttgtctctggaggaccggatccaggagcagtccacgtccccggacacctccttgggaagcacgactcccagcagccacacgttggagctggtggcactggacagtgaggtcctgcgagactcactgcagtgtcaagatcacctttccccgggagtgtcttctttgtgtgacgatgacccaggctccaacaagcccctgagcagcaatttgaggcggctgctggaggctggttccctcaaactcgatgctgcagccacggctaatggcagagtggagtcccccgtaaacgttggctcgaacctctccttttccccgccttcccaccacgcccagcagctcagtgttctggccaggaagttggccgagaagcaggaacagaatgaccaatacactccaagtaaccgttttatatggaatcaaggtaagtggttgccaaactcaaccaccacctgcagcttgtctccggattcagccatcctaaaactgaaagctgcagccaatgccgttctgcaggacaaatctctcaccaggactgaggagaccatgcgatttgagtccttttcctccccttttagctcccagtctgccagttctaccttggccgctttgtccaagaaggtcagtgaaagaagtttgactcctggtcaggagcaccctccaccggccagctccttcctttccctggcttctatgacctcctcagcggcccttctgaaggaggtggccgcaagggctgcgggcagtcttctggctgagaaatcatcgctgctgcctgaggaccctctaccgcccccgccttcagagaagaaaccagaaaaagtcactccgccacctccaccgccacctccaccacctccaccaccaccaccacaatccctggaattattattactcccagttcctaagggaagagtttctaaaccctccaattcagcctcagaagaggaaagtggaaagcctttccagtgtccaatatgtggtttggttattaaaaggaagagttactggaagcggcacatggtgattcacacaggtttaaaaagtcatcagtgtccgctctgtccattccggtgtgctcgcaaggacaatctcaaatcccacatgaaggttcatcagcaccaggatcggggagagacctttcagtgccagctgtgcccttttacttcctcacgccacttcagcctgaaactccacatgcgttgccatcagcacttcctgaggacagaagccaaggtgaaggaggagatcccagacccagatgtcaagggatctccccacctcagtgacagtgcctgcctggggcagcaaagggaaggaggagggacagagctagtggggaccatgatgacgtctaacactccagagaggactagccagggaggggctggcgtctcgcctttgctggtgaaggaggaacccaaggaagataacggcctgcccacctcctttactttgaatgctgccgacaggcccgccaaccacacaaagctgaaagacccctccgagtatgtggccaacagtgcgtcagcattgttcagccaggacatctctgttaagatggcgtctgattttctcatgaagctgtcagctgcaaatcagaaggagcccatgaatcttaattttaaagtgaaagaggagcctaaggaaggggagtccctaagcacgactttgcctcggtccagctatgtgttcagcccggaatctgaagtgtcagccccaggcgtctctgaggacgcactaaagccccaggaagggaagggaagtgtgctaaggcgggatgtgtcagtcaaagcagcctctgaacttctcatgaaactctcagcggaaagctacaaggaaacacagatggtgaagattaaagaggaacccatggaggttgacatccaggactcccatgtctcgatatcacccagccggaatgttggctacagcactttaatcgggcgagagaaaaccgaacccttacagaagatgccagagggcagagtacccccagagagaaacctcttcagtcaggatatctctgtgaaaatggcttccgagctcctctttcaactgtcagaaaaagtgagcaaagagcacaatcatacaaaagaaaacaccatccggaccacgaccagccctttcttttcagaagacacatttagacaatcaccattcacctccaattcaaaagaactgctgcccagtgactccgtgctgcacggaagaatatcagctccagaaacagaaaagatagtcctagaggcaggaaatggattaccatcctggaaattcaatgaccagctttttccctgtgacgtgtgtgggaaagtgtttggccgacagcagacattgtcccgacacctctcgctgcacacagaggaaagaaaatacaaatgccacttgtgcccctatgctgctaagtgccgtgcaaatctgaaccagcacttgaccgtccattccgtgaagctggtgagtacagacaccgaggacattgtcagcgccgtcacctctgaaggcagtgatgggaagaaacatccttattattacagttgtcacgtgtgtggatttgagaccgagctcaatgtccagtttgtcagccacatgtcactccacgtggacaaggagcagtggatgttttcgatctgctgcactgcctgcgacttcgtcaccatggaggaagcagagataaagactcacattggcaccaagcacacaggggaagacaggaagacccccagcgaatcaaatagcccctcttcatcctccctctcagctctgagtgattcagccaacagcaaagatgattcagatggctcccagaaaaacaagggcgggaacaatctgctggtcatctctgtcatgcctgggagccagccctcactgaacagtgaggaaaagccagagaaagggttcgaatgtgttttttgcaactttgtctgcaagacgaagaacatgtttgagcgtcatctgcagatacacctcatcacccggatgtttgagtgtgatgtgtgccacaagttcatgaagacccccgaacagctgctggagcataagaaatgccacactgtccccaccggtgggctcaag

SEQ ID NO: 4314 - DNA, 1539 bp, Homo sapiens
  source 1..1539: mol_type = genomic DNA
atgactggaaagggcttaggtgaggataccgaagaccgatggggagctggcgccttgggcccctgcgggcggagcggcctgaaaggtggaggttgtgtttgggaggccgaggcaggaggatcacgaggtcaagagatcgagaccatcctggccaacatggaaacctctctgaggtctggtcagattccaaccctggacagcagtgaacacaacctttcccctgagccactggaattggacagaatgccccattctcctctgatctccattcctcatgtgtggtgtcacccagaagaggaggaaagaatgcatgatgaacttctacaagcagtatccaaggggccggtgatgttcagggatgtttccatagacttctctcaagaggaatgggaatgcctggacgctgatcagatgaatttatacaaagaagtgatgttggagaatttcagcaacctggtttcagtgggactttccaattctaagccagctgtgatctccttattggaacaaggaaaagagccctggatggttgatagagagctgactagaggcctgtgttcagatctggaatcaatgtgtgagaccaaaatattatctctaaagaagagacatttcagtcaagtaataattacccgtgaagacatgtctacttttattcagcccacatttcttattccacctcaaaaaactatgagtgaagagaaaccatgggaatgtaagatatgtggaaagacctttaatcaaaactcacaatttatccaacatcagagaattcattttggtgaaaaacactatgaatctaaggagtatgggaagtcctttagtcgtggctcactcgttactcgacatcagaggattcacactggtaaaaaaccctatgaatgtaaggaatgtggcaaggcttttagttgtagttcatatttttctcaacatcagaggattcacactggtgagaaaccctatgaatgtaaggaatgtggaaaagcctttaagtattgctcaaaccttaatgatcatcagagaattcacactggtgagaaaccctatgaatgtaaagtatgtggaaaagcctttactaaaagttcacaactttttctacatctgagaattcatactggtgagaaaccttatgaatgtaaagaatgtgggaaagcctttactcaacactcaaggcttattcagcatcagagaatgcatactggtgagaaaccttatgaatgtaagcagtgtgggaaggcctttaatagtgcctcaacacttactaaccatcacagaattcatgctggtgagaagctctatgaatgtgaagaatgtagaaaggcctttattcagagctcagaacttattcaacatcagagaatccatacagatgaaaaaccatatgaatgtaatgaatgtgggaaggcctttaataaaggctcaaatcttactcgacatcagagaattcacactggtgagaaaccctatgactgtaaggaatgtggaaaggcttttggtagtcgctctgacctcattcgccatgagggaattcatactggt

SEQ ID NO: 4315 - DNA, 3828 bp, Homo sapiens
  source 1..3828: mol_type = genomic DNA
atgcgatccaaggcgagggcgaggaagctagccaaaagtgacggtgacgttgtaaataatatgtatgagcccaaccgggacctgctggccagccacagcgcggaggacgaggccgaggacagtgccatgtcgcccatccccgtggggccaccgtcccccttccccaccagcgaggacttcacccccaaggagggctcgccgtacgaggcccctgtctacattcctgaagacattccgatcccagcagacttcgagctccgagagtcctccatcccaggggctggcctgggggtctgggccaagaggaagatggaagccggggagaggctgggcccctgcgtggtggtgccccgggcggcggcaaaggagacagacttcggatgggagcaaatactgacggacgtggaagtgtcgccccaggaaggctgcatcacaaagatctccgaagacctgggcagtgagaagttctgcgtggatgcaaatcaggcgggggctggcagctggctcaagtacatccgtgtggcgtgctcctgcgatgaccagaacctcaccatgtgtcagatcagtgagcagatttactataaagtcattaaggacattgagccaggtgaggagctgctggtgcacgtgaaggaaggcgtctaccccctgggcacagtgccgcccggcctggacgaggagcccacgttccgctgtgacgagtgtgacgaactcttccagtccaagctggacctgcggcgccataagaagtacacgtgtggctcagtgggggctgcgctctacgagggcctggctgaggagctcaagcccgagggccttggcggtggcagcggccaagcccacgagtgcaaggactgcgagcggatgttccccaacaagtacagcctggagcagcacatggtcatccacacggaggagcgcgagtacaaatgcgaccagtgtcccaaggccttcaactggaagtccaacctcatccgccaccagatgtcccacgacagcggcaaacgcttcgaatgtgaaaactgcgtgaaggtgttcacggaccccagcaaccttcagcggcacatccgctcgcagcacgtgggcgctcgggcccacgcctgccccgactgcgggaagaccttcgccacgtcctccggcctcaagcagcacaagcatatccacagcacggtgaagcctttcatatgtgaggtctgccacaagtcctacacgcagttctccaacctgtgccggcacaagcggatgcacgccgactgccgcacgcagatcaagtgcaaggactgtggccagatgttcagcactacctcctccctcaacaagcaccggcgcttctgcgagggcaagaaccattacacgccgggcggcatctttgccccgggcctgcccttgacccccagccccatgatggacaaggcaaaaccctcccccagcctcaatcacgccagcctgggcttcaacgagtactttccctccaggccgcacccggggagcctgcccttctccacggcgcctcccacgttccccgcactcacccccggcttcccgggcatcttccctccatccttgtacccccggccgcctctgctacctcccacatcgctgctcaagagccccctgaaccacacccaggacgccaagctccccagtcccctggggaacccagccctgcccctggtctccgccgtcagcaacagcagccagggcacgacggcagctgcggggcccgaggagaagttcgagagccgcctggaggactcctgtgtggagaagctgaagaccaggagcagcgacatgtcggacggcagtgactttgaggacgtcaacaccaccacggggaccgacctggacacgaccacggggacgggctcggacctggacagcgacgtggacagcgaccctgacaaggacaagggcaagggcaagtccgccgagggccagcccaagtttgggggcggcttggcgcccccgggggccccgaacagcgtggccgaggtgcctgtcttctattcccagcactcattcttcccgccacccgacgagcagctgctgactgcaacgggcgccgccggggactccatcaaggccatcgcatccattgccgagaagtactttggccccggcttcatggggatgcaggagaagaagctgggctcgctcccctaccactcggcgttccccttccagttcctgcccaacttcccccactccctttaccccttcacggaccgagccctcgcccacaacttgctggtcaaggccgagccaaagtcaccccgggacgccctcaaggtgggcggccccagtgccgagtgcccctttgatctcaccaccaagcccaaagacgtgaagcccatcctgcccatgcccaagggcccctcggcccccgcatccggcgaggagcagccgctggacctgagcatcggcagccgggcccgtgccagccaaaacggcggcgggcgggagccccgcaagaaccacgtctatggggaacgcaagctgggcgccggcgaggggctgccccaggtgtgcccggcgcggatgccccagcagcccccgctccactacgccaagccctcgcccttcttcatggaccccatctacagcagggtagaaaagcggaaggtcacagaccccgtgggagccctgaaggagaagtacctgcggccgtccccgctgctcttccacccccagatgtcagccatagagaccatgacagagaagctggagagctttgcagccatgaaggcggactcgggcagctccctgcagcccctcccccaccaccccttcaacttccggtccccacccccaacgctctccgaccccatcctcaggaagggcaaggagcgatacacgtgcaggtactgtgggaagatcttccccagatcagccaatctcaccagacacctgaggacgcacactggggagcagccgtacaggtgtaagtactgcgaccgctccttcagcatctcttcgaacctccagcggcacgtccggaacatccacaacaaggagaagcctttcaagtgccacctgtgcaaccgctgcttcgggcagcagaccaacctggaccggcacctcaagaagcacgagcacgagaacgcaccagtgagccagcaccccggggtcctcacgaaccacctggggaccagcgcgtcctctcccacctcagagtcggacaaccacgcacttttagacgagaaagaagactcttatttctcggaaatcagaaactttattgccaatagtgagatgaaccaagcatcaacgcgaacagagaaacgggcggacatgcagatcgtggacggcagtgcccagtgtccaggcctagccagtgagaagcaggaggacgtggaggaggaggacgacgatgacctggaggaggacgatgaggacagcctggccgggaagtcgcaggatgacaccgtgtcccccgcacccgagccccaggccgcctacgaggatgaggaggatgaggagccagccgcctccctggccgtgggctttgaccacacccgaaggtgtgctgaggaccacgaaggcggtctgttagctttggagccgatgccgacttttgggaaggggctggacctccgcagagcagctgaggaagcatttgaagttaaagatgtgcttaattccaccttagattctgaggctttaaaacatacactgtgcaggcaggctaagaaccaggcatatgcaatgatgctgtccctttccgaagacactcctctccacaccccctcccagggttctctggacgcttggttgaaggtcactggagccacgtcggagtctggagcatttcaccccatcaaccacctc

SEQ ID NO: 4316 - DNA, 3534 bp, Homo sapiens
  source 1..3534: mol_type = genomic DNA
atgcgatccaaggcgagggcgaggaagctagccaaaagtgacggtgacgttgtaaataatatgtatgagcccaaccgggacctgctggccagccacagcgcggaggacgaggccgaggacagtgccatgtcgcccatccccgtggggccaccgtcccccttccccaccagcgaggacttcacccccaaggagggctcgccgtacgaggcccctgtctacattcctgaagacattccgatcccagcagacttcgagctccgagagtcctccatcccaggggctggcctgggggtctgggccaagaggaagatggaagccggggagaggctgggcccctgcgtggtggtgccccgggcggcggcaaaggagacagacttcggatgggagcaaatactgacggacgtggaagtgtcgccccaggaaggctgcatcacaaagcagatctccgaagacctgggcagtgagaagttctgcgtggatgcaaatcaggcgggggctggcagctggctcaagtacatccgtgtggcgtgctcctgcgatgaccagaacctcaccatgtgtcagatcagtgagcagatttactataaagtcattaaggacattgagccaggtgaggagctgctggtgcacgtgaaggaaggcgtctaccccctgggcacagtgccgcccggcctggacgaggagcccacgttccgctgtgacgagtgtgacgaactcttccagtccaagctggacctgcggcgccataagaagtacacgtgtggctcagtgggggctgcgctctacgagggcctggctgaggagctcaagcccgagggccttggcggtggcagcggccaagcccacgagtgcaaggactgcgagcggatgttccccaacaagtacagcctggagcagcacatggtcatccacacggaggagcgcgagtacaaatgcgaccagtgtcccaaggccttcaactggaagtccaacctcatccgccaccagatgtcccacgacagcggcaaacgcttcgaatgtgaaaactgcgtgaaggtgttcacggaccccagcaaccttcagcggcacatccgctcgcagcacgtgggcgctcgggcccacgcctgccccgactgcgggaagaccttcgccacgtcctccggcctcaagcagcacaagcatatccacagcacggtgaagcctttcatatgtgaggtctgccacaagtcctacacgcagttctccaacctgtgccggcacaagcggatgcacgccgactgccgcacgcagatcaagtgcaaggactgtggccagatgttcagcactacctcctccctcaacaagcaccggcgcttctgcgagggcaagaaccattacacgccgggcggcatctttgccccgggcctgcccttgacccccagccccatgatggacaaggcaaaaccctcccccagcctcaatcacgccagcctgggcttcaacgagtactttccctccaggccgcacccggggagcctgcccttctccacggcgcctcccacgttccccgcactcacccccggcttcccgggcatcttccctccatccttgtacccccggccgcctctgctacctcccacatcgctgctcaagagccccctgaaccacacccaggacgccaagctccccagtcccctggggaacccagccctgcccctggtctccgccgtcagcaacagcagccagggcacgacggcagctgcggggcccgaggagaagttcgagagccgcctggaggactcctgtgtggagaagctgaagaccaggagcagcgacatgtcggacggcagtgactttgaggacgtcaacaccaccacggggaccgacctggacacgaccacggggacgggctcggacctggacagcgacgtggacagcgaccctgacaaggacaagggcaagggcaagtccgccgagggccagcccaagtttgggggcggcttggcgcccccgggggccccgaacagcgtggccgaggtgcctgtcttctattcccagcactcattcttcccgccacccgacgagcagctgctgactgcaacgggcgccgccggggactccatcaaggccatcgcatccattgccgagaagtactttggccccggcttcatggggatgcaggagaagaagctgggctcgctcccctaccactcggcgttccccttccagttcctgcccaacttcccccactccctttaccccttcacggaccgagccctcgcccacaacttgctggtcaaggccgagccaaagtcaccccgggacgccctcaaggtgggcggccccagtgccgagtgcccctttgatctcaccaccaagcccaaagacgtgaagcccatcctgcccatgcccaagggcccctcggcccccgcatccggcgaggagcagccgctggacctgagcatcggcagccgggcccgtgccagccaaaacggcggcgggcgggagccccgcaagaaccacgtctatggggaacgcaagctgggcgccggcgaggggctgccccaggtgtgcccggcgcggatgccccagcagcccccgctccactacgccaagccctcgcccttcttcatggaccccatctacagcagggtagaaaagcggaaggtcacagaccccgtgggagccctgaaggagaagtacctgcggccgtccccgctgctcttccacccccagatgtcagccatagagaccatgacagagaagctggagagctttgcagccatgaaggcggactcgggcagctccctgcagcccctcccccaccaccccttcaacttccggtccccacccccaacgctctccgaccccatcctcaggaagggcaaggagcgatacacgtgcaggtactgtgggaagatcttccccagatcagccaatctcaccagacacctgaggacgcacactggggagcagccgtacaggtgtaagtactgcgaccgctccttcagcatctcttcgaacctccagcggcacgtccggaacatccacaacaaggagaagcctttcaagtgccacctgtgcaaccgctgcttcgggcagcagaccaacctggaccggcacctcaagaagcacgagcacgagaacgcaccagtgagccagcaccccggggtcctcacgaaccacctggggaccagcgcgtcctctcccacctcagagtcggacaaccacgcacttttagacgagaaagaagactcttatttctcggaaatcagaaactttattgccaatagtgagatgaaccaagcatcaacgcgaacagagaaacgggcggacatgcagatcgtggacggcagtgcccagtgtccaggcctagccagtgagaagcaggaggacgtggaggaggaggacgacgatgacctggaggaggacgatgaggacagcctggccgggaagtcgcaggatgacaccgtgtcccccgcacccgagccccaggccgcctacgaggatgaggaggatgaggagccagccgcctccctggccgtgggctttgaccacacccgaaggcatatgcaa

SEQ ID NO: 4317 - DNA, 3771 bp, Homo sapiens
  source 1..3771: mol_type = genomic DNA
atgcgatccaaggcgagggcgaggaagctagccaaaagtgacggtgacgttgtaaataatatgtatgagcccaaccgggacctgctggccagccacagcgcggaggacgaggccgaggacagtgccatgtcgcccatccccgtggggccaccgtcccccttccccaccagcgaggacttcacccccaaggagggctcgccgtacgaggcccctgtctacattcctgaagacattccgatcccagcagacttcgagctccgagagtcctccatcccaggggctggcctgggggtctgggccaagaggaagatggaagccggggagaggctgggcccctgcgtggtggtgccccgggcggcggcaaaggagacagacttcggatgggagcaaatactgacggacgtggaagtgtcgccccaggaaggctgcatcacaaagatctccgaagacctgggcagtgagaagttctgcgtggatgcaaatcaggcgggggctggcagctggctcaagtacatccgtgtggcgtgctcctgcgatgaccagaacctcaccatgtgtcagatcagtgagcagatttactataaagtcattaaggacattgagccaggtgaggagctgctggtgcacgtgaaggaaggcgtctaccccctgggcacagtgccgcccggcctggacgaggagcccacgttccgctgtgacgagtgtgacgaactcttccagtccaagctggacctgcggcgccataagaagtacacgtgtggctcagtgggggctgcgctctacgagggcctggctgaggagctcaagcccgagggccttggcggtggcagcggccaagcccacgagtgcaaggactgcgagcggatgttccccaacaagtacagcctggagcagcacatggtcatccacacggaggagcgcgagtacaaatgcgaccagtgtcccaaggccttcaactggaagtccaacctcatccgccaccagatgtcccacgacagcggcaaacgcttcgaatgtgaaaactgcgtgaaggtgttcacggaccccagcaaccttcagcggcacatccgctcgcagcacgtgggcgctcgggcccacgcctgccccgactgcgggaagaccttcgccacgtcctccggcctcaagcagcacaagcatatccacagcacggtgaagcctttcatatgtgaggtctgccacaagtcctacacgcagttctccaacctgtgccggcacaagcggatgcacgccgactgccgcacgcagatcaagtgcaaggactgtggccagatgttcagcactacctcctccctcaacaagcaccggcgcttctgcgagggcaagaaccattacacgccgggcggcatctttgccccgggcctgcccttgacccccagccccatgatggacaaggcaaaaccctcccccagcctcaatcacgccagcctgggcttcaacgagtactttccctccaggccgcacccggggagcctgcccttctccacggcgcctcccacgttccccgcactcacccccggcttcccgggcatcttccctccatccttgtacccccggccgcctctgctacctcccacatcgctgctcaagagccccctgaaccacacccaggacgccaagctccccagtcccctggggaacccagccctgcccctggtctccgccgtcagcaacagcagccagggcacgacggcagctgcggggcccgaggagaagttcgagagccgcctggaggactcctgtgtggagaagctgaagaccaggagcagcgacatgtcggacggcagtgactttgaggacgtcaacaccaccacggggaccgacctggacacgaccacggggacgggctcggacctggacagcgacgtggacagcgaccctgacaaggacaagggcaagggcaagtccgccgagggccagcccaagtttgggggcggcttggcgcccccgggggccccgaacagcgtggccgaggtgcctgtcttctattcccagcactcattcttcccgccacccgacgagcagctgctgactgcaacgggcgccgccggggactccatcaaggccatcgcatccattgccgagaagtactttggccccggcttcatggggatgcaggagaagaagctgggctcgctcccctaccactcggcgttccccttccagttcctgcccaacttcccccactccctttaccccttcacggaccgagccctcgcccacaacttgctggtcaaggccgagccaaagtcaccccgggacgccctcaaggtgggcggccccagtgccgagtgcccctttgatctcaccaccaagcccaaagacgtgaagcccatcctgcccatgcccaagggcccctcggcccccgcatccggcgaggagcagccgctggacctgagcatcggcagccgggcccgtgccagccaaaacggcggcgggcgggagccccgcaagaaccacgtctatggggaacgcaagctgggcgccggcgaggggctgccccaggtgtgcccggcgcggatgccccagcagcccccgctccactacgccaagccctcgcccttcttcatggaccccatctacagcagggtagaaaagcggaaggtcacagaccccgtgggagccctgaaggagaagtacctgcggccgtccccgctgctcttccacccccagatgtcagccatagagaccatgacagagaagctggagagctttgcagccatgaaggcggactcgggcagctccctgcagcccctcccccaccaccccttcaacttccggtccccacccccaacgctctccgaccccatcctcaggaagggcaaggagcgatacacgtgcaggtactgtgggaagatcttccccagatcagccaatctcaccagacacctgaggacgcacactggggagcagccgtacaggtgtaagtactgcgaccgctccttcagcatctcttcgaacctccagcggcacgtccggaacatccacaacaaggagaagcctttcaagtgccacctgtgcaaccgctgcttcgggcagcagaccaacctggaccggcacctcaagaagcacgagcacgagaacgcaccagtgagccagcaccccggggtcctcacgaaccacctggggaccagcgcgtcctctcccacctcagagtcggacaaccacgcacttttagacgagaaagaagactcttatttctcggaaatcagaaactttattgccaatagtgagatgaaccaagcatcaacgcgaacagagaaacgggcggacatgcagatcgtggacggcagtgcccagtgtccaggcctagccagtgagaagcaggaggacgtggaggaggaggacgacgatgacctggaggaggacgatgaggacagcctggccgggaagtcgcaggatgacaccgtgtcccccgcacccgagccccaggccgcctacgaggatgaggaggatgaggagccagccgcctccctggccgtgggctttgaccacacccgaaggtgtgctgaggaccacgaaggcggtctgttagctttggagccgatgccgacttttgggaaggggctggacctccgcagagcagctgaggaagcatttgaagttaaagatgtgcttaattccaccttagattctgaggctttaaaacatacactgtgcaggcaggctaagaaccagggttctctggacgcttggttgaaggtcactggagccacgtcggagtctggagcatttcaccccatcaaccacctc

SEQ ID NO: 4318 - DNA, 1713 bp, Homo sapiens
  source 1..1713: mol_type = genomic DNA
atggctctaccccggccaagtgaggccgtgcctcaggacaaggtgtgctacccgccggagagcagcccgcagaacctggccgcgtactacacgcctttcccgtcctatggacactacagaaacagcctggccaccgtggaggaagacttccaacctttccggcagctggaggccgcagcgtctgctgcccccgccatgccccccttccccttccggatggcgcctcccttgctgagcccgggtctgggcctacagagggagcctctctacgatctgccctggtacagcaagctgccaccgtggtacccaattccccacgtccccagggaagtgccgcccttcctgagcagcagccacgagtacgcgggtgccagcagtgaagatctgggccaccaaatcattggtggcgacaacgagagtggcccgtgttgtggacctgacactttaattccaccgccccctgcggatgcttctctgttacctgaggggctgaggacctcccagttattaccttgctcacccagcaagcagtcagaggatggtcccaaaccctccaaccaagaagggaagtcccctgctcggttccagttcacggaggaggacctgcacttcgttctgtacggggtcactcccagcctggagcacccagccagcctgcaccatgcgatttcaggcctcctggtccccccagacagctctggatctgattctcttcctcaaactctggataaagactcccttcaacttccagaaggtctatgcctcatgcagacggtgtttggtgaagtcccacattttggtgtgttctgcagtagttttatcgccaaaggagtcaggtttgggccctttcaaggtaaagtggtcaatgccagtgaagtgaagacctacggagacaattctgtgatgtgggagatctttgaagatggtcatttgagccactttatagatggaaaaggaggtacggggaactggatgtcctatgtcaactgtgcccgcttccccaaggagcagaacctagttgctgtgcagtgtcaagggcatatattttatgagagctgcaaagagatccatcagaaccaagagctccttgtgtggtatggagactgctatgagaaatttctggatattcctgtgagccttcaggtcacagagccggggaagcagccatctgggccctctgaagagtctgcagaaggctacagatgtgaaagatgtgggaaggtatttacctacaaatattacagagataagcacctcaagtacaccccctgtgtggacaagggcgataggaaatttccctgttctctctgcaaacgatcctttgagaagcgggaccggcttcggatccacattcttcatgttcatgagaagcaccggcctcacaagtgttctacatgtgggaaatgtttctctcaatcttccagcctaaacaaacacatgcgagtccactctggagacagaccataccagtgtgtgtattgtactaagaggttcacagcctccagcatactccgcacacacatcaggcagcactccggggagaagcccttcaaatgcaagtactgtggtaaatcttttgcatcccatgctgcccatgacagccatgtccggcgttcacacaaggaggatgatggctgctcatgcagcatctgtgggaaaatcttctcagatcaagaaacattctactcccacatgaagtttcatgaagactac

SEQ ID NO: 4319 - DNA, 3594 bp, Homo sapiens
  source 1..3594: mol_type = genomic DNA
atgccccgccgccgccccccggcttccggtgctgcgcagtttccggagcggatcgcaacccggagtccggatccgatcccgctctgcacattccaaaggcaggtgtcagagatggctgaagatgggagcgaagagatcatgttcatctggtgtgaagactgcagccagtaccacgactccgaatgtcccgagctgggcccagtggtcatggtcaaagactcctttgtgttaagcagggcaaggtcatcccttcctcccaacttggagatcagacgactggaagatggagccgagggggtgttcgccatcactcagctcgtcaagcggacacagttcggtccctttgagtccaggagggtcgccaaatgggaaaaggagtctgcatttcccctgaaggtgttccagaaggacgggcaccccgtgtgcttcgacacctccaacgaggatgactgcaactggatgatgctggtgcggccagcggcggaggccgagcaccagaacctgacggcctaccagcacggcagcgacgtgtacttcaccacctccagagacatccccccgggtaccgagctgcgcgtgtggtatgcggccttctatgccaagaagatggacaagcccatgctgaagcaggccggctctggcgtccacgctgcaggcaccccagaaaacagcgcccccgtggagtcggagcccagccagtgggcgtgtaaagtgtgttctgccaccttcctggagctgcagctcctcaatgaacatctgttgggccacttagaacaagccaaaagccttcctccaggcagccaaagcgaggcagcagctcccgagaaggagcaggacacaccccggggggaaccccctgcagtgcccgagagcgagaatgttgccaccaaagaacagaagaaaaagcctcgaagggggagaaaacccaaagtgtccaaagctgagcagcctctagtcatcgtggaagacaaggaacccacagagcaagtggcagagatcattaccgaggtccctccggatgagcctgtgagtgcaacgccagatgagcggatcatggagctggttctggggaagctggccaccaccaccactgacaccagctcggttccaaagttcacccatcatcagaataacaccatcacgctcaagaggagcttaattctctcaagcagacacggcatccggcgcaagctcatcaaacagctcggggagcacaagcgggtttaccagtgcaatatctgcagcaagatcttccagaacagcagcaacctgagcaggcacgtgcgctcgcatggtgacaagctgtttaagtgcgaagagtgtgcaaaattgttcagccgcaaagagagcctaaagcagcacgtttcctacaagcacagcaggaacgaggtggacggcgagtacaggtaccgctgcggcacttgtgagaagaccttccgcatcgagagcgcgctggagttccacaactgcaggacaggactcatagcacaccctggagagggggggcccggcggcagtcggcttagagacctaccagatgacaagacgttccaatgtgagatgtgtttcagattcttctccaccaacagcaacctctccaagcacaagaagaagcacggcgacaagaagtttgcctgtgaggtctgcagcaagatgttctaccgcaaggacgtcatgctggaccaccagcgccggcacctggaaggagtgcggcgagtgaagcgagaggacctggaggccggtggggagaacctggtccgttacaagaaggagccttccgggtgcccggtgtgtggcaaggtgttctcctgccggagcaatatgaacaagcacctgctcacccacggcgacaagaagtacacctgcgagatctgcgggcgcaagttcttccgcgtggatgtgctcagggaccacatccatgtccacttcaaggacatcgcgttgatggatgaccaccagagggaagagtttatcggcaagatcgggatctcctcggaagaaaacgatgacaattctgacgagagcgcagactcggagcctcacaagtacagctgcaagcggtgccagctcaccttcggccgggggaaggagtacctgaagcacatcatggaggtgcacaaggagaagggctatggctgcagcatctgcaaccggcgctttgcactgaaggccacctaccacgcccacatggtcatccaccgtgaaaacctgccggaccccaacgtgcagaagtacatccacccctgcgagatctgcgggcggatcttcaacagcatcgggaacctggagcgccacaagctcatccacacaggtgtgaagagccacgcctgcgagcagtgtgggaagtcctttgccaggaaggacatgctgaaggagcacatgcgtgtgcacgacaatgtccgcgagtacctgtgtgccgagtgtgggaaaggcatgaagaccaagcacgcgctgcgccaccacatgaagctgcacaagggcatcaaggagtacgagtgcaaggagtgccaccgcaggttcgcgcagaaggtcaacatgctcaagcactgcaagcggcacacggggattaaagatttcatgtgtgaattgtgtgggaagacattcagcgagaggaacaccatggagacccacaagctcatccacacagtgggcaagcagtggacgtgctccgtgtgcgacaagaagtacgtgaccgagtacatgctgcagaagcacgttcagctcacacacgacaaggtggaggcgcagagctgccagctgtgcgggaccaaggtgtccaccagggcctccatgagccgacacatgcggcgcaagcaccccgaggtgctcgcggtgaggatcgatgacctggaccacctcccggagaccaccaccatcgacgcctcctccattggcatcgtccagcctgagctgactctggagcaggaggatttggccgaagggaagcacgggaaagctgccaagcgaagtcacaagagaaagcagaagccagaagaggaggcgggtgctccggtgcccgaggacgccaccttcagcgaatactcagagaaagagacggagttcacaggcagtgtaggcgacgagaccaattccgcagtacagagcattcagcaggtagtggtgaccctgggtgacccaaatgtgaccacaccatcgagctcagtcggcttaaccaacatcaccgtgacccccatcaccactgcggccgcgactcagtttaccaatctccagccggtggccgtggggcaccttaccacccctgaacgccagttacagctggacaactcaatcctgaccgtgacctttgataccgtcagcggctctgccatgttgcacaaccgccaaaatgacgtccagatccacccccagccggaagcctcgaacccacagtctgtggcccatttcatcaacctgacgaccctggtcaactccatcacgcccctggggagccagcttagtgaccagcacccgctcacgtggcgggcagtgccccagactgacgtcttgccaccctcgcagccgcaggcacccccacagcaggcggcccagccccaggtgcaggcggagcagcagcagcagcagatgtacagctac

SEQ ID NO: 4320 - DNA, 3534 bp, Homo sapiens
  source 1..3534: mol_type = genomic DNA
atgccccgccgccgccccccggcttccggtgctgcgcagtttccggagcggatcgcaacccggagtccggatccgatcccgctctgcacattccaaaggcaggtgtcagagatggctgaagatgggagcgaagagatcatgttcatctggtgtgaagactgcagccagtaccacgactccgaatgtcccgagctgggcccagtggtcatggtcaaagactcctttgtgttaagcagggcaaggtcatcccttcctcccaacttggagatcagacgactggaagatggagccgagggggtgttcgccatcactcagctcgtcaagcggacacagttcggtccctttgagtccaggagggtcgccaaatgggaaaaggagtctgcatttcccctgaaggtgttccagaaggacgggcaccccgtgtgcttcgacacctccaacgaggatgactgcaactggatgatgctggtgcggccagcggcggaggccgagcaccagaacctgacggcctaccagcacggcagcgacgtgtacttcaccacctccagagacatccccccgggtaccgagctgcgcgtgtggtatgcggccttctatgccaagaagatggacaagcccatgctgaagcaggccggctctggcgtccacgctgcaggcaccccagaaaacagcgcccccgtggagtcggagcccagccagtgggcgtgtaaagtgtgttctgccaccttcctggagctgcagctcctcaatgaacatctgttgggccacttagaacaagccaaaagccttcctccaggcagccaaagcgaggcagcagctcccgagaaggagcaggacacaccccggggggaaccccctgcagtgcccgagagcgagaatgttgccaccaaagaacagaagaaaaagcctcgaagggggagaaaacccaaagtgtccaaagctgagcagcctctagtcatcgtggaagacaaggaacccacagagcaagtggcagagatcattaccgaggtccctccggatgagcctgtgagtgcaacgccagatgagcggatcatggagctggttctggggaagctggccaccaccaccactgacaccagctcggttccaaagttcacccatcatcagaataacaccatcacgctcaagaggagcttaattctctcaagcagacacggcatccggcgcaagctcatcaaacagctcggggagcacaagcgggtttaccagtgcaatatctgcagcaagatcttccagaacagcagcaacctgagcaggcacgtgcgctcgcatggtgacaagctgtttaagtgcgaagagtgtgcaaaattgttcagccgcaaagagagcctaaagcagcacgtttcctacaagcacagcaggaacgaggtggacggcgagtacaggtaccgctgcggcacttgtgagaagaccttccgcatcgagagcgcgctggagttccacaactgcaggacagatgacaagacgttccaatgtgagatgtgtttcagattcttctccaccaacagcaacctctccaagcacaagaagaagcacggcgacaagaagtttgcctgtgaggtctgcagcaagatgttctaccgcaaggacgtcatgctggaccaccagcgccggcacctggaaggagtgcggcgagtgaagcgagaggacctggaggccggtggggagaacctggtccgttacaagaaggagccttccgggtgcccggtgtgtggcaaggtgttctcctgccggagcaatatgaacaagcacctgctcacccacggcgacaagaagtacacctgcgagatctgcgggcgcaagttcttccgcgtggatgtgctcagggaccacatccatgtccacttcaaggacatcgcgttgatggatgaccaccagagggaagagtttatcggcaagatcgggatctcctcggaagaaaacgatgacaattctgacgagagcgcagactcggagcctcacaagtacagctgcaagcggtgccagctcaccttcggccgggggaaggagtacctgaagcacatcatggaggtgcacaaggagaagggctatggctgcagcatctgcaaccggcgctttgcactgaaggccacctaccacgcccacatggtcatccaccgtgaaaacctgccggaccccaacgtgcagaagtacatccacccctgcgagatctgcgggcggatcttcaacagcatcgggaacctggagcgccacaagctcatccacacaggtgtgaagagccacgcctgcgagcagtgtgggaagtcctttgccaggaaggacatgctgaaggagcacatgcgtgtgcacgacaatgtccgcgagtacctgtgtgccgagtgtgggaaaggcatgaagaccaagcacgcgctgcgccaccacatgaagctgcacaagggcatcaaggagtacgagtgcaaggagtgccaccgcaggttcgcgcagaaggtcaacatgctcaagcactgcaagcggcacacggggattaaagatttcatgtgtgaattgtgtgggaagacattcagcgagaggaacaccatggagacccacaagctcatccacacagtgggcaagcagtggacgtgctccgtgtgcgacaagaagtacgtgaccgagtacatgctgcagaagcacgttcagctcacacacgacaaggtggaggcgcagagctgccagctgtgcgggaccaaggtgtccaccagggcctccatgagccgacacatgcggcgcaagcaccccgaggtgctcgcggtgaggatcgatgacctggaccacctcccggagaccaccaccatcgacgcctcctccattggcatcgtccagcctgagctgactctggagcaggaggatttggccgaagggaagcacgggaaagctgccaagcgaagtcacaagagaaagcagaagccagaagaggaggcgggtgctccggtgcccgaggacgccaccttcagcgaatactcagagaaagagacggagttcacaggcagtgtaggcgacgagaccaattccgcagtacagagcattcagcaggtagtggtgaccctgggtgacccaaatgtgaccacaccatcgagctcagtcggcttaaccaacatcaccgtgacccccatcaccactgcggccgcgactcagtttaccaatctccagccggtggccgtggggcaccttaccacccctgaacgccagttacagctggacaactcaatcctgaccgtgacctttgataccgtcagcggctctgccatgttgcacaaccgccaaaatgacgtccagatccacccccagccggaagcctcgaacccacagtctgtggcccatttcatcaacctgacgaccctggtcaactccatcacgcccctggggagccagcttagtgaccagcacccgctcacgtggcgggcagtgccccagactgacgtcttgccaccctcgcagccgcaggcacccccacagcaggcggcccagccccaggtgcaggcggagcagcagcagcagcagatgtacagctac

SEQ ID NO: 4321 - DNA, 4521 bp, Homo sapiens
  source 1..4521: mol_type = genomic DNA
atgccccgccgccgccccccggcttccggtgctgcgcagtttccggagcggatcgcaacccggagtccggatccgatcccgctctgcacattccaaaggcagccgcgcgccgccccggtccagccgccatgccgactgttctttgttacattcgccggctgcgggcaccgttggcgatcggagtcaaaacccggctggatttcccggagccgctccgggatcgccctgcgcgccgcccgcccgccggggtcttcgccgccccggcccgcggccccgcggcccccgccgccgggcggcgtcgtcgccgaggccccaggggatgtcgttatcccccgccctcgggtacagcccatgcgggtcgcacgggggggtccctggacccccaaccccgcgtttagagaagctgagtcctggtcccagattgggaaccagagggtcagtgagcagctcttggaaacatctctagggaatgaggtgtccgacactgagccactgagccctgcgagtgcaggcctgcgacgcaatcctgccctacctcctggaccctttgcacaaaacttttcctgggggaaccaggaaaatctgcccccagccctggggaagattgcgaacggaggaggaactggggcaggcaaggccgaatgcggctatgaaactgagtcacacttgctagagccgcacgagatacctttgaacgtgaatacacacaagttcagtgactgtgagtttccatatgagttttgcacggtctgcttttcacccttcaagctgctggggatgagcggggtggagggcgtgtggaatcagcattcaagaagtgccagcatgcacactttcctaaaccactcagcaacgggcatcagagaagcaggttgcaggaaggacatgccggtgtcagagatggctgaagatgggagcgaagagatcatgttcatctggtgtgaagactgcagccagtaccacgactccgaatgtcccgagctgggcccagtggtcatggtcaaagactcctttgtgttaagcagggcaaggtcttggcctgccagcggacacgtgcacacccaggcggggcaggggatgcggggttatgaggacagggacagggctgacccacagcagcttccagaagcagtccctgcaggcctggtgaggcggctcagtgggcagcagctgccctgccgttccaccctcacctgggggaggctgtgccacctggtggcccagggcaggtcatcccttcctcccaacttggagatcagacgactggaagatggagccgagggggtgttcgccatcactcagctcgtcaagcggacacagttcggtccctttgagtccaggagggtcgccaaatgggaaaaggagtctgcatttcccctgaaggtgttccagaaggacgggcaccccgtgtgcttcgacacctccaacgaggatgactgcaactggatgatgctggtgcggccagcggcggaggccgagcaccagaacctgacggcctaccagcacggcagcgacgtgtacttcaccacctccagagacatccccccgggtaccgagctgcgcgtgtggtatgcggccttctatgccaagaagatggacaagcccatgctgaagcaggccggctctggcgtccacgctgcaggcaccccagaaaacagcgcccccgtggagtcggagcccagccagtgggcgtgtaaagtgtgttctgccaccttcctggagctgcagctcctcaatgaacatctgttgggccacttagaacaagccaaaagccttcctccaggcagccaaagcgaggcagcagctcccgagaaggagcaggacacaccccggggggaaccccctgcagtgcccgagagcgagaatgttgccaccaaagaacagaagaaaaagcctcgaagggggagaaaacccaaagtgtccaaagctgagcagcctctagtcatcgtggaagacaaggaacccacagagcaagtggcagagatcattaccgaggtccctccggatgagcctgtgagtgcaacgccagatgagcggatcatggagctggttctggggaagctggccaccaccaccactgacaccagctcggttccaaagttcacccatcatcagaataacaccatcacgctcaagaggagcttaattctctcaagcagacacggcatccggcgcaagctcatcaaacagctcggggagcacaagcgggtttaccagtgcaatatctgcagcaagatcttccagaacagcagcaacctgagcaggcacgtgcgctcgcatggtgacaagctgtttaagtgcgaagagtgtgcaaaattgttcagccgcaaagagagcctaaagcagcacgtttcctacaagcacagcaggaacgaggtggacggcgagtacaggtaccgctgcggcacttgtgagaagaccttccgcatcgagagcgcgctggagttccacaactgcaggacagatgacaagacgttccaatgtgagatgtgtttcagattcttctccaccaacagcaacctctccaagcacaagaagaagcacggcgacaagaagtttgcctgtgaggtctgcagcaagatgttctaccgcaaggacgtcatgctggaccaccagcgccggcacctggaaggagtgcggcgagtgaagcgagaggacctggaggccggtggggagaacctggtccgttacaagaaggagccttccgggtgcccggtgtgtggcaaggtgttctcctgccggagcaatatgaacaagcacctgctcacccacggcgacaagaagtacacctgcgagatctgcgggcgcaagttcttccgcgtggatgtgctcagggaccacatccatgtccacttcaaggacatcgcgttgatggatgaccaccagagggaagagtttatcggcaagatcgggatctcctcggaagaaaacgatgacaattctgacgagagcgcagactcggagcctcacaagtacagctgcaagcggtgccagctcaccttcggccgggggaaggagtacctgaagcacatcatggaggtgcacaaggagaagggctatggctgcagcatctgcaaccggcgctttgcactgaaggccacctaccacgcccacatggtcatccaccgtgaaaacctgccggaccccaacgtgcagaagtacatccacccctgcgagatctgcgggcggatcttcaacagcatcgggaacctggagcgccacaagctcatccacacaggtgtgaagagccacgcctgcgagcagtgtgggaagtcctttgccaggaaggacatgctgaaggagcacatgcgtgtgcacgacaatgtccgcgagtacctgtgtgccgagtgtgggaaaggcatgaagaccaagcacgcgctgcgccaccacatgaagctgcacaagggcatcaaggagtacgagtgcaaggagtgccaccgcaggttcgcgcagaaggtcaacatgctcaagcactgcaagcggcacacggggattaaagatttcatgtgtgaattgtgtgggaagacattcagcgagaggaacaccatggagacccacaagctcatccacacagtgggcaagcagtggacgtgctccgtgtgcgacaagaagtacgtgaccgagtacatgctgcagaagcacgttcagctcacacacgacaaggtggaggcgcagagctgccagctgtgcgggaccaaggtgtccaccagggcctccatgagccgacacatgcggcgcaagcaccccgaggtgctcgcggtgaggatcgatgacctggaccacctcccggagaccaccaccatcgacgcctcctccattggcatcgtccagcctgagctgactctggagcaggaggatttggccgaagggaagcacgggaaagctgccaagcgaagtcacaagagaaagcagaagccagaagaggaggcgggtgctccggtgcccgaggacgccaccttcagcgaatactcagagaaagagacggagttcacaggcagtgtaggcgacgagaccaattccgcagtacagagcattcagcaggtagtggtgaccctgggtgacccaaatgtgaccacaccatcgagctcagtcggcttaaccaacatcaccgtgacccccatcaccactgcggccgcgactcagtttaccaatctccagccggtggccgtggggcaccttaccacccctgaacgccagttacagctggacaactcaatcctgaccgtgacctttgataccgtcagcggctctgccatgttgcacaaccgccaaaatgacgtccagatccacccccagccggaagcctcgaacccacagtctgtggcccatttcatcaacctgacgaccctggtcaactccatcacgcccctggggagccagcttagtgaccagcacccgctcacgtggcgggcagtgccccagactgacgtcttgccaccctcgcagccgcaggcacccccacagcaggcggcccagccccaggtgcaggcggagcagcagcagcagcagatgtacagctac

SEQ ID NO: 4322 - DNA, 3423 bp, Homo sapiens
  source 1..3423: mol_type = genomic DNA
atggctgaagatgggagcgaagagatcatgttcatctggtgtgaagactgcagccagtaccacgactccgaatgtcccgagctgggcccagtggtcatggtcaaagactcctttgtgttaagcagggcaaggtcatcccttcctcccaacttggagatcagacgactggaagatggagccgagggggtgttcgccatcactcagctcgtcaagcggacacagttcggtccctttgagtccaggagggtcgccaaatgggaaaaggagtctgcatttcccctgaaggtgttccagaaggacgggcaccccgtgtgcttcgacacctccaacgaggatgactgcaactggatgatgctggtgcggccagcggcggaggccgagcaccagaacctgacggcctaccagcacggcagcgacgtgtacttcaccacctccagagacatccccccgggtaccgagctgcgcgtgtggtatgcggccttctatgccaagaagatggacaagcccatgctgaagcaggccggctctggcgtccacgctgcaggcaccccagaaaacagcgcccccgtggagtcggagcccagccagtgggcgtgtaaagtgtgttctgccaccttcctggagctgcagctcctcaatgaacatctgttgggccacttagaacaagccaaaagccttcctccaggcagccaaagcgaggcagcagctcccgagaaggagcaggacacaccccggggggaaccccctgcagtgcccgagagcgagaatgttgccaccaaagaacagaagaaaaagcctcgaagggggagaaaacccaaagtgtccaaagctgagcagcctctagtcatcgtggaagacaaggaacccacagagcaagtggcagagatcattaccgaggtccctccggatgagcctgtgagtgcaacgccagatgagcggatcatggagctggttctggggaagctggccaccaccaccactgacaccagctcggttccaaagttcacccatcatcagaataacaccatcacgctcaagaggagcttaattctctcaagcagacacggcatccggcgcaagctcatcaaacagctcggggagcacaagcgggtttaccagtgcaatatctgcagcaagatcttccagaacagcagcaacctgagcaggcacgtgcgctcgcatggtgacaagctgtttaagtgcgaagagtgtgcaaaattgttcagccgcaaagagagcctaaagcagcacgtttcctacaagcacagcaggaacgaggtggacggcgagtacaggtaccgctgcggcacttgtgagaagaccttccgcatcgagagcgcgctggagttccacaactgcaggacagatgacaagacgttccaatgtgagatgtgtttcagattcttctccaccaacagcaacctctccaagcacaagaagaagcacggcgacaagaagtttgcctgtgaggtctgcagcaagatgttctaccgcaaggacgtcatgctggaccaccagcgccggcacctggaaggagtgcggcgagtgaagcgagaggacctggaggccggtggggagaacctggtccgttacaagaaggagccttccgggtgcccggtgtgtggcaaggtgttctcctgccggagcaatatgaacaagcacctgctcacccacggcgacaagaagtacacctgcgagatctgcgggcgcaagttcttccgcgtggatgtgctcagggaccacatccatgtccacttcaaggacatcgcgttgatggatgaccaccagagggaagagtttatcggcaagatcgggatctcctcggaagaaaacgatgacaattctgacgagagcgcagactcggagcctcacaagtacagctgcaagcggtgccagctcaccttcggccgggggaaggagtacctgaagcacatcatggaggtgcacaaggagaagggctatggctgcagcatctgcaaccggcgctttgcactgaaggccacctaccacgcccacatggtcatccaccgtgaaaacctgccggaccccaacgtgcagaagtacatccacccctgcgagatctgcgggcggatcttcaacagcatcgggaacctggagcgccacaagctcatccacacaggtgtgaagagccacgcctgcgagcagtgtgggaagtcctttgccaggaaggacatgctgaaggagcacatgcgtgtgcacgacaatgtccgcgagtacctgtgtgccgagtgtgggaaaggcatgaagaccaagcacgcgctgcgccaccacatgaagctgcacaagggcatcaaggagtacgagtgcaaggagtgccaccgcaggttcgcgcagaaggtcaacatgctcaagcactgcaagcggcacacggggattaaagatttcatgtgtgaattgtgtgggaagacattcagcgagaggaacaccatggagacccacaagctcatccacacagtgggcaagcagtggacgtgctccgtgtgcgacaagaagtacgtgaccgagtacatgctgcagaagcacgttcagctcacacacgacaaggtggaggcgcagagctgccagctgtgcgggaccaaggtgtccaccagggcctccatgagccgacacatgcggcgcaagcaccccgaggtgctcgcggtgaggatcgatgacctggaccacctcccggagaccaccaccatcgacgcctcctccattggcatcgtccagcctgagctgactctggagcaggaggatttggccgaagggaagcacgggaaagctgccaagcgaagtcacaagagaaagcagaagccagaagaggaggcgggtgctccggtgcccgaggacgccaccttcagcgaatactcagagaaagagacggagttcacaggcagtgtaggcgacgagaccaattccgcagtacagagcattcagcaggtagtggtgaccctgggtgacccaaatgtgaccacaccatcgagctcagtcggcttaaccaacatcaccgtgacccccatcaccactgcggccgcgactcagtttaccaatctccagccggtggccgtggggcaccttaccacccctgaacgccagttacagctggacaactcaatcctgaccgtgacctttgataccgtcagcggctctgccatgttgcacaaccgccaaaatgacgtccagatccacccccagccggaagcctcgaacccacagtctgtggcccatttcatcaacctgacgaccctggtcaactccatcacgcccctggggagccagcttagtgaccagcacccgctcacgtggcgggcagtgccccagactgacgtcttgccaccctcgcagccgcaggcacccccacagcaggcggcccagccccaggtgcaggcggagcagcagcagcagcagatgtacagctac

SEQ ID NO: 4323 - DNA, 1101 bp, Homo sapiens
  source 1..1101: mol_type = genomic DNA
atgatgggctccgtgctcccggctgaggccctggtgctcaagaccgggctgaaggcgccgggactggcgctggccgaggttatcacctccgacatcctgcacagcttcctgtacggccgctggcgcaacgtgctcggggagcagctcttcgaggacaagagccaccacgccagccccaagacagccttcaccgccgaggtgctggcgcagtccttctccggcgaagtgcagaagctgtccagcctggtgctgcctgcggaggtgatcatcgctcagagctccatccctggcgagggcctcggcatcttctccaagacgtggatcaaggcgggaaccgagatgggccccttcaccggccgcgtgatcgccccggagcacgtggacatctgcaagaacaacaacctcatgtgggaggtgttcaatgaggatggcacggtgcgctacttcatcgatgccagccaggaggaccaccggagctggatgacctacatcaagtgtgcacgtaacgaacaggagcagaacctggaggtggtccagatcggcaccagcatcttctacaaggccattgagatgatcccacctgaccaggaactgctggtgtggtacggaaactcacacaacaccttcctggggatcccaggtgtgcccgggctagaggaggaccagaaaaagaacaagcatgaggacttccacccggcggactcggcggctggccccgcgggccgcatgcgatgcgtcatctgccaccgcggcttcaactcgcgcagcaacctgcgctcgcacatgcgcatccacacgctggacaagcccttcgtgtgccgcttctgcaaccgccgcttcagccagtcgtccacgctgcgcaaccacgtgcgcctgcacacgggcgagcgcccctacaagtgccaggtgtgccagagcgcctactcgcagctggccggcctgcgcgcccaccagaagagcgcgcggcaccggccgcccagcaccgcgctgcaggcacactcgcccgcgctgcccgccccgcacgcgcacgcgcccgcgctcgccgccgccgccgccgccgccgccgccgccgccgcgcaccacctgccggccatggtgctg

SEQ ID NO: 4324 - DNA, 2121 bp, Homo sapiens
  source 1..2121: mol_type = genomic DNA
atgcacggagccgccagagcgccagccaccagcgtgagtgccgactgctgcatcccggccggcttgcgcctcggaccggtgcctggtaccttcaagctgggcaagtacctgtcagaccgcagggagcccgggcctaagaaaaaggtgcgcatggtgagaggggagctggtggacgagtcggggggctcccctctggagtggatagggttaatccgggcagccagaaactcccaggaacagactctggaagctattgcagacttacccggaggacagatcttctaccgagcattgcgagacgtccagccaggggaggagctgacagtgtggtattctaactccttggctcagtggttcgacatccccaccacagcgactccgactcacgacgagaaaggggaggagcgctacatctgctggtactgctggaggacgtttagataccccaacagccttaaggcacacctgcgtttccactgcgtgttcagcggcggtggaggcggcgccttcctgcaccacgaacacgcggctcgccaaggcgccgtcccagcggctgatggcctcggtctctccccaaaacccccggcgcccgatttcgccgcgccttcccaggcaggaactttgcgaccccaccccctgggcccgccaccagttcaggcctgcggtgcgcgggagggcatcaagcgcgaggcctcttccgcgccctcggccacctcgccgaccccaggcaagtgggggcagcccaagaagggcaaggagcagctggaccgtgccctggacatgagcggagccgcccgaggacaagggcacttcctcggcatcgtgggcggctcctcggcgggggtcggcagcctggctttctaccccggcgtgcgctcagctttcaagcccgccggcctagcgagggcggcggcggccgctcacggcgacccctaccgggaggagagcagcagcaagcaaggagccggcctcgctttgggcaggctgctgggcgggggccgggcgtgcgggcgccccgggagcggggagaactcggcggcgggcggcgcgggtcaccaccatcaccaccacgcgcaccaccaccaccatcccaagtgcctgctcgctggggacccgccgccgccgccgccgcctggcctgccctgctctggggccctgcgcggcttccctctgctctccgtccccccggaagaggcgtccgccttcaagcacgtggagcgcgccccgcccgcagccgccgcgctgccaggagcgcgttatgcgcagctgccccctgcgccggggttgcccctcgagcgctgcgcgctgccgcccctcgacccgggcggtctcaaagcctatccgggtggtgagtgcagccacctgcccgccgtcatgccggcctttacagtctacaacggggagctgctctacggctcaccggccaccaccgcttattacccgctcaaattgcacttcggcgggctgctgaagtatccggagtccatctcctacttcagcgggcctgcagcggccgccctaagccccgccgagctggggtcgctggccagcatcgaccgagagatcgccatgcacaatcagcagctgtccgagatggctgccgggaagggtcgcggacgcctggactcggggacgttgccaccggccgtcgcggcggcgggaggcaccgggggcggcggcagcggaggcagcggcgcaggtaagcccaagaccggccacctgtgcctctactgtggcaagctgtactcgcgcaagtatgggctcaagatccacatgcggacgcacacgggctacaagccactcaagtgcaaagtctgtctgcggcccttcggcgaccccagcaatctcaacaagcacatccggctgcacgccgagggcaatacgccctaccgctgcgagttctgcggcaaggtacttgtgcgccgccgggacctggagcgacatgtcaagtcccgccaccctggccagagtctgctcgccaaagcgggcgacggcccgggtgccgagcccggctatcccccggagcctggggatcccaagagcgacgacagtgacgtggacgtctgcttcacagacgaccagagcgaccccgaggttgggggcggcggggagcgcgacttg

SEQ ID NO: 4325 - DNA, 3480 bp, Homo sapiens
  source 1..3480: mol_type = genomic DNA
atggattccaaagatgaaagctcgcatgtgtggccgacatctgcagagcatgaacagaatgccgcacaggtgcactttgttccggacacaggaacagtggctcagattgtctataccgatgaccaggttcgccccccacagcaggtggtgtacacggcagatggtgcctcctacacatcagtggatggtccagagcacacgctggtgtacatccacccggtggaagctgcacagactctgtttacagaccccggccaggtagcttatgtccaacaggatgctacagctcagcaggcctcattgccagttcataaccaggtgctgccttccatcgagagtgtagatgggtccgaccctttggcaactctgcagacccctctaggcagactggaggccaaagaggaagaggatgaggatgaggacgaggacactgaggaagatgaggaagaagacggtgaggacacggatctggatgactgggagccagacccgccccggcccttcgacccacacgacttgtggtgtgaggagtgcaataacgcgcatgcttcagtgtgtccgaagcacggccccttgcacccgatccccaaccggccggtgctcacccgggccagggcgagcctccccctggtgctctacatagacaggtttctgggcggggtgttctccaagcggcgcatccccaagcgcacccagtttggccccgtggaggggcctctcgtcaggggctcggagctgaaagactgttacattcacctcaaggtttctcttgataaaggggacaggaaagaaagggatttacatgaagacctatggtttgagttgtctgatgagacgctttgtaactggatgatgtttgtacggccagcccagaatcacctggagcagaacctggtggcttaccagtatggccaccatgtgtattatacaaccataaaaaatgtggagcccaagcaggaactgaaggtgtggtatgccgcatcctatgctgagttcgtgaaccagaaaattcatgacatttctgaggaagaaaggaaagttcttcgagagcaagagaagaattggccctgctatgaatgtaaccgccgatttataagctcggagcagttgcaacagcatctcaattctcatgatgagaaactagatgtgtttagcagaacaagaggcagaggaaggggacgaggcaagaggcgattcggtccaggtcgacggccggggcgtcctccaaaatttatccgcctggaaatcaccagcgaaaatggggaaaagagtgacgatgggacacaggacttgctacattttcccacaaaggagcaatttgatgaggctgaaccagccactctgaatgggctggatcaaccagaacagaccactatcccaatccctcagctgccacaggaaacccagtcttccctggaacatgaaccagaaactcacaccctgcacctgcagccgcagcatgaagagagcgtggtgcccacccagagcacgctgacagccgacgacatgcgcagagccaagcgcatccgattggagctgcagaatgcagctcttcagcatctgtttattcggaagtccttccggccttttaaatgcttgcagtgtgggaaggccttccgggaaaaggacaaactggaccagcacttacgcttccatgggcgggaggggaactgcccactgacctgtgatctctgtaacaagggcttcatcagcagcacatccttggagagccacatgaagctccactcagaccagaagacttactcttgcattttttgcccagaatcctttgaccgccttgatttgttgaaagatcatgtggccattcatatcaatgatggctacttcacctgcccaacttgtaagaaacggttcccagattttatccaggtgaaaaaacacgtgcgcagcttccactcagaaaagatctaccagtgcacagagtgtgacaaggccttctgtcgccccgataaactgcgactccacatgctccggcattcggaccgcaaagacttcctgtgttccacctgtgggaagcaatttaagcgaaaagacaaactacgggaacacatgcagaggatgcataatcctgagagggaggccaagaaagccgaccgcatcagccgctccaagacgttcaagccccgcatcacgtccacagactacgacagcttcacgttcaagtgccgcctgtgcatgatgggcttccggcggcgcggcatgctggtaaatcacttatcgaagagacacccagacatgaagatagaagaggtgccagagttaactctacccatcataaaacccaatcgtgattacttttgtcagtattgcgataaggtttataaaagtgccagcaagcgcaaagcccacattctgaagaaccacccaggagcagagctcccaccgagcattcggaagctccgacccgctggtcctggagagccagaccccatgctgagcacacacacccagctgacgggcaccatcgccacccctcccgtctgctgtccccactgctccaagcagtacagcagcaagaccaagatggtccagcacattcgaaagaagcatccagagttcgcccagctctccaacaccatacacacaccactgacgacagctgtgatcagtgccaccccagcggttttgactacagacagcgccactggagagactgtggtgacgacggacctgctcacccaagcaatgacagaactgtcccagaccttaacgacagactaccgaacgccacaaggggattaccagagaattcagtacatccctgtgtcgcagtcggcgtctggcctccagcagcctcagcacatacagctgcaagtggttcaagtggcctcggccacttcccctcaccagtcacagcagtccactgtggatgttggccagctccatgatcctcagccctacccccagcacgccatccaggtgcagcacatccaggtcagcgagcctaccgcctcggccccgtcctccgcccaggtatctgggcagccgttgagtccctcagcccagcaggctcagcaggggctcagcccctcccacatccagggcagttcttccacacaggggcaggctctgcagcagcagcagcagcagcagcagaattcctctgtgcagcacacgtacctgcccagtgcttggaattccttccgtggctattcatctgagattcaaatgatgacgcttcctccgggtcagtttgtgattacagacagtggtgtggcaactccagttactactggccaggtgaaggcggttacttcgggtcattatgtgttatcagaaagtcaatcagaattggaagaaaagcaaacttctgccctctctggtggagtccaggtcgagccacctgcacacagtgactccctggacccccagaccaacagccaacagcagaccacacagtacatcatcaccaccaccaccaacgggaacggaagcagcgaagtgcatatcaccaaacca

SEQ ID NO: 4326 - DNA, 3183 bp, Homo sapiens
  source 1..3183: mol_type = genomic DNA
atgtctgcttactctgtgccttcaacttttgcccaggcctcattgccagttcataaccaggtgctgccttccatcgagagtgtagatgggtccgaccctttggcaactctgcagacccctctaggcagactggaggccaaagaggaagaggatgaggatgaggacgaggacactgaggaagatgaggaagaagacggtgaggacacggatctggatgactgggagccagacccgccccggcccttcgacccacacgacttgtggtgtgaggagtgcaataacgcgcatgcttcagtgtgtccgaagcacggccccttgcacccgatccccaaccggccggtgctcacccgggccagggcgagcctccccctggtgctctacatagacaggtttctgggcggggtgttctccaagcggcgcatccccaagcgcacccagtttggccccgtggaggggcctctcgtcaggggctcggagctgaaagactgttacattcacctcaaggtttctcttgataaaggggacaggaaagaaagggatttacatgaagacctatggtttgagttgtctgatgagacgctttgtaactggatgatgtttgtacggccagcccagaatcacctggagcagaacctggtggcttaccagtatggccaccatgtgtattatacaaccataaaaaatgtggagcccaagcaggaactgaaggtgtggtatgccgcatcctatgctgagttcgtgaaccagaaaattcatgacatttctgaggaagaaaggaaagttcttcgagagcaagagaagaattggccctgctatgaatgtaaccgccgatttataagctcggagcagttgcaacagcatctcaattctcatgatgagaaactagatgtgtttagcagaacaagaggcagaggaaggggacgaggcaagaggcgattcggtccaggtcgacggccggggcgtcctccaaaatttatccgcctggaaatcaccagcgaaaatggggaaaagagtgacgatgggacacaggacttgctacattttcccacaaaggagcaatttgatgaggctgaaccagccactctgaatgggctggatcaaccagaacagaccactatcccaatccctcagctgccacaggaaacccagtcttccctggaacatgaaccagaaactcacaccctgcacctgcagccgcagcatgaagagagcgtggtgcccacccagagcacgctgacagccgacgacatgcgcagagccaagcgcatccgattggagctgcagaatgcagctcttcagcatctgtttattcggaagtccttccggccttttaaatgcttgcagtgtgggaaggccttccgggaaaaggacaaactggaccagcacttacgcttccatgggcgggaggggaactgcccactgacctgtgatctctgtaacaagggcttcatcagcagcacatccttggagagccacatgaagctccactcagaccagaagacttactcttgcattttttgcccagaatcctttgaccgccttgatttgttgaaagatcatgtggccattcatatcaatgatggctacttcacctgcccaacttgtaagaaacggttcccagattttatccaggtgaaaaaacacgtgcgcagcttccactcagaaaagatctaccagtgcacagagtgtgacaaggccttctgtcgccccgataaactgcgactccacatgctccggcattcggaccgcaaagacttcctgtgttccacctgtgggaagcaatttaagcgaaaagacaaactacgggaacacatgcagaggatgcataatcctgagagggaggccaagaaagccgaccgcatcagccgctccaagacgttcaagccccgcatcacgtccacagactacgacagcttcacgttcaagtgccgcctgtgcatgatgggcttccggcggcgcggcatgctggtaaatcacttatcgaagagacacccagacatgaagatagaagaggtgccagagttaactctacccatcataaaacccaatcgtgattacttttgtcagtattgcgataaggtttataaaagtgccagcaagcgcaaagcccacattctgaagaaccacccaggagcagagctcccaccgagcattcggaagctccgacccgctggtcctggagagccagaccccatgctgagcacacacacccagctgacgggcaccatcgccacccctcccgtctgctgtccccactgctccaagcagtacagcagcaagaccaagatggtccagcacattcgaaagaagcatccagagttcgcccagctctccaacaccatacacacaccactgacgacagctgtgatcagtgccaccccagcggttttgactacagacagcgccactggagagactgtggtgacgacggacctgctcacccaagcaatgacagaactgtcccagaccttaacgacagactaccgaacgccacaaggggattaccagagaattcagtacatccctgtgtcgcagtcggcgtctggcctccagcagcctcagcacatacagctgcaagtggttcaagtggcctcggccacttcccctcaccagtcacagcagtccactgtggatgttggccagctccatgatcctcagccctacccccagcacgccatccaggtgcagcacatccaggtatctgggcagccgttgagtccctcagcccagcaggctcagcaggggctcagcccctcccacatccagggcagttcttccacacaggggcaggctctgcagcagcagcagcagcagcagcagaattcctctgtgcagcacacgtacctgcccagtgcttggaattccttccgtggctattcatctgagattcaaatgatgacgcttcctccgggtcagtttgtgattacagacagtggtgtggcaactccagttactactggccaggtgaaggcggttacttcgggtcattatgtgttatcagaaagtcaatcagaattggaagaaaagcaaacttctgccctctctggtggagtccaggtcgagccacctgcacacagtgactccctggacccccagaccaacagccaacagcagaccacacagtacatcatcaccaccaccaccaacgggaacggaagcagcgaagtgcatatcaccaaacca

SEQ ID NO: 4327 - DNA, 3468 bp, Homo sapiens
  source 1..3468: mol_type = genomic DNA
atggattccaaagatgaaagctcgcatgtgtggccgacatctgcagagcatgaacagaatgccgcacaggtgcactttgttccggacacaggaacagtggctcagattgtctataccgatgaccaggttcgccccccacagcaggtggtgtacacggcagatggtgcctcctacacatcagtggatggtccagagcacacgctggtgtacatccacccggtggaagctgcacagactctgtttacagaccccggccaggtagcttatgtccaacaggatgctacagctcagcaggcctcattgccagttcataaccaggtgctgccttccatcgagagtgtagatgggtccgaccctttggcaactctgcagacccctctaggcagactggaggccaaagaggaagaggatgaggatgaggacgaggacactgaggaagatgaggaagaagacggtgaggacacggatctggatgactgggagccagacccgccccggcccttcgacccacacgacttgtggtgtgaggagtgcaataacgcgcatgcttcagtgtgtccgaagcacggccccttgcacccgatccccaaccggccggtgctcacccgggccagggcgagcctccccctggtgctctacatagacaggtttctgggcggggtgttctccaagcggcgcatccccaagcgcacccagtttggccccgtggaggggcctctcgtcaggggctcggagctgaaagactgttacattcacctcaaggtttctcttgataaaggggacaggaaagaaagggatttacatgaagacctatggtttgagttgtctgatgagacgctttgtaactggatgatgtttgtacggccagcccagaatcacctggagcagaacctggtggcttaccagtatggccaccatgtgtattatacaaccataaaaaatgtggagcccaagcaggaactgaaggtgtggtatgccgcatcctatgctgagttcgtgaaccagaaaattcatgacatttctgaggaagaaaggaaagttcttcgagagcaagagaagaattggccctgctatgaatgtaaccgccgatttataagctcggagcagttgcaacagcatctcaattctcatgatgagaaactagatgtgtttagcagaacaagaggcagaggaaggggacgaggcaagaggcgattcggtccaggtcgacggccggggcgtcctccaaaatttatccgcctggaaatcaccagcgaaaatggggaaaagagtgacgatgggacacaggacttgctacattttcccacaaaggagcaatttgatgaggctgaaccagccactctgaatgggctggatcaaccagaacagaccactatcccaatccctcagctgccacaggaaacccagtcttccctggaacatgaaccagaaactcacaccctgcacctgcagccgcagcatgaagagagcgtggtgcccacccagagcacgctgacagccgacgacatgcgcagagccaagcgcatccgaaatgcagctcttcagcatctgtttattcggaagtccttccggccttttaaatgcttgcagtgtgggaaggccttccgggaaaaggacaaactggaccagcacttacgcttccatgggcgggaggggaactgcccactgacctgtgatctctgtaacaagggcttcatcagcagcacatccttggagagccacatgaagctccactcagaccagaagacttactcttgcattttttgcccagaatcctttgaccgccttgatttgttgaaagatcatgtggccattcatatcaatgatggctacttcacctgcccaacttgtaagaaacggttcccagattttatccaggtgaaaaaacacgtgcgcagcttccactcagaaaagatctaccagtgcacagagtgtgacaaggccttctgtcgccccgataaactgcgactccacatgctccggcattcggaccgcaaagacttcctgtgttccacctgtgggaagcaatttaagcgaaaagacaaactacgggaacacatgcagaggatgcataatcctgagagggaggccaagaaagccgaccgcatcagccgctccaagacgttcaagccccgcatcacgtccacagactacgacagcttcacgttcaagtgccgcctgtgcatgatgggcttccggcggcgcggcatgctggtaaatcacttatcgaagagacacccagacatgaagatagaagaggtgccagagttaactctacccatcataaaacccaatcgtgattacttttgtcagtattgcgataaggtttataaaagtgccagcaagcgcaaagcccacattctgaagaaccacccaggagcagagctcccaccgagcattcggaagctccgacccgctggtcctggagagccagaccccatgctgagcacacacacccagctgacgggcaccatcgccacccctcccgtctgctgtccccactgctccaagcagtacagcagcaagaccaagatggtccagcacattcgaaagaagcatccagagttcgcccagctctccaacaccatacacacaccactgacgacagctgtgatcagtgccaccccagcggttttgactacagacagcgccactggagagactgtggtgacgacggacctgctcacccaagcaatgacagaactgtcccagaccttaacgacagactaccgaacgccacaaggggattaccagagaattcagtacatccctgtgtcgcagtcggcgtctggcctccagcagcctcagcacatacagctgcaagtggttcaagtggcctcggccacttcccctcaccagtcacagcagtccactgtggatgttggccagctccatgatcctcagccctacccccagcacgccatccaggtgcagcacatccaggtcagcgagcctaccgcctcggccccgtcctccgcccaggtatctgggcagccgttgagtccctcagcccagcaggctcagcaggggctcagcccctcccacatccagggcagttcttccacacaggggcaggctctgcagcagcagcagcagcagcagcagaattcctctgtgcagcacacgtacctgcccagtgcttggaattccttccgtggctattcatctgagattcaaatgatgacgcttcctccgggtcagtttgtgattacagacagtggtgtggcaactccagttactactggccaggtgaaggcggttacttcgggtcattatgtgttatcagaaagtcaatcagaattggaagaaaagcaaacttctgccctctctggtggagtccaggtcgagccacctgcacacagtgactccctggacccccagaccaacagccaacagcagaccacacagtacatcatcaccaccaccaccaacgggaacggaagcagcgaagtgcatatcaccaaacca

SEQ ID NO: 4328 - DNA, 3069 bp, Homo sapiens
  source 1..3069: mol_type = genomic DNA
atgtctgcttactctgtgccttcaacttttgcccaggcctcattgccagttcataaccaggtgctgccttccatcgagagtgtagatgggtccgaccctttggcaactctgcagacccctctaggcagactggaggccaaagaggaagaggatgaggatgaggacgaggacactgaggaagatgaggaagaagacggtgaggacacggatctggatgactgggagccagacccgccccggcccttcgacccacacgacttgtggtgtgaggagtgcaataacgcgcatgcttcagtgtgtccgaagcacggccccttgcacccgatccccaaccggccggtgctcacccgggccagggcgagcctccccctggtgctctacatagacaggtttctgggcggggtgttctccaagcggcgcatccccaagcgcacccagtttggccccgtggaggggcctctcgtcaggggctcggagctgaaagactgttacattcacctcaaggtttctcttgataaaggggacaggaaagaaagggatttacatgaagacctatggtttgagttgtctgatgagacgctttgtaactggatgatgtttgtacggccagcccagaatcacctggagcagaacctggtggcttaccagtatggccaccatgtgtattatacaaccataaaaaatgtggagcccaagcaggaactgaaggtgtggtatgccgcatcctatgctgagttcgtgaaccagaaaattcatgacatttctgaggaagaaaggaaagttcttcgagagcaagagaagaattggccctgctatgaatgtaaccgccgatttataagctcggagcagttgcaacagcatctcaattctcatgatgagaaactagatgtgtttagcagaacaagaggcagaggaaggggacgaggcaagaggcgattcggtccaggtcgacggccggggcgtcctccaaaatttatccgcctggaaatcaccagcgaaaatggggaaaagagtgacgatgggacacaggacttgctacattttcccacaaaggagcaatttgatgaggctgaaccagccactctgaatgggctggatcaaccagaacagaccactatcccaatccctcagctgccacaggaaacccagtcttccctggaacatgaaccagaaactcacaccctgcacctgcagccgcagcatgaagagagcgtggtgcccacccagagcacgctgacagccgacgacatgcgcagagccaagcgcatccgaaatgcagctcttcagcatctgtttattcggaagtccttccggccttttaaatgcttgcagtgtgggaaggccttccgggaaaaggacaaactggaccagcacttacgcttccatgggcgggaggggaactgcccactgacctgtgatctctgtaacaagggcttcatcagcagcacatccttggagagccacatgaagctccactcagaccagaagacttactcttgcattttttgcccagaatcctttgaccgccttgatttgttgaaagatcatgtggccattcatatcaatgatggctacttcacctgcccaacttgtaagaaacggttcccagattttatccaggtgaaaaaacacgtgcgcagcttccactcagaaaagatctaccagtgcacagagtgtgacaaggccttctgtcgccccgataaactgcgactccacatgctccggcattcggaccgcaaagacttcctgtgttccacctgtgggaagcaatttaagcgaaaagacaaactacgggaacacatgcagaggatgcataatcctgagagggaggccaagaaagccgaccgcatcagccgctccaagacgttcaagccccgcatcacgtccacagactacgacagcttcacgttcaagtgccgcctgtgcatgatgggcttccggcggcgcggcatgctggtaaatcacttatcgaagagacacccagacatgaagatagaagaggtgccagagttaactctacccatcataaaacccaatcgtgattacttttgtcagtattgcgataaggtttataaaagtgccagcaagcgcaaagcccacattctgaagaaccacccaggagcagagctcccaccgagcattcggaagctccgacccgctggtcctggagagccagaccccatgctgagcacacacacccagctgacgggcaccatcgccacccctcccgtctgctgtccccactgctccaagcagtacagcagcaagaccaagatggtccagcacattcgaaagaagcatccagagttcgcccagctctccaacaccatacacacaccactgacgacagctgtgatcagtgccaccccagcggttttgactacagacagcgccactggagagactgtggtgacgacggacctgctcacccaagcaatgacagaactgtcccagaccttaacgacagactaccgaacgccacaaggggattaccagagaattcagtacatccctgtgtcgcagtcggcgtctggcctccagcagcctcagcacatacagctgcaagtggttcaagtggcctcggtatctgggcagccgttgagtccctcagcccagcaggctcagcaggggctcagcccctcccacatccagggcagttcttccacacaggggcaggctctgcagcagcagcagcagcagcagcagaattcctctgtgcagcacacgtacctgcccagtgcttggaattccttccgtggctattcatctgagattcaaatgatgacgcttcctccgggtcagtttgtgattacagacagtggtgtggcaactccagttactactggccaggtgaaggcggttacttcgggtcattatgtgttatcagaaagtcaatcagaattggaagaaaagcaaacttctgccctctctggtggagtccaggtcgagccacctgcacacagtgactccctggacccccagaccaacagccaacagcagaccacacagtacatcatcaccaccaccaccaacgggaacggaagcagcgaagtgcatatcaccaaacca

SEQ ID NO: 4329 - DNA, 1224 bp, Homo sapiens
  source 1..1224: mol_type = genomic DNA
atgaataccacagacaacggtgtcaactgtctgtgtgctatctgtggggacagagcaacaggaaaacactatggggcatccagctgtgatgggtgcaagggtttcttcagacgcagcattcgtaagagtcacgtttattcttgcaggttcagtcggcaatgtgttgttgacaaggacaaaaggaatcaatgtagatattgtcgattaagaaagtgttttagagcgggaatgaaaaaagaagctgtacaaaatgaacgtgacagaataagcaccagaagaagcacatttgatggcagcaacatcccctccattaacacactggcacaagctgaagttcggtctcgccagatctcagtctcaagccctgggtcaagcactgacataaacgttaagaaaattgcaagtattggtgatgtctgtgaatctatgaaacagcagctcttagtcttggtggaatgggctaaatatattcctgccttctgtgaattaccattggatgatcaggtggcactgttgagagctcacgcaggggagcacttactgcttggagctacaaagagatccatgatgtataaagatattttgcttttgggaaacaactatgttattcaccgcaacagctgtgaagttgagattagccgtgtggccaatcgtgttctagatgagctggttagaccatttcaagaaatccagattgatgacaatgagtatgcttgtttaaaggcaattgtattttttgatccagatgcaaaagggctaagcgatccagtaaaaattaagaacatgaggttccaagtgcagatcggtttggaggactacatcaatgatcggcagtatgactcccgggggaggtttggagagttgcttctgctcctgcccacactgcagagcatcacgtggcaaatgattgagcaaatacagtttgttaaactttttgggatggttaaaattgacaatctacttcaggaaatgctattaggtggggcttccaatgatggcagtcatctccatcatccaatgcatccacatttgtctcaagacccattaactggacaaactatacttttaggtcccatgtcaacactggttcatgcagaccagatctcaactcctgaaaccccactcccttccccaccacaaggctctgggcaagaacagtacaaaatagctgcaaaccaagcatcagtcatttcacaccagcatctctccaaacaaaagcaattg

SEQ ID NO: 4330 - DNA, 1335 bp, Homo sapiens
  source 1..1335: mol_type = genomic DNA
atggacatggcaaattacagtgaagttttggacccaacttacacaactttggagtttgaaactatgcagattctatataattcaagtgatagttctgccccagagacaagtatgaataccacagacaacggtgtcaactgtctgtgtgctatctgtggggacagagcaacaggaaaacactatggggcatccagctgtgatgggtgcaagggtttcttcagacgcagcattcgtaagagtcacgtttattcttgcaggttcagtcggcaatgtgttgttgacaaggacaaaaggaatcaatgtagatattgtcgattaagaaagtgttttagagcgggaatgaaaaaagaagctgtacaaaatgaacgtgacagaataagcaccagaagaagcacatttgatggcagcaacatcccctccattaacacactggcacaagctgaagttcggtctcgccagatctcagtctcaagccctgggtcaagcactgacataaacgttaagaaaattgcaagtattggtgatgtctgtgaatctatgaaacagcagctcttagtcttggtggaatgggctaaatatattcctgccttctgtgaattaccattggatgatcaggtggcactgttgagagctcacgcaggggagcacttactgcttggagctacaaagagatccatgatgtataaagatattttgcttttgggaaacaactatgttattcaccgcaacagctgtgaagttgagattagccgtgtggccaatcgtgttctagatgagctggttagaccatttcaagaaatccagattgatgacaatgagtatgcttgtttaaaggcaattgtattttttgatccagatgcaaaagggctaagcgatccagtaaaaattaagaacatgaggttccaagtgcagatcggtttggaggactacatcaatgatcggcagtatgactcccgggggaggtttggagagttgcttctgctcctgcccacactgcagagcatcacgtggcaaatgattgagcaaatacagtttgttaaactttttgggatggttaaaattgacaatctacttcaggaaatgctattaggtggggcttccaatgatggcagtcatctccatcatccaatgcatccacatttgtctcaagacccattaactggacaaactatacttttaggtcccatgtcaacactggttcatgcagaccagatctcaactcctgaaaccccactcccttccccaccacaaggctctgggcaagaacagtacaaaatagctgcaaaccaagcatcagtcatttcacaccagcatctctccaaacaaaagcaattg

SEQ ID NO: 4331 - DNA, 1392 bp, Homo sapiens
  source 1..1392: mol_type = genomic DNA
atgcgactctccaaaaccctcgtcgacatggacatggccgactacagtgctgcactggacccagcctacaccaccctggaatttgagaatgtgcaggtgttgacgatgggcaatgacacgtccccatcagaaggcaccaacctcaacgcgcccaacagcctgggtgtcagcgccctgtgtgccatctgcggggaccgggccacgggcaaacactacggtgcctcgagctgtgacggctgcaagggcttcttccggaggagcgtgcggaagaaccacatgtactcctgcagatttagccggcagtgcgtggtggacaaagacaagaggaaccagtgccgctactgcaggctcaagaaatgcttccgggctggcatgaagaaggaagccgtccagaatgagcgggaccggatcagcactcgaaggtcaagctatgaggacagcagcctgccctccatcaatgcgctcctgcaggcggaggtcctgtcccgacagatcacctcccccgtctccgggatcaacggcgacattcgggcgaagaagattgccagcatcgcagatgtgtgtgagtccatgaaggagcagctgctggttctcgttgagtgggccaagtacatcccagctttctgcgagctccccctggacgaccaggtggccctgctcagagcccatgctggcgagcacctgctgctcggagccaccaagagatccatggtgttcaaggacgtgctgctcctaggcaatgactacattgtccctcggcactgcccggagctggcggagatgagccgggtgtccatacgcatccttgacgagctggtgctgcccttccaggagctgcagatcgatgacaatgagtatgcctacctcaaagccatcatcttctttgacccagatgccaaggggctgagcgatccagggaagatcaagcggctgcgttcccaggtgcaggtgagcttggaggactacatcaacgaccgccagtatgactcgcgtggccgctttggagagctgctgctgctgctgcccaccttgcagagcatcacctggcagatgatcgagcagatccagttcatcaagctcttcggcatggccaagattgacaacctgttgcaggagatgctgctgggagggtcccccagcgatgcaccccatgcccaccaccccctgcaccctcacctgatgcaggaacatatgggaaccaacgtcatcgttgccaacacaatgcccactcacctcagcaacggacagatgtccacccctgagaccccacagccctcaccgccaggtggctcagggtctgagccctataagctcctgccgggagccgtcgccacaatcgtcaagcccctctctgccatcccccagccgaccatcaccaagcaggaagttatc

SEQ ID NO: 4332 - DNA, 1326 bp, Homo sapiens
  source 1..1326: mol_type = genomic DNA
atggtcagcgtgaacgcgcccctcggggctccagtggagagttcttacgacacgtccccatcagaaggcaccaacctcaacgcgcccaacagcctgggtgtcagcgccctgtgtgccatctgcggggaccgggccacgggcaaacactacggtgcctcgagctgtgacggctgcaagggcttcttccggaggagcgtgcggaagaaccacatgtactcctgcagatttagccggcagtgcgtggtggacaaagacaagaggaaccagtgccgctactgcaggctcaagaaatgcttccgggctggcatgaagaaggaagccgtccagaatgagcgggaccggatcagcactcgaaggtcaagctatgaggacagcagcctgccctccatcaatgcgctcctgcaggcggaggtcctgtcccgacagatcacctcccccgtctccgggatcaacggcgacattcgggcgaagaagattgccagcatcgcagatgtgtgtgagtccatgaaggagcagctgctggttctcgttgagtgggccaagtacatcccagctttctgcgagctccccctggacgaccaggtggccctgctcagagcccatgctggcgagcacctgctgctcggagccaccaagagatccatggtgttcaaggacgtgctgctcctaggcaatgactacattgtccctcggcactgcccggagctggcggagatgagccgggtgtccatacgcatccttgacgagctggtgctgcccttccaggagctgcagatcgatgacaatgagtatgcctacctcaaagccatcatcttctttgacccagatgccaaggggctgagcgatccagggaagatcaagcggctgcgttcccaggtgcaggtgagcttggaggactacatcaacgaccgccagtatgactcgcgtggccgctttggagagctgctgctgctgctgcccaccttgcagagcatcacctggcagatgatcgagcagatccagttcatcaagctcttcggcatggccaagattgacaacctgttgcaggagatgctgctgggagggtcccccagcgatgcaccccatgcccaccaccccctgcaccctcacctgatgcaggaacatatgggaaccaacgtcatcgttgccaacacaatgcccactcacctcagcaacggacagatgtccacccctgagaccccacagccctcaccgccaggtggctcagggtctgagccctataagctcctgccgggagccgtcgccacaatcgtcaagcccctctctgccatcccccagccgaccatcaccaagcaggaagttatc

SEQ ID NO: 4333 - DNA, 1347 bp, Homo sapiens
  source 1..1347: mol_type = genomic DNA
atgtcggactggggccagggcttcccccaggacccaccagacacgtccccatcagaaggcaccaacctcaacgcgcccaacagcctgggtgtcagcgccctgtgtgccatctgcggggaccgggccacgggcaaacactacggtgcctcgagctgtgacggctgcaagggcttcttccggaggagcgtgcggaagaaccacatgtactcctgcagatttagccggcagtgcgtggtggacaaagacaagaggaaccagtgccgctactgcaggctcaagaaatgcttccgggctggcatgaagaaggaagccgtccagaatgagcgggaccggatcagcactcgaaggtcaagctatgaggacagcagcctgccctccatcaatgcgctcctgcaggcggaggtcctgtcccgacagatcacctcccccgtctccgggatcaacggcgacattcgggcgaagaagattgccagcatcgcagatgtgtgtgagtccatgaaggagcagctgctggttctcgttgagtgggccaagtacatcccagctttctgcgagctccccctggacgaccaggtggccctgctcagagcccatgctggcgagcacctgctgctcggagccaccaagagatccatggtgttcaaggacgtgctgctcctaggcaatgactacattgtccctcggcactgcccggagctggcggagatgagccgggtgtccatacgcatccttgacgagctggtgctgcccttccaggagctgcagatcgatgacaatgagtatgcctacctcaaagccatcatcttctttgacccagatgccaaggggctgagcgatccagggaagatcaagcggctgcgttcccaggtgcaggtgagcttggaggactacatcaacgaccgccagtatgactcgcgtggccgctttggagagctgctgctgctgctgcccaccttgcagagcatcacctggcagatgatcgagcagatccagttcatcaagctcttcggcatggccaagattgacaacctgttgcaggagatgctgctgggagggtcccccagcgatgcaccccatgcccaccaccccctgcaccctcacctgatgcaggaacatatgggaaccaacgtcatcgttgccaacacaatgcccactcacctcagcaacggacagatgtgtgagtggccccgacccaggggacaggcagccacccctgagaccccacagccctcaccgccaggtggctcagggtctgagccctataagctcctgccgggagccgtcgccacaatcgtcaagcccctctctgccatcccccagccgaccatcaccaagcaggaagttatc

SEQ ID NO: 4334 - DNA, 1356 bp, Homo sapiens
  source 1..1356: mol_type = genomic DNA
atggtcagcgtgaacgcgcccctcggggctccagtggagagttcttacgacacgtccccatcagaaggcaccaacctcaacgcgcccaacagcctgggtgtcagcgccctgtgtgccatctgcggggaccgggccacgggcaaacactacggtgcctcgagctgtgacggctgcaagggcttcttccggaggagcgtgcggaagaaccacatgtactcctgcagatttagccggcagtgcgtggtggacaaagacaagaggaaccagtgccgctactgcaggctcaagaaatgcttccgggctggcatgaagaaggaagccgtccagaatgagcgggaccggatcagcactcgaaggtcaagctatgaggacagcagcctgccctccatcaatgcgctcctgcaggcggaggtcctgtcccgacagatcacctcccccgtctccgggatcaacggcgacattcgggcgaagaagattgccagcatcgcagatgtgtgtgagtccatgaaggagcagctgctggttctcgttgagtgggccaagtacatcccagctttctgcgagctccccctggacgaccaggtggccctgctcagagcccatgctggcgagcacctgctgctcggagccaccaagagatccatggtgttcaaggacgtgctgctcctaggcaatgactacattgtccctcggcactgcccggagctggcggagatgagccgggtgtccatacgcatccttgacgagctggtgctgcccttccaggagctgcagatcgatgacaatgagtatgcctacctcaaagccatcatcttctttgacccagatgccaaggggctgagcgatccagggaagatcaagcggctgcgttcccaggtgcaggtgagcttggaggactacatcaacgaccgccagtatgactcgcgtggccgctttggagagctgctgctgctgctgcccaccttgcagagcatcacctggcagatgatcgagcagatccagttcatcaagctcttcggcatggccaagattgacaacctgttgcaggagatgctgctgggagggtcccccagcgatgcaccccatgcccaccaccccctgcaccctcacctgatgcaggaacatatgggaaccaacgtcatcgttgccaacacaatgcccactcacctcagcaacggacagatgtgtgagtggccccgacccaggggacaggcagccacccctgagaccccacagccctcaccgccaggtggctcagggtctgagccctataagctcctgccgggagccgtcgccacaatcgtcaagcccctctctgccatcccccagccgaccatcaccaagcaggaagttatc

SEQ ID NO: 4335 - DNA, 1185 bp, Homo sapiens
  source 1..1185: mol_type = genomic DNA
atggtcagcgtgaacgcgcccctcggggctccagtggagagttcttacgacacgtccccatcagaaggcaccaacctcaacgcgcccaacagcctgggtgtcagcgccctgtgtgccatctgcggggaccgggccacgggcaaacactacggtgcctcgagctgtgacggctgcaagggcttcttccggaggagcgtgcggaagaaccacatgtactcctgcagatttagccggcagtgcgtggtggacaaagacaagaggaaccagtgccgctactgcaggctcaagaaatgcttccgggctggcatgaagaaggaagccgtccagaatgagcgggaccggatcagcactcgaaggtcaagctatgaggacagcagcctgccctccatcaatgcgctcctgcaggcggaggtcctgtcccgacagatcacctcccccgtctccgggatcaacggcgacattcgggcgaagaagattgccagcatcgcagatgtgtgtgagtccatgaaggagcagctgctggttctcgttgagtgggccaagtacatcccagctttctgcgagctccccctggacgaccaggtggccctgctcagagcccatgctggcgagcacctgctgctcggagccaccaagagatccatggtgttcaaggacgtgctgctcctaggcaatgactacattgtccctcggcactgcccggagctggcggagatgagccgggtgtccatacgcatccttgacgagctggtgctgcccttccaggagctgcagatcgatgacaatgagtatgcctacctcaaagccatcatcttctttgacccagatgccaaggggctgagcgatccagggaagatcaagcggctgcgttcccaggtgcaggtgagcttggaggactacatcaacgaccgccagtatgactcgcgtggccgctttggagagctgctgctgctgctgcccaccttgcagagcatcacctggcagatgatcgagcagatccagttcatcaagctcttcggcatggccaagattgacaacctgttgcaggagatgctgctgggaggtccgtgccaagcccaggaggggcggggttggagtggggactccccaggagacaggcctcacacagtgagctcacccctcagctccttggcttccccactgtgccgctttgggcaagttgct

SEQ ID NO: 4336 - DNA, 1095 bp, Homo sapiens
  source 1..1095: mol_type = genomic DNA
ctggatccgccggccgtggtcgccgagtcggtgtcgtccttgaccatcgccgacgcgttcattgcagccggcgagagctcagctccgaccccgccgcgccccgcgcttcccaggaggttcatctgctccttccctgactgcagcgccaattacagcaaagcctggaagcttgacgcgcacctgtgcaagcacacgggggagagaccatttgtttgtgactatgaagggtgtggcaaggccttcatcagggactaccatctgagccgccacattctgactcacacaggagaaaagccgtttgtttgtgcagccaatggctgtgatcaaaaattcaacacaaaatcaaacttgaagaaacattttgaacgcaaacatgaaaatcaacaaaaacaatatatatgcagttttgaagactgtaagaagacctttaagaaacatcagcagctgaaaatccatcagtgccagcataccaatgaacctctattcaagtgtacccaggaaggatgtgggaaacactttgcatcacccagcaagctgaaacgacatgccaaggcccacgagggctatgtatgtcaaaaaggatgttcctttgtggcaaaaacatggacggaacttctgaaacatgtgagagaaacccataaagaggaaatactatgtgaagtatgccggaaaacatttaaacgcaaagattaccttaagcaacacatgaaaactcatgccccagaaagggatgtatgtcgctgtccaagagaaggctgtggaagaacctatacaactgtgtttaatctccaaagccatatcctctccttccatgaggaaagccgcccttttgtgtgtgaacatgctggctgtggcaaaacatttgcaatgaaacaaagtctcactaggcatgctgttgtacatgatcctgacaagaagaaaatgaagctcaaagtcaaaaaatctcgtgaaaaacggagtttggcctctcatctcagtggatatatccctcccaaaaggaaacaagggcaaggcttatctttgtgtcaaaacggagagtcacccaactgtgtggaagacaagatgctctcgacagttgcagtacttacccttggc

SEQ ID NO: 4337 - DNA, 822 bp, Homo sapiens
  source 1..822: mol_type = genomic DNA
atgcacctctgtgggggcaatgggctgctgacccagacagaccccaaggagcaacaaaggcagctgaagaagcagaagaaccgggcagccgcccagcgaagccggcagaagcacacagacaaggcagacgccctgcaccagcagcacgagtctctggaaaaagacaacctcgccctgcggaaggagatccagtccctgcaggccgagctggcgtggtggagccggaccctgcacgtgcatgagcgcctgtgccccatggattgtgcctcctgctcagctccagggctcctgggctgctgggaccaggctgaggggctcctgggccctggcccacagggacaacatggctgccgggagcagctggagctgttccagaccccgggttcctgttacccagctcagccgctctctccaggtccacagcctcatgattctcccagcctcctccagtgccccctgccctcactgtcccttggccccgctgtggttgctgaacctcctgtccagctgtcccccagccctctcctgtttgcctcgcacactggttccagcctgcaggggtcttcctctaagctcagtgccctccagcccagcctcacggcccaaactgcccctccacagcccctcgagctggagcatcccaccagagggaagctggggtcctctcccgacaacccttcctctgccctggggcttgcacgtctgcagagcagggagcacaaacctgctctctcagcagccacttggcaagggctggttgtggatcccagccctcaccctctcctggcctttcctctgctctcctctgctcaagtccacttc

SEQ ID NO: 4338 - DNA, 567 bp, Homo sapiens
  source 1..567: mol_type = genomic DNA
atggattgtgcctcctgctcagctccagggctcctgggctgctgggaccaggctgaggggctcctgggccctggcccacagggacaacatggctgccgggagcagctggagctgttccagaccccgggttcctgttacccagctcagccgctctctccaggtccacagcctcatgattctcccagcctcctccagtgccccctgccctcactgtcccttggccccgctgtggttgctgaacctcctgtccagctgtcccccagccctctcctgtttgcctcgcacactggttccagcctgcaggggtcttcctctaagctcagtgccctccagcccagcctcacggcccaaactgcccctccacagcccctcgagctggagcatcccaccagagggaagctggggtcctctcccgacaacccttcctctgccctggggcttgcacgtctgcagagcagggagcacaaacctgctctctcagcagccacttggcaagggctggttgtggatcccagccctcaccctctcctggcctttcctctgctctcctctgctcaagtccacttc

SEQ ID NO: 4339 - DNA, 750 bp, Homo sapiens
  source 1..750: mol_type = genomic DNA
atggctcctgtgggcaagagaataggtggtttgggggacacacgggttggaggcccgtgcatatcccagcagcacgagtctctggaaaaagacaacctcgccctgcggaaggagatccagtccctgcaggccgagctggcgtggtggagccggaccctgcacgtgcatgagcgcctgtgccccatggattgtgcctcctgctcagctccagggctcctgggctgctgggaccaggctgaggggctcctgggccctggcccacagggacaacatggctgccgggagcagctggagctgttccagaccccgggttcctgttacccagctcagccgctctctccaggtccacagcctcatgattctcccagcctcctccagtgccccctgccctcactgtcccttggccccgctgtggttgctgaacctcctgtccagctgtcccccagccctctcctgtttgcctcgcacactggttccagcctgcaggggtcttcctctaagctcagtgccctccagcccagcctcacggcccaaactgcccctccacagcccctcgagctggagcatcccaccagagggaagctggggtcctctcccgacaacccttcctctgccctggggcttgcacgtctgcagagcagggagcacaaacctgctctctcagcagccacttggcaagggctggttgtggatcccagccctcaccctctcctggcctttcctctgctctcctctgctcaagtccacttc

SEQ ID NO: 4340 - DNA, 2445 bp, Homo sapiens
  source 1..2445: mol_type = genomic DNA
atgttccgaaaggcccggcgggtgaacgtgcgcaagcggaacgactccgaagaggaagagcgggaacgcgatgaggagcaggagccgccgccgttgttgccgccgccgggcacgggcgaagaggcgggccccggtggcggcgacagggcccctggcggggagtcgctgctgggcccggggccgtcgccgccttccgcgctgaccccgggcctcggggctgaggccgggggcggcttccccggcggcgcggagcccggcaacgggctgaagccgcgcaagaggcctcgcgagaacaaagaggtgccccgggccagcctgctcagcttccaggacgaggaggaagaaaatgaagaagttttcaaagtgaagaaatcaagttatagcaaaaagatagtaaaattgctcaagaaggaatataaagaagatcttgaaaaatcgaagattaagacagaactcaactcatcagctgaaagtgaacaacctttggacaaaacaggacatgttaaggatacaaatcaagaagatggagttatcatcagtgaacatggtgaagatgaaatggatatggaaagtgaaaaagaggaagaaaagccaaagactggtggagctttttcaaatgctttatcttcattgaatgttcttcgtccaggagaaattccagatgcagcttttatacatgctgcaaggaaaaagcgccaaatggcccgagaattgggagatttcactcctcatgataatgagcctggtaaaggccgccttgttagagaagatgagaatgatgccagtgatgatgaagatgacgatgagaaacgccggatagttttttctgtgaaagaaaagtcacaaagacaaaaaattgctgaggaaataggaattgaggggagtgatgatgatgctttagtaactggagaacaggatgaagagctcagccgatgggaacaggagcagataaggaaaggaattaatatccctcaggttcaagccagtcaacccgcagaagtgaatatgtactaccagaacacttaccagacaatgccttacggctcatcctatggcattccttatagttatacggcctatggatcatcagatgccaaatctcaaaaaacagataatacagtccctttcaaaactcccagtaatgagatgactcccgttactattgatttggtaaagaaacagcttaaagacaggttggactccatgaaagaattgcacaaaacaaatcgacagcagcatgagaaacatctgcaaagccgagtggactctaccagggctattgaaagattagaagggtcttctgggggtattggtgaacggtataaatttttgcaagaaatgcgagggtatgtccaagacttgcttgagtgtttcagtgaaaaggtgccactgattaatgaacttgaatcagcaatacatcagctgtacaaacagcgagcttcccgccttgtccaaagacgacaagatgatattaaagatgaatcttcggagttttcaagccattcaaacaaagctctgatggcaccaaatcttgactcctttggacgcgatcgggcactgtatcaagagcatgcaaaacgtcgcattgcagagcgggaggccaggaggactcgtcgtagacaagccagagaacaaaccggtaagatggcagatcaccttgaaggcctttccagtgatgatgaagaaacttctacagatattactaatttcaatctggaaaaagatcgaatttcaaaagaatccggcaaagtttttgaagatgtccttgaaagtttctattcaattgactgtattaaatcacagtttgaagcatggcgttcaaaatactacacatcctacaaagatgcttacattggcctttgtttgccaaaattattcaaccccctcatacgacttcagctcctcacttggactcctcttgaggcaaaatgtcgtgactttgagaatatgctgtggtttgaatctttgctgttttatggttgtgaagaacgagagcaagaaaaagatgatgtagatgttgccctactacctaccattgtggaaaaggtgattcttcctaaactaacagtgatagctgaaaatatgtgggaccctttttctacaacacagacttcaagaatggtgggaattacactaaaattaatcaatggatatccttcagtagtgaatgcagaaaataaaaatacacaggtatacctaaaggcacttttattgagaatgagaagaactttagatgatgatgtatttatgcccttatatcccaaaaatgtcttagaaaataaaaattctgggccttacttgttttttcaacgacagttttggtcttcagttaaggtcataaaacccccattccagagagggtcctgccccatacccagaaggaaagaatgctgctcagagaggccaagaagaatctggacggacaggccttgtgttgtcttctct

SEQ ID NO: 4341 - DNA, 2751 bp, Homo sapiens
  source 1..2751: mol_type = genomic DNA
atgttccgaaaggcccggcgggtgaacgtgcgcaagcggaacgactccgaagaggaagagcgggaacgcgatgaggagcaggagccgccgccgttgttgccgccgccgggcacgggcgaagaggcgggccccggtggcggcgacagggcccctggcggggagtcgctgctgggcccggggccgtcgccgccttccgcgctgaccccgggcctcggggctgaggccgggggcggcttccccggcggcgcggagcccggcaacgggctgaagccgcgcaagaggcctcgcgagaacaaagaggtgccccgggccagcctgctcagcttccaggacgaggaggaagaaaatgaagaagttttcaaagtgaagaaatcaagttatagcaaaaagatagtaaaattgctcaagaaggaatataaagaagatcttgaaaaatcgaagattaagacagaactcaactcatcagctgaaagtgaacaacctttggacaaaacaggacatgttaaggatacaaatcaagaagatggagttatcatcagtgaacatggtgaagatgaaatggatatggaaagtgaaaaagaggaagaaaagccaaagactggtggagctttttcaaatgctttatcttcattgaatgttcttcgtccaggagaaattccagatgcagcttttatacatgctgcaaggaaaaagcgccaaatggcccgagaattgggagatttcactcctcatgataatgagcctggtaaaggccgccttgttagagaagatgagaatgatgccagtgatgatgaagatgacgatgagaaacgccggatagttttttctgtgaaagaaaagtcacaaagacaaaaaattgctgaggaaataggaattgaggggagtgatgatgatgctttagtaactggagaacaggatgaagagctcagccgatgggaacaggagcagataaggaaaggaattaatatccctcaggttcaagccagtcaacccgcagaagtgaatatgtactaccagaacacttaccagacaatgccttacggctcatcctatggcattccttatagttatacggcctatggatcatcagatgccaaatctcaaaaaacagataatacagtccctttcaaaactcccagtaatgagatgactcccgttactattgatttggtaaagaaacagcttaaagacaggttggactccatgaaagaattgcacaaaacaaatcgacagcagcatgagaaacatctgcaaagccgagtggactctaccagggctattgaaagattagaagggtcttctgggggtattggtgaacggtataaatttttgcaagaaatgcgagggtatgtccaagacttgcttgagtgtttcagtgaaaaggtgccactgattaatgaacttgaatcagcaatacatcagctgtacaaacagcgagcttcccgccttgtccaaagacgacaagatgatattaaagatgaatcttcggagttttcaagccattcaaacaaagctctgatggcaccaaatcttgactcctttggacgcgatcgggcactgtatcaagagcatgcaaaacgtcgcattgcagagcgggaggccaggaggactcgtcgtagacaagccagagaacaaaccggtaagatggcagatcaccttgaaggcctttccagtgatgatgaagaaacttctacagatattactaatttcaatctggaaaaagatcgaatttcaaaagaatccggcaaagtttttgaagatgtccttgaaagtttctattcaattgactgtattaaatcacagtttgaagcatggcgttcaaaatactacacatcctacaaagatgcttacattggcctttgtttgccaaaattattcaaccccctcatacgacttcagctcctcacttggactcctcttgaggcaaaatgtcgtgactttgagaatatgctgtggtttgaatctttgctgttttatggttgtgaagaacgagagcaagaaaaagatgatgtagatgttgccctactacctaccattgtggaaaaggtgattcttcctaaactaacagtgatagctgaaaatatgtgggaccctttttctacaacacagacttcaagaatggtgggaattacactaaaattaatcaatggatatccttcagtagtgaatgcagaaaataaaaatacacaggtatacctaaaggcacttttattgagaatgagaagaactttagatgatgatgtatttatgcccttatatcccaaaaatgtcttagaaaataaaaattctgggccttacttgttttttcaacgacagttttggtcttcagttaagctgttaggcaattttcttcagtggtatggcattttctcaaataaaactctgcaagagttatcaatagatggtttattaaatcgatatattctcatggcttttcagaattcagaatatggagatgacagcatcaaaaaagcccaaaatgtaatcaattgtttccccaaacaatggttcatgaatctgaaaggagaaaggactatttctcagttagaaaacttttgccgataccttgtacacttagcggatacaatttatagaaatagtatcgggtgttctgatgtggaaaaaagaaatgcaagggaaaacataaaacagatagtaaaactccttgcaagtgttcgagctttggatcatgctatgtctgttgcaagtgaccacaatgtgaaagaatttaagtctttgatcgaaggaaaa

SEQ ID NO: 4342 - DNA, 7542 bp, Homo sapiens
  source 1..7542: mol_type = genomic DNA
atgtcgggatccacacagcctgtggcacagacgtggagggccactgagccccgctacccgccccacagcctttcctacccagtgcagatcgcccggacgcacacggacgtcgggctcctggagtaccagcaccactcccgcgactatgcctcccacctgtcgcccggctccatcatccagccccagcggcggaggccctccctgctgtctgagttccagcccgggaatgaacggtcccaggagctccacctgcggccagagtcccactcatacctgcccgagctggggaagtcagagatggagttcattgaaagcaagcgccctcggctagagctgctgcctgaccccctgctgcgaccgtcacccctgctggccacgggccagcctgcgggatctgaagacctcaccaaggaccgtagcctgacgggcaagctggaaccggtgtctccccccagccccccgcacactgaccctgagctggagctggtgccgccacggctgtccaaggaggagctgatccagaacatggaccgcgtggaccgagagatcaccatggtagagcagcagatctctaagctgaagaagaagcagcaacagctggaggaggaggctgccaagccgcccgagcctgagaagcccgtgtcaccgccgcccatcgagtcgaagcaccgcagcctggtgcagatcatctacgacgagaaccggaagaaggctgaagctgcacatcggattctggaaggcctggggccccaggtggagctgccgctgtacaaccagccctccgacacccggcagtatcatgagaacatcaaaataaaccaggcgatgcggaagaagctaatcttgtacttcaagaggaggaatcacgctcggaaacaatgggagcagaagttctgccagcgctatgaccagctcatggaggcctgggagaagaaggtggagcgcatcgagaacaacccccggcggcgggccaaggagagcaaggtgcgcgagtactacgagaagcagttccctgagatccgcaagcagcgcgagctgcaggagcgcatgcagagcagggtgggccagcggggcagtgggctgtccatgtcggccgcccgcagcgagcacgaggtgtcagagatcatcgatggcctctcagagcaggagaacctggagaagcagatgcgccagctggccgtgatcccgcccatgctgtacgacgctgaccagcagcgcatcaagttcatcaacatgaacgggcttatggccgaccccatgaaggtgtacaaagaccgccaggtcatgaacatgtggagtgagcaggagaaggagaccttccgggagaagttcatgcagcatcccaagaactttggcctgatcgcatcattcctggagaggaagacagtggctgagtgcgtcctctattactacctgactaagaagaatgagaactataagagcctggtgagacggagctatcggcgccgcggcaagagccagcagcagcaacaacagcagcagcagcagcagcagcagcagcagcagcagcccatgccccgcagcagccaggaggagaaagatgagaaggagaaggaaaaggaggcggagaaggaggaggagaagccggaggtggagaacgacaaggaagacctcctcaaggagaagacagacgacacctcaggggaggacaacgacgagaaggaggctgtggcctccaaaggccgcaaaactgccaacagccagggaagacgcaaaggccgcatcacccgctcaatggctaatgaggccaacagcgaggaggccatcaccccccagcagagcgccgagctggcctccatggagctgaatgagagttctcgctggacagaagaagaaatggaaacagccaagaaaggtctcctggaacacggccgcaactggtcggccatcgcccggatggtgggctccaagactgtgtcgcagtgtaagaacttctacttcaactacaagaagaggcagaacctcgatgagatcttgcagcagcacaagctgaagatggagaaggagaggaacgcgcggaggaagaagaagaaagcgccggcggcggccagcgaggaggctgcattcccgcccgtggtggaggatgaggagatggaggcgtcgggcgtgagcggaaatgaggaggagatggtggaggaggctgaagccttacatgcctctgggaatgaggtgcccagaggggaatgcagtggcccagccactgtcaacaacagctcagacaccgagagcatcccctctcctcacactgaggccgccaaggacacagggcagaatgggcccaagcccccagccaccctgggcgccgacgggccacccccagggccacccaccccaccaccggaggacatcccggcccccactgagcccaccccggcctctgaagccaccggagcccctacgcccccaccagcacccccatcgccctctgcacctcctcctgtggtccccaaggaggagaaggaggaggagaccgcagcagcgcccccagtggaggagggggaggagcagaagccccccgcggctgaggagctggcagtggacacagggaaggccgaggagcccgtcaagagcgagtgcacggaggaagccgaggaggggccggccaagggcaaggacgcggaggccgctgaggccacggccgagggggcgctcaaggcagagaagaaggagggcgggagcggcagggccaccacagccaagagctcgggcgccccccaggacagcgactccagtgctacctgcagtgcagacgaggtggatgaggccgagggcggcgacaagaaccggctgctgtccccaaggcccagcctcctcaccccgactggcgacccccgggccaatgcctcaccccagaagccactggacctgaagcagctgaagcagcgagcggctgccatcccccccatccaggtcaccaaagtccatgagcccccccgggaggacgcagctcccaccaagccagctcccccagccccaccgccaccgcaaaacctgcagccggagagcgacgcccctcagcagcctggcagcagcccccggggcaagagcaggagcccggcaccccccgccgacaaggaggccttcgcagccgaggcccagaagctgcctggggaccccccttgctggacttccggcctgcccttccccgtgcccccccgtgaggtgatcaaggcctccccgcatgccccggacccctcagccttctcctacgctccacctggtcacccactgcccctgggcctccatgacactgcccggcccgtcctgccgcgcccacccaccatctccaacccgcctcccctcatctcctctgccaagcaccccagcgtcctcgagaggcaaataggtgccatctcccaaggaatgtcggtccagctccacgtcccgtactcagagcatgccaaggccccggtgggccctgtcaccatggggctgcccctgcccatggaccccaaaaagctggcacccttcagcggagtgaagcaggagcagctgtccccacggggccaggctgggccaccggagagcctgggggtgcccacagcccaggaggcgtccgtgctgagagggacagctctgggctcagttccgggcggaagcatcaccaaaggcattcccagcacacgggtgccctcggacagcgccatcacataccgcggctccatcacccacggcacgccagctgacgtcctgtacaagggcaccatcaccaggatcatcggcgaggacagcccgagtcgcttggaccgcggccgggaggacagcctgcccaagggccacgtcatctacgaaggcaagaagggccacgtcttgtcctatgagggtggcatgtctgtgacccagtgctccaaggaggacggcagaagcagctcaggacccccccatgagacggccgcccccaagcgcacctatgacatgatggagggccgcgtgggcagagccatctcctcagccagcatcgaaggtctcatgggccgtgccatcccgccggagcgacacagcccccaccacctcaaagagcagcaccacatccgcgggtccatcacacaagggatccctcggtcctacgtggaggcacaggaggactacctgcgtcgggaggccaagctcctaaagcgggagggcacgcctccgcccccaccgccctcacgggacctgaccgaggcctacaagacgcaggccctgggccccctgaagctgaagccggcccatgagggcctggtggccacggtgaaggaggcgggccgctccatccatgagatcccgcgcgaggagctgcggcacacgcccgagctgcccctggccccgcggccgctcaaggagggctccatcacgcagggcaccccgctcaagtacgacaccggcgcgtccaccactggctccaaaaagcacgacgtacgctccctcatcggcagccccggccggacgttcccacccgtgcacccgctggatgtgatggccgacgcccgggcactggaacgtgcctgctacgaggagagcctgaagagccggccagggaccgccagcagctcggggggctccattgcgcgcggcgccccggtcattgtgcctgagctgggtaagccgcggcagagccccctgacctatgaggaccacggggcaccctttgccggccacctcccacgaggttcgcccgtgaccacgcgggagcccacgccgcgcctgcaggagggcagcctttcgtccagcaaggcatcccaggaccgaaagctgacgtcgacgcctcgtgagatcgccaagtccccgcacagcaccgtgcccgagcaccacccacaccccatctcgccctatgagcacctgcttcggggcgtgagtggcgtggacctgtatcgcagccacatccccctggccttcgaccccacctccataccccgcggcatccctctggacgcagccgctgcctactacctgccccgacacctggcccccaaccccacctacccgcacctgtacccaccctacctcatccgcggctaccccgacacggcggcgctggagaaccggcagaccatcatcaatgactacatcacctcgcagcagatgcaccacaacgcggccaccgccatggcccagcgagctgatatgctgaggggcctctcgccccgcgagtcctcgctggcactcaactacgctgcgggtccccgaggcatcatcgacctgtcccaagtgccacacctgcctgtgctcgtgcccccgacaccaggcaccccagccaccgccatggaccgccttgcctacctccccaccgcgccccagcccttcagcagccgccacagcagctccccactctccccaggaggtccaacacacttgacaaaaccaaccaccacgtcctcgtccgagcgggagcgagaccgggatcgagagcgggaccgggatcgggagcgggaaaagtccatcctcacgtccaccacgacggtggagcacgcacccatctggagacctggtacagagcagagcagcggcagcagcggcgggggtgggggcagcagcagccgccccgcctcccactcccatgcccaccagcactcgcccatctcccctcggacccaggatgccctccagcagagacccagtgtgcttcacaacacaggcatgaagggtatcatcaccgctgtggagcccagcacgcccacggtcctgaggtccacctccacctcctcacccgttcgcccggctgccacattcccacctgccacccactgcccactgggcggcaccctcgatggggtctaccctaccctcatggagcccgtcttgctgcccaaggaggccccccgggtcgcccggccagagcggccccgagcagacaccggccatgccttcctcgccaagcccccagcccgctccgggctggagcccgcctcctcccccagcaagggctcggagccccggcccctagtgcctcctgtctctggccacgccaccatcgcccgcacccctgcgaagaacctcgcacctcaccacgccagcccggacccgccggcgccacctgcctcggcctcggacccgcaccgggaaaagactcaaagtaaacccttttccatccaggaactggaactccgttctctgggttaccacggcagcagctacagccccgaaggggtggagcccgtcagccctgtgagctcacccagtctgacccacgacaaggggctccccaagcacctggaagagctcgacaagagccacctggagggggagctgcggcccaagcagccaggccccgtgaagcttggcggggaggccgcccacctcccacacctgcggccgctgcctgagagccagccctcgtccagcccgctgctccagaccgccccaggggtcaaaggtcaccagcgggtggtcaccctggcccagcacatcagtgaggtcatcacacaggactacacccggcaccacccacagcagctcagcgcacccctgcccgcccccctctactccttccctggggccagctgccccgtcctggacctccgccgcccacccagtgacctctacctcccgcccccggaccatggtgccccggcccgtggctccccccacagcgaagggggcaagaggtctccagagccaaacaagacgtcggtcttgggtggtggtgaggacggtattgaacctgtgtccccaccggagggcatgacggagccagggcactcccggagtgctgtgtacccgctgctgtaccgggatggggaacagacggagcccagcaggatgggctccaagtctccaggcaacaccagccagccgccagccttcttcagcaagctgaccgagagcaactccgccatggtcaagtccaagaagcaagagatcaacaagaagctgaacacccacaaccggaatgagcctgaatacaatatcagccagcctgggacggagatcttcaatatgcccgccatcaccggaacaggccttatgacctatagaagccaggcggtgcaggaacatgccagcaccaacatggggctggaggccataattagaaaggcactcatgggtaaatatgaccagtgggaagagtccccgccgctcagcgccaatgcttttaaccctctgaatgccagtgccagcctgcccgctgctatgcccataaccgctgctgacggacggagtgaccacacactcacctcgccaggtggcggcgggaaggccaaggtctctggcagacccagcagccgaaaagccaagtccccggccccgggcctggcatctggggaccggccaccctctgtctcctcagtgcactcggagggagactgcaaccgccggacgccgctcaccaaccgcgtgtgggaggacaggccctcgtccgcaggttccacgccattcccctacaaccccctgatcatgcggctgcaggcgggtgtcatggcttccccacccccaccgggcctccccgcgggcagcgggcccctcgctggcccccaccacgcctgggacgaggagcccaagccactgctctgctcgcagtacgagacactctccgacagcgag

SEQ ID NO: 4343 - DNA, 7374 bp, Homo sapiens
  source 1..7374: mol_type = genomic DNA
atgtcgggatccacacagcctgtggcacagacgtggagggccactgagccccgctacccgccccacagcctttcctacccagtgcagatcgcccggacgcacacggacgtcgggctcctggagtaccagcaccactcccgcgactatgcctcccacctgtcgcccggctccatcatccagccccagcggcggaggccctccctgctgtctgagttccagcccgggaatgaacggtcccaggagctccacctgcggccagagtcccactcatacctgcccgagctggggaagtcagagatggagttcattgaaagcaagcgccctcggctagagctgctgcctgaccccctgctgcgaccgtcacccctgctggccacgggccagcctgcgggatctgaagacctcaccaaggaccgtagcctgacgggcaagctggaaccggtgtctccccccagccccccgcacactgaccctgagctggagctggtgccgccacggctgtccaaggaggagctgatccagaacatggaccgcgtggaccgagagatcaccatggtagagcagcagatctctaagctgaagaagaagcagcaacagctggaggaggaggctgccaagccgcccgagcctgagaagcccgtgtcaccgccgcccatcgagtcgaagcaccgcagcctggtgcagatcatctacgacgagaaccggaagaaggctgaagctgcacatcggattctggaaggcctggggccccaggtggagctgccgctgtacaaccagccctccgacacccggcagtatcatgagaacatcaaaataaaccaggcgatgcggaagaagctaatcttgtacttcaagaggaggaatcacgctcggaaacaatgggagcagaagttctgccagcgctatgaccagctcatggaggcctgggagaagaaggtggagcgcatcgagaacaacccccggcggcgggccaaggagagcaaggtgcgcgagtactacgagaagcagttccctgagatccgcaagcagcgcgagctgcaggagcgcatgcagagggtgggccagcggggcagtgggctgtccatgtcggccgcccgcagcgagcacgaggtgtcagagatcatcgatggcctctcagagcaggagaacctggagaagcagatgcgccagctggccgtgatcccgcccatgctgtacgacgctgaccagcagcgcatcaagttcatcaacatgaacgggcttatggccgaccccatgaaggtgtacaaagaccgccaggtcatgaacatgtggagtgagcaggagaaggagaccttccgggagaagttcatgcagcatcccaagaactttggcctgatcgcatcattcctggagaggaagacagtggctgagtgcgtcctctattactacctgactaagaagaatgagaactataagagcctggtgagacggagctatcggcgccgcggcaagagccagcagcagcaacaacagcagcagcagcagcagcagcagcagcagcagcagcccatgccccgcagcagccaggaggagaaagatgagaaggagaaggaaaaggaggcggagaaggaggaggagaagccggaggtggagaacgacaaggaagacctcctcaaggagaagacagacgacacctcaggggaggacaacgacgagaaggaggctgtggcctccaaaggccgcaaaactgccaacagccagggaagacgcaaaggccgcatcacccgctcaatggctaatgaggccaacagcgaggaggccatcaccccccagcagagcgccgagctggcctccatggagctgaatgagagttctcgctggacagaagaagaaatggaaacagccaagaaaggtctcctggaacacggccgcaactggtcggccatcgcccggatggtgggctccaagactgtgtcgcagtgtaagaacttctacttcaactacaagaagaggcagaacctcgatgagatcttgcagcagcacaagctgaagatggagaaggagaggaacgcgcggaggaagaagaagaaagcgccggcggcggccagcgaggaggctgcattcccgcccgtggtggaggatgaggagatggaggcgtcgggcgtgagcggaaatgaggaggagatggtggaggaggctgaagccactgtcaacaacagctcagacaccgagagcatcccctctcctcacactgaggccgccaaggacacagggcagaatgggcccaagcccccagccaccctgggcgccgacgggccacccccagggccacccaccccaccaccggaggacatcccggcccccactgagcccaccccggcctctgaagccaccggagcccctacgcccccaccagcacccccatcgccctctgcacctcctcctgtggtccccaaggaggagaaggaggaggagaccgcagcagcgcccccagtggaggagggggaggagcagaagccccccgcggctgaggagctggcagtggacacagggaaggccgaggagcccgtcaagagcgagtgcacggaggaagccgaggaggggccggccaagggcaaggacgcggaggccgctgaggccacggccgagggggcgctcaaggcagagaagaaggagggcgggagcggcagggccaccacagccaagagctcgggcgccccccaggacagcgactccagtgctacctgcagtgcagacgaggtggatgaggccgagggcggcgacaagaaccggctgctgtccccaaggcccagcctcctcaccccgactggcgacccccgggccaatgcctcaccccagaagccactggacctgaagcagctgaagcagcgagcggctgccatcccccccatccaggtcaccaaagtccatgagcccccccgggaggacgcagctcccaccaagccagctcccccagccccaccgccaccgcaaaacctgcagccggagagcgacgcccctcagcagcctggcagcagcccccggggcaagagcaggagcccggcaccccccgccgacaaggaggcagagaagcctgtgttcttcccagccttcgcagccgaggcccagaagctgcctggggaccccccttgctggacttccggcctgcccttccccgtgcccccccgtgaggtgatcaaggcctccccgcatgccccggacccctcagccttctcctacgctccacctggtcacccactgcccctgggcctccatgacactgcccggcccgtcctgccgcgcccacccaccatctccaacccgcctcccctcatctcctctgccaagcaccccagcgtcctcgagaggcaaataggtgccatctcccaaggaatgtcggtccagctccacgtcccgtactcagagcatgccaaggccccggtgggccctgtcaccatggggctgcccctgcccatggaccccaaaaagctggcacccttcagcggagtgaagcaggagcagctgtccccacggggccaggctgggccaccggagagcctgggggtgcccacagcccaggaggcgtccgtgctgagagggacagctctgggctcagttccgggcggaagcatcaccaaaggcattcccagcacacgggtgccctcggacagcgccatcacataccgcggctccatcacccacggcacgccagctgacgtcctgtacaagggcaccatcaccaggatcatcggcgaggacagcccgagtcgcttggaccgcggccgggaggacagcctgcccaagggccacgtcatctacgaaggcaagaagggccacgtcttgtcctatgagggtggcatgtctgtgacccagtgctccaaggaggacggcagaagcagctcaggacccccccatgagacggccgcccccaagcgcacctatgacatgatggagggccgcgtgggcagagccatctcctcagccagcatcgaaggtctcatgggccgtgccatcccgccggagcgacacagcccccaccacctcaaagagcagcaccacatccgcgggtccatcacacaagggatccctcggtcctacgtggaggcacaggaggactacctgcgtcgggaggccaagctcctaaagcgggagggcacgcctccgcccccaccgccctcacgggacctgaccgaggcctacaagacgcaggccctgggccccctgaagctgaagccggcccatgagggcctggtggccacggtgaaggaggcgggccgctccatccatgagatcccgcgcgaggagctgcggcacacgcccgagctgcccctggccccgcggccgctcaaggagggctccatcacgcagggcaccccgctcaagtacgacaccggcgcgtccaccactggctccaaaaagcacgacgtacgctccctcatcggcagccccggccggacgttcccacccgtgcacccgctggatgtgatggccgacgcccgggcactggaacgtgcctgctacgaggagagcctgaagagccggccagggaccgccagcagctcggggggctccattgcgcgcggcgccccggtcattgtgcctgagctgggtaagccgcggcagagccccctgacctatgaggaccacggggcaccctttgccggccacctcccacgaggttcgcccgtgaccacgcgggagcccacgccgcgcctgcaggagggcagcctttcgtccagcaaggcatcccaggaccgaaagctgacgtcgacgcctcgtgagatcgccaagtccccgcacagcaccgtgcccgagcaccacccacaccccatctcgccctatgagcacctgcttcggggcgtgagtggcgtggacctgtatcgcagccacatccccctggccttcgaccccacctccataccccgcggcatccctctggacgcagccgctgcctactacctgccccgacacctggcccccaaccccacctacccgcacctgtacccaccctacctcatccgcggctaccccgacacggcggcgctggagaaccggcagaccatcatcaatgactacatcacctcgcagcagatgcaccacaacgcggccaccgccatggcccagcgagctgatatgctgaggggcctctcgccccgcgagtcctcgctggcactcaactacgctgcgggtccccgaggcatcatcgacctgtcccaagtgccacacctgcctgtgctcgtgcccccgacaccaggcaccccagccaccgccatggaccgccttgcctacctccccaccgcgccccagcccttcagcagccgccacagcagctccccactctccccaggaggtccaacacacttgacaaaaccaaccaccacgtcctcgtccgagcgggagcgagaccgggatcgagagcgggaccgggatcgggagcgggaaaagtccatcctcacgtccaccacgacggtggagcacgcacccatctggagacctggtacagagcagagcagcggcagcagcggcgggggtgggggcagcagcagccgccccgcctcccactcccatgcccaccagcactcgcccatctcccctcggacccaggatgccctccagcagagacccagtgtgcttcacaacacaggcatgaagggtatcatcaccgctgtggagcccagcacgcccacggtcctgaggtccacctccacctcctcacccgttcgcccggctgccacattcccacctgccacccactgcccactgggcggcaccctcgatggggtctaccctaccctcatggagcccgtcttgctgcccaaggaggccccccgggtcgcccggccagagcggccccgagcagacaccggccatgccttcctcgccaagcccccagcccgctccgggctggagcccgcctcctcccccagcaagggctcggagccccggcccctagtgcctcctgtctctggccacgccaccatcgcccgcacccctgcgaagaacctcgcacctcaccacgccagcccggacccgccggcgccacctgcctcggcctcggacccgcaccgggaaaagactcaaagtaaacccttttccatccaggaactggaactccgttctctgggttaccacggcagcagctacagccccgaaggggtggagcccgtcagccctgtgagctcacccagtctgacccacgacaaggggctccccaagcacctggaagagctcgacaagagccacctggagggggagctgcggcccaagcagccaggccccgtgaagcttggcggggaggccgcccacctcccacacctgcggccgctgcctgagagccagccctcgtccagcccgctgctccagaccgccccaggggtcaaaggtcaccagcgggtggtcaccctggcccagcacatcagtgaggtcatcacacaggactacacccggcaccacccacagcagctcagcgcacccctgcccgcccccctctactccttccctggggccagctgccccgtcctggacctccgccgcccacccagtgacctctacctcccgcccccggaccatggtgccccggcccgtggctccccccacagcgaagggggcaagaggtctccagagccaaacaagacgtcggtcttgggtggtggtgaggacggtattgaacctgtgtccccaccggagggcatgacggagccagggcactcccggagtgctgtgtacccgctgctgtaccgggatggggaacagacggagcccagcaggatgggctccaagtctccaggcaacaccagccagccgccagccttcttcagcaagctgaccgagagcaactccgccatggtcaagtccaagaagcaagagatcaacaagaagctgaacacccacaaccggaatgagcctgaatacaatatcagccagcctgggacggagatcttcaatatgcccgccatcaccggaacaggccttatgacctatagaagccaggcggtgcaggaacatgccagcaccaacatggggctggaggccataattagaaaggcactcatgggtggcggcgggaaggccaaggtctctggcagacccagcagccgaaaagccaagtccccggccccgggcctggcatctggggaccggccaccctctgtctcctcagtgcactcggagggagactgcaaccgccggacgccgctcaccaaccgcgtgtgggaggacaggccctcgtccgcaggttccacgccattcccctacaaccccctgatcatgcggctgcaggcgggtgtcatggcttccccacccccaccgggcctccccgcgggcagcgggcccctcgctggcccccaccacgcctgggacgaggagcccaagccactgctctgctcgcagtacgagacactctccgacagcgag

SEQ ID NO: 4344 - DNA, 7512 bp, Homo sapiens
  source 1..7512: mol_type = genomic DNA
atgtcgggatccacacagcctgtggcacagacgtggagggccactgagccccgctacccgccccacagcctttcctacccagtgcagatcgcccggacgcacacggacgtcgggctcctggagtaccagcaccactcccgcgactatgcctcccacctgtcgcccggctccatcatccagccccagcggcggaggccctccctgctgtctgagttccagcccgggaatgaacggtcccaggagctccacctgcggccagagtcccactcatacctgcccgagctggggaagtcagagatggagttcattgaaagcaagcgccctcggctagagctgctgcctgaccccctgctgcgaccgtcacccctgctggccacgggccagcctgcgggatctgaagacctcaccaaggaccgtagcctgacgggcaagctggaaccggtgtctccccccagccccccgcacactgaccctgagctggagctggtgccgccacggctgtccaaggaggagctgatccagaacatggaccgcgtggaccgagagatcaccatggtagagcagcagatctctaagctgaagaagaagcagcaacagctggaggaggaggctgccaagccgcccgagcctgagaagcccgtgtcaccgccgcccatcgagtcgaagcaccgcagcctggtgcagatcatctacgacgagaaccggaagaaggctgaagctgcacatcggattctggaaggcctggggccccaggtggagctgccgctgtacaaccagccctccgacacccggcagtatcatgagaacatcaaaataaaccaggcgatgcggaagaagctaatcttgtacttcaagaggaggaatcacgctcggaaacaatgggagcagaagttctgccagcgctatgaccagctcatggaggcctgggagaagaaggtggagcgcatcgagaacaacccccggcggcgggccaaggagagcaaggtgcgcgagtactacgagaagcagttccctgagatccgcaagcagcgcgagctgcaggagcgcatgcagagggtgggccagcggggcagtgggctgtccatgtcggccgcccgcagcgagcacgaggtgtcagagatcatcgatggcctctcagagcaggagaacctggagaagcagatgcgccagctggccgtgatcccgcccatgctgtacgacgctgaccagcagcgcatcaagttcatcaacatgaacgggcttatggccgaccccatgaaggtgtacaaagaccgccaggtcatgaacatgtggagtgagcaggagaaggagaccttccgggagaagttcatgcagcatcccaagaactttggcctgatcgcatcattcctggagaggaagacagtggctgagtgcgtcctctattactacctgactaagaagaatgagaactataagagcctggtgagacggagctatcggcgccgcggcaagagccagcagcagcaacaacagcagcagcagcagcagcagcagcagcagcagcagcccatgccccgcagcagccaggaggagaaagatgagaaggagaaggaaaaggaggcggagaaggaggaggagaagccggaggtggagaacgacaaggaagacctcctcaaggagaagacagacgacacctcaggggaggacaacgacgagaaggaggctgtggcctccaaaggccgcaaaactgccaacagccagggaagacgcaaaggccgcatcacccgctcaatggctaatgaggccaacagcgaggaggccatcaccccccagcagagcgccgagctggcctccatggagctgaatgagagttctcgctggacagaagaagaaatggaaacagccaagaaaggtctcctggaacacggccgcaactggtcggccatcgcccggatggtgggctccaagactgtgtcgcagtgtaagaacttctacttcaactacaagaagaggcagaacctcgatgagatcttgcagcagcacaagctgaagatggagaaggagaggaacgcgcggaggaagaagaagaaagcgccggcggcggccagcgaggaggctgcattcccgcccgtggtggaggatgaggagatggaggcgtcgggcgtgagcggaaatgaggaggagatggtggaggaggctgaagccactgtcaacaacagctcagacaccgagagcatcccctctcctcacactgaggccgccaaggacacagggcagaatgggcccaagcccccagccaccctgggcgccgacgggccacccccagggccacccaccccaccaccggaggacatcccggcccccactgagcccaccccggcctctgaagccaccggagcccctacgcccccaccagcacccccatcgccctctgcacctcctcctgtggtccccaaggaggagaaggaggaggagaccgcagcagcgcccccagtggaggagggggaggagcagaagccccccgcggctgaggagctggcagtggacacagggaaggccgaggagcccgtcaagagcgagtgcacggaggaagccgaggaggggccggccaagggcaaggacgcggaggccgctgaggccacggccgagggggcgctcaaggcagagaagaaggagggcgggagcggcagggccaccacagccaagagctcgggcgccccccaggacagcgactccagtgctacctgcagtgcagacgaggtggatgaggccgagggcggcgacaagaaccggctgctgtccccaaggcccagcctcctcaccccgactggcgacccccgggccaatgcctcaccccagaagccactggacctgaagcagctgaagcagcgagcggctgccatcccccccatccaggtcaccaaagtccatgagcccccccgggaggacgcagctcccaccaagccagctcccccagccccaccgccaccgcaaaacctgcagccggagagcgacgcccctcagcagcctggcagcagcccccggggcaagagcaggagcccggcaccccccgccgacaaggaggcagagaagcctgtgttcttcccagccttcgcagccgaggcccagaagctgcctggggaccccccttgctggacttccggcctgcccttccccgtgcccccccgtgaggtgatcaaggcctccccgcatgccccggacccctcagccttctcctacgctccacctggtcacccactgcccctgggcctccatgacactgcccggcccgtcctgccgcgcccacccaccatctccaacccgcctcccctcatctcctctgccaagcaccccagcgtcctcgagaggcaaataggtgccatctcccaaggaatgtcggtccagctccacgtcccgtactcagagcatgccaaggccccggtgggccctgtcaccatggggctgcccctgcccatggaccccaaaaagctggcacccttcagcggagtgaagcaggagcagctgtccccacggggccaggctgggccaccggagagcctgggggtgcccacagcccaggaggcgtccgtgctgagagggacagctctgggctcagttccgggcggaagcatcaccaaaggcattcccagcacacgggtgccctcggacagcgccatcacataccgcggctccatcacccacggcacgccagctgacgtcctgtacaagggcaccatcaccaggatcatcggcgaggacagcccgagtcgcttggaccgcggccgggaggacagcctgcccaagggccacgtcatctacgaaggcaagaagggccacgtcttgtcctatgagggtggcatgtctgtgacccagtgctccaaggaggacggcagaagcagctcaggacccccccatgagacggccgcccccaagcgcacctatgacatgatggagggccgcgtgggcagagccatctcctcagccagcatcgaaggtctcatgggccgtgccatcccgccggagcgacacagcccccaccacctcaaagagcagcaccacatccgcgggtccatcacacaagggatccctcggtcctacgtggaggcacaggaggactacctgcgtcgggaggccaagctcctaaagcgggagggcacgcctccgcccccaccgccctcacgggacctgaccgaggcctacaagacgcaggccctgggccccctgaagctgaagccggcccatgagggcctggtggccacggtgaaggaggcgggccgctccatccatgagatcccgcgcgaggagctgcggcacacgcccgagctgcccctggccccgcggccgctcaaggagggctccatcacgcagggcaccccgctcaagtacgacaccggcgcgtccaccactggctccaaaaagcacgacgtacgctccctcatcggcagccccggccggacgttcccacccgtgcacccgctggatgtgatggccgacgcccgggcactggaacgtgcctgctacgaggagagcctgaagagccggccagggaccgccagcagctcggggggctccattgcgcgcggcgccccggtcattgtgcctgagctgggtaagccgcggcagagccccctgacctatgaggaccacggggcaccctttgccggccacctcccacgaggttcgcccgtgaccacgcgggagcccacgccgcgcctgcaggagggcagcctttcgtccagcaaggcatcccaggaccgaaagctgacgtcgacgcctcgtgagatcgccaagtccccgcacagcaccgtgcccgagcaccacccacaccccatctcgccctatgagcacctgcttcggggcgtgagtggcgtggacctgtatcgcagccacatccccctggccttcgaccccacctccataccccgcggcatccctctggacgcagccgctgcctactacctgccccgacacctggcccccaaccccacctacccgcacctgtacccaccctacctcatccgcggctaccccgacacggcggcgctggagaaccggcagaccatcatcaatgactacatcacctcgcagcagatgcaccacaacgcggccaccgccatggcccagcgagctgatatgctgaggggcctctcgccccgcgagtcctcgctggcactcaactacgctgcgggtccccgaggcatcatcgacctgtcccaagtgccacacctgcctgtgctcgtgcccccgacaccaggcaccccagccaccgccatggaccgccttgcctacctccccaccgcgccccagcccttcagcagccgccacagcagctccccactctccccaggaggtccaacacacttgacaaaaccaaccaccacgtcctcgtccgagcgggagcgagaccgggatcgagagcgggaccgggatcgggagcgggaaaagtccatcctcacgtccaccacgacggtggagcacgcacccatctggagacctggtacagagcagagcagcggcagcagcggcgggggtgggggcagcagcagccgccccgcctcccactcccatgcccaccagcactcgcccatctcccctcggacccaggatgccctccagcagagacccagtgtgcttcacaacacaggcatgaagggtatcatcaccgctgtggagcccagcacgcccacggtcctgaggtccacctccacctcctcacccgttcgcccggctgccacattcccacctgccacccactgcccactgggcggcaccctcgatggggtctaccctaccctcatggagcccgtcttgctgcccaaggaggccccccgggtcgcccggccagagcggccccgagcagacaccggccatgccttcctcgccaagcccccagcccgctccgggctggagcccgcctcctcccccagcaagggctcggagccccggcccctagtgcctcctgtctctggccacgccaccatcgcccgcacccctgcgaagaacctcgcacctcaccacgccagcccggacccgccggcgccacctgcctcggcctcggacccgcaccgggaaaagactcaaagtaaacccttttccatccaggaactggaactccgttctctgggttaccacggcagcagctacagccccgaaggggtggagcccgtcagccctgtgagctcacccagtctgacccacgacaaggggctccccaagcacctggaagagctcgacaagagccacctggagggggagctgcggcccaagcagccaggccccgtgaagcttggcggggaggccgcccacctcccacacctgcggccgctgcctgagagccagccctcgtccagcccgctgctccagaccgccccaggggtcaaaggtcaccagcgggtggtcaccctggcccagcacatcagtgaggtcatcacacaggactacacccggcaccacccacagcagctcagcgcacccctgcccgcccccctctactccttccctggggccagctgccccgtcctggacctccgccgcccacccagtgacctctacctcccgcccccggaccatggtgccccggcccgtggctccccccacagcgaagggggcaagaggtctccagagccaaacaagacgtcggtcttgggtggtggtgaggacggtattgaacctgtgtccccaccggagggcatgacggagccagggcactcccggagtgctgtgtacccgctgctgtaccgggatggggaacagacggagcccagcaggatgggctccaagtctccaggcaacaccagccagccgccagccttcttcagcaagctgaccgagagcaactccgccatggtcaagtccaagaagcaagagatcaacaagaagctgaacacccacaaccggaatgagcctgaatacaatatcagccagcctgggacggagatcttcaatatgcccgccatcaccggaacaggccttatgacctatagaagccaggcggtgcaggaacatgccagcaccaacatggggctggaggccataattagaaaggcactcatgggtaaatatgaccagtgggaagagtccccgccgctcagcgccaatgcttttaaccctctgaatgccagtgccagcctgcccgctgctatgcccataaccgctgctgacggacggagtgaccacacactcacctcgccaggtggcggcgggaaggccaaggtctctggcagacccagcagccgaaaagccaagtccccggccccgggcctggcatctggggaccggccaccctctgtctcctcagtgcactcggagggagactgcaaccgccggacgccgctcaccaaccgcgtgtgggaggacaggccctcgtccgcaggttccacgccattcccctacaaccccctgatcatgcggctgcaggcgggtgtcatggcttccccacccccaccgggcctccccgcgggcagcgggcccctcgctggcccccaccacgcctgggacgaggagcccaagccactgctctgctcgcagtacgagacactctccgacagcgag

SEQ ID NO: 4345 - DNA, 7320 bp, Homo sapiens
  source 1..7320: mol_type = genomic DNA
atgtcaagttcaggttatcctcccaaccaaggagcattcagcacagaacaaagtcgttatcctcctcactctgtccagtatacatttcccaacacccgccaccagcaggagttcgcagtccctgattatcgttcctctcatcttgaagtgagtcaggcatcacagcttttgcagcaacagcagcagcaacagcttcgaaggcgaccttccttgctttcagaatttcacccaggttctgacaggcctcaagaaaggagaactagttatgaaccgtttcatccaggcccatccccagtggatcatgattcactggaatcgaagcgaccacgtctggaacaggtttctgattctcattttcagcgtgtcagtgctgcggttttgcctttagtgcacccgctgccagaagggctgagggcttctgcagatgctaagaaggatccagcattcggaggcaaacatgaagctccatcctctccaatttcggggcaaccatgtggagatgatcaaaatgcttcaccttcaaaactctcaaaggaagagttaatacagagtatggatcgtgtagatcgagaaattgcaaaagtagaacagcagatccttaaactgaaaaagaaacaacaacagcttgaagaagaggcagctaaacctcctgagcctgagaagcccgtgtcccctcctcctgtggagcagaaacaccgcagtattgtccaaattatttatgatgagaatcggaaaaaagcagaagaagctcataaaatttttgaaggtcttggcccaaaagttgaactgccactgtataaccagccatcagataccaaggtgtaccatgagaacatcaagacaaaccaggtgatgaggaaaaaactcattttattttttaaaagaagaaatcatgcaagaaaacaaagggaacaaaaaatctgccagcgttatgatcagctcatggaggcatgggagaaaaaagtggacagaatagaaaataatcctcggaggaaagctaaagaaagcaaaacaagggaatactatgaaaagcagtttccagaaattcgaaaacaaagagaacagcaagaaagatttcagcgagttgggcagaggggagctggtctttcagccaccattgctaggagtgagcatgagatttctgaaattattgatgggctctctgagcaggagaataatgagaaacaaatgcggcagctctctgtgattccacctatgatgtttgatgcagaacaaagacgagtcaagttcattaacatgaatgggcttatggaggaccctatgaaagtgtataaagataggcagtttatgaatgtttggactgaccatgaaaaggagatctttaaggacaagtttatccagcatccaaaaaactttggactaattgcatcatacttggagaggaagagtgttcctgattgtgttttgtattactatttaaccaagaaaaatgagaattataaagccctcgtcagaaggaattatgggaaacgcagaggcagaaaccagcaaattgctcgaccctcgcaagaagaaaaagtagaagaaaaagaagaggataaagcagaaaaaacagaaaaaaaagaagaagaaaagaaagatgaagaggaaaaagatgaaaaagaagactccaaagaaaataccaaggaaaaggacaagatagatggtacagcagaagaaactgaggaaagagagcaagccacaccccgggggcgaaagactgccaacagtcagggccgccgtaagggccggatcaccaggtccatgacaaacgaagctgcagctgccagtgctgcagccgcagcggctactgaagagcccccaccacctctgccaccgccaccagaacccatttctacagagcctgtggagacctctcgatggacagaagaagaaatggaagttgctaaaaaaggtctagtagaacatggtcgtaactgggcagcaattgctaaaatggtgggaacgaaaagtgaagctcaatgtaaaaacttctattttaactataaaaggcgacacaatcttgacaacctcttacagcagcataaacagaaaacttcacgaaaacctcgtgaagagcgagatgtgtctcaatgtgaaagtgtcgcttccactgtttctgctcaggaggatgaagatattgaagcctccaatgaagaagaaaatccagaagacagcgaagttgaagctgtcaagcccagcgaggacagtcctgaaaatgctacttctcgaggaaacacagaacctgcggttgagcttgagcccaccacggaaactgcacccagtacatctccctccttagcagttccaagtacaaaaccagctgaagatgaaagtgtggagacccaggtgaatgacagcatcagtgctgagacagcagagcagatggatgtagatcagcaggagcacagtgctgaagagggttctgtttgtgatcccccacccgctaccaaagctgactctgtggacgttgaagtgagggtgccagaaaaccatgcatctaaagttgaaggtgataataccaaagaaagagacttggatagagccagtgagaaggtggaacctagagatgaagatttggtggtagctcagcaaataaatgcccaaaggcccgagccccagtcagacaatgattccagtgccacgtgcagcgctgatgaggatgtggatggagagccagagaggcagagaatgtttcctatggactcaaagccttcactgttaaaccccactggatctatactcgtctcatctccgttaaaaccaaatccactggatctgccacagcttcagcatcgagctgctgttatcccaccaatggtatcctgcaccccatgtaacataccaattggaaccccagtgagcggctatgctctctaccagcgacacattaaagcaatgcatgagtcagcactcctggaggagcagcggcagagacaagaacagatagatttggaatgtagaagttctacaagtccatgtggcacatccaagagtccaaacagagagtgggaagtccttcagcctgctccacatcaagtgataactaatctccctgaaggcgttcggcttccgacaactcgaccaaccaggccaccgccccctctcatcccgtcatccaaaaccacagtggcttcagaaaaaccatcttttataatgggaggctccatctcacagggaacaccaggcacttatttgacttctcataatcaggcttcctacactcaagaaacacccaagccgtcagtgggatctatctctcttggactgccacggcaacaggaatctgccaaatcagctactttgccctacatcaagcaggaagaattttctccccgaagccaaaactcacaacctgagggtctgttggtcagggcccaacatgaaggtgtagtcagaggtaccgcaggagccatacaagaaggaagtataactcggggaactccaaccagcaaaatttcagtggagagcattccatccctacggggctctatcactcagggcaccccggctctgccccagactggcataccaacagaggctttggtgaaggggtccatttcgagaatgcccattgaagacagcagtcctgagaaaggcagagaggaagctgcatccaaaggccatgttatttatgaaggcaaaagtggacatatcttgtcatatgataatattaagaatgcccgagaagggactaggagtccaagaacagctcatgaaatcagtttaaagagaagctatgaatcagtggaaggaaatataaagcaagggatgtcaatgagggagtctcctgtatcagcaccgttagaggggctgatatgccgagcattacccagggggagtcctcattctgacctcaaagaaaggactgtattgtctggctccataatgcaggggacaccaagagcaacaactgaaagctttgaagatggccttaaatatcccaaacaaattaaaagggaaagtcctcccatacgagcatttgaaggtgccattaccaaaggaaaaccatatgatggcatcaccaccatcaaagaaatggggcgttccattcatgagattccaaggcaagatattttaactcaggaaagtcggaaaactccagaagtggtccagagcacacggccgataattgagggttccatttcccagggcacaccaataaagtttgacaacaactcaggtcaatctgccatcaaacacaatgtcaaatccttaatcacggggcctagcaaactatcccgtggaatgcctccgctggaaattgtgccagagaacataaaagtggtagaacggggaaaatatgaggatgtgaaagcaggcgagaccgtgcgttcccggcacacgtcagtggtaagctctggcccctccgttcttaggtccacactgcatgaagctcccaaagcacaactgagccctgggatttatgatgacaccagtgcacggaggacccctgtgagttatcaaaacaccatgtccagaggctcacccatgatgaacagaacttctgatgttacaatttcttctaacaagtctaccaatcatgaaaggaaatcgacactgacccctacccagagggaaagtatcccagcgaagtctccagtgcctggggtggaccctgtcgtgagccacagtccgtttgatccccatcacagaggcagcactgcaggcgaggtttatcggagccacctgcccacgcacttggatccagccatgccttttcacagggctttggatcctgcagcggctgcttacctgtttcagagacagctttcaccaactccaggttacccaagtcagtatcagctttacgcaatggagaacacaagacagacaatcttaaatgattacattacctcacaacagatgcaagtgaacttgcgtccagatgtggccagaggactctccccaagagagcagccactgggtctcccatacccagcaacgagaggaatcattgacctgaccaatatgcctccaacaattttagtgcctcatccagggggaacaagcactcctcccatggacagaatcacttatattcctggtacacagattactttccctcccaggccgtacaactctgcttccatgtctccaggacacccaacacaccttgcagctgctgcaagtgctgagagggaacgggaacgggagcgggagaaggagcgggagcgggaacggattgctgcagcttcctccgacctctacctgcggccaggctcagaacagcctggccgacctggcagtcatggatatgttcgctccccttccccttcagtaagaactcaggagaccatgttgcaacagagacccagtgttttccaaggaaccaatggaaccagtgtaatcacacctttggatccaactgctcagctacgaatcatgccactgcctgctgggggcccttcaataagccaaggcctgccagcctcccgttacaacactgctgcggatgccctggctgctcttgtggatgctgcagcttctgcaccccagatggatgtgtccaaaacaaaagagagtaagcatgaagctgccaggttagaagaaaatttgagaagcaggtcagcagcagttagtgaacagcagcagctagagcagaaaaccctggaggtggagaagagatctgttcagtgtttatacacttcttcagcctttccaagtggcaagccccagcctcattcttcagtagtttattctgaggctgggaaagataaagggcctcctccaaaatccagatatgaggaagagctaaggaccagagggaagactaccattactgcagctaacttcatagacgtgatcatcacccggcaaattgcctcggacaaggatgcgagggaacgtggctctcaaagttcagactcttctagtagcttatcttctcacaggtatgaaacacctagcgatgctattgaggtgataagtcctgccagctcacctgcgccaccccaggagaaactgcagacctatcagccagaggttgttaaggcaaatcaagcggaaaatgatcctaccagacaatatgaaggaccattacatcactatcgaccacagcaggaatcaccatctccccaacaacagctgcccccttcttcacaggcagagggaatggggcaagtgcccaggacccatcggctgatcacacttgctgatcacatctgtcaaattatcacacaagattttgctagaaatcaagtttcctcgcagactccccagcagcctcctacttctacattccagaactcaccttctgctttggtatctacacctgtgaggactaaaacatcaaaccgttacagcccagaatcccaggctcagtctgtccatcatcaaagaccaggttcaagggtctctccagaaaatcttgtggacaaatccaggggaagtaggcctggaaaatccccagagaggagtcacgtctcttcggagccctacgagcccatctccccaccccaggttccggttgtgcatgagaaacaggacagcttgctgctcttgtctcagaggggcgcagagcctgcagagcagaggaatgatgcccgctcaccagggagtataagctacttgccttcattcttcaccaagcttgaaaatacatcacccatggttaaatcaaagaagcaggagatttttcgtaagttgaactcctctggtggaggtgactctgatatggcagctgctcagccaggaactgagatctttaatctgccagcagttactacgtcaggctcagttagctctagaggccattcttttgctgatcctgccagtaatcttgggctggaagacattatcaggaaggctctcatgggaagctttgatgacaaagttgaggatcatggagttgtcatgtcccagcctatgggagtagtgcctggtactgccaacacctcagttgtgaccagtggtgagacacgaagagaggaaggggacccatcacctcattcaggaggagtttgcaaaccaaagctgatcagcaagtcaaacagcaggaaatctaagtctcctatacctgggcaaggctacttaggaacggaacggccctcttcagtctcctctgtacattcagaaggggattaccataggcagacgccagggtgggcctgggaagacaggccctcttcaacaggctcaactcagtttccttataaccctctgactatgcggatgctcagcagtactccaccaacaccgattgcatgtgctccctctgcggtgaaccaagcagctcctcaccaacagaacaggatctgggagcgagagcctgccccactgctctcagcacagtacgagaccctgtcggatagtgatgac

SEQ ID NO: 4346 - DNA, 2742 bp, Homo sapiens
  source 1..2742: mol_type = genomic DNA
atgtcaagttcaggttatcctcccaaccaaggagcattcagcacagaacaaagtcgttatcctcctcactctgtccagtatacatttcccaacacccgccaccagcaggatccagcattcggaggcaaacatgaagctccatcctctccaatttcggggcaaccatgtggagatgatcaaaatgcttcaccttcaaaactctcaaaggaagagttaatacagagtatggatcgtgtagatcgagaaattgcaaaagtagaacagcagatccttaaactgaaaaagaaacaacaacagcttgaagaagaggcagctaaacctcctgagcctgagaagcccgtgtcccctcctcctgtggagcagaaacaccgcagtattgtccaaattatttatgatgagaatcggaaaaaagcagaagaagctcataaaatttttgaaggtcttggcccaaaagttgaactgccactgtataaccagccatcagataccaaggtgtaccatgagaacatcaagacaaaccaggtgatgaggaaaaaactcattttattttttaaaagaagaaatcatgcaagaaaacaaagggaacaaaaaatctgccagcgttatgatcagctcatggaggcatgggagaaaaaagtggacagaatagaaaataatcctcggaggaaagctaaagaaagcaaaacaagggaatactatgaaaagcagtttccagaaattcgaaaacaaagagaacagcaagaaagatttcagcgagttgggcagaggggagctggtctttcagccaccattgctaggagtgagcatgagatttctgaaattattgatgggctctctgagcaggagaataatgagaaacaaatgcggcagctctctgtgattccacctatgatgtttgatgcagaacaaagacgagtcaagttcattaacatgaatgggcttatggaggaccctatgaaagtgtataaagataggcagtttatgaatgtttggactgaccatgaaaaggagatctttaaggacaagtttatccagcatccaaaaaactttggactaattgcatcatacttggagaggaagagtgttcctgattgtgttttgtattactatttaaccaagaaaaatgagaattataaagccctcgtcagaaggaattatgggaaacgcagaggcagaaaccagcaaattgctcgaccctcgcaagaagaaaaagtagaagaaaaagaagaggataaagcagaaaaaacagaaaaaaaagaagaagaaaagaaagatgaagaggaaaaagatgaaaaagaagactccaaagaaaataccaaggaaaaggacaagatagatggtacagcagaagaaactgaggaaagagagcaagccacaccccgggggcgaaagactgccaacagtcagggccgccgtaagggccggatcaccaggtccatgacaaacgaagctgcagctgccagtgctgcagccgcagcggctactgaagagcccccaccacctctgccaccgccaccagaacccatttctacagagcctgtggagacctctcgatggacagaagaagaaatggaagttgctaaaaaaggtctagtagaacatggtcgtaactgggcagcaattgctaaaatggtgggaacgaaaagtgaagctcaatgtaaaaacttctattttaactataaaaggcgacacaatcttgacaacctcttacagcagcataaacagaaaacttcacgaaaacctcgtgaagagcgagatgtgtctcaatgtgaaagtgtcgcttccactgtttctgctcaggaggatgaagatattgaagcctccaatgaagaagaaaatccagaagacagcgaaggtgcagaaaatagttctgatacagaaagtgctccttctccttcaccagttgaagctgtcaagcccagcgaggacagtcctgaaaatgctacttctcgaggaaacacagaacctgcggttgagcttgagcccaccacggaaactgcacccagtacatctccctccttagcagttccaagtacaaaaccagctgaagatgaaagtgtggagacccaggtgaatgacagcatcagtgctgagacagcagagcagatggatgtagatcagcaggagcacagtgctgaagagggttctgtttgtgatcccccacccgctaccaaagctgactctgtggacgttgaagtgagggtgccagaaaaccatgcatctaaagttgaaggtgataataccaaagaaagagacttggatagagccagtgagaaggtggaacctagagatgaagatttggtggtagctcagcaaataaatgcccaaaggcccgagccccagtcagacaatgattccagtgccacgtgcagcgctgatgaggatgtggatggagagccagagaggcagagaatgtttcctatggactcaaagccttcactgttaaaccccactggatctatactcgtctcatctccgttaaaaccaaatccactggatctgccacagcttcagcatcgagctgctgttatcccaccaatggtatcctgcaccccatgtaacataccaattggaaccccagtgagcggctatgctctctaccagcgacacattaaagcaatgcatgagtcagcactcctggaggagcagcggcagagacaagaacagatagatttggaatgtagaagttctacaagtccatgtggcacatccaagagtccaaacagagagtgggaaggtagg

SEQ ID NO: 4347 - DNA, 7011 bp, Homo sapiens
  source 1..7011: mol_type = genomic DNA
atgtcaagttcaggttatcctcccaaccaaggagcattcagcacagaacaaagtcgttatcctcctcactctgtccagtatacatttcccaacacccgccaccagcaggagttcgcagtccctgattatcgttcctctcatcttgaagtgagtcaggcatcacagcttttgcagcaacagcagcagcaacagcttcgaaggcgaccttccttgctttcagaatttcacccaggttctgacaggcctcaagaaaggagaactagttatgaaccgtttcatccaggcccatccccagtggatcatgattcactggaatcgaagcgaccacgtctggaacaggtttctgattctcattttcagcgtgtcagtgctgcggttttgcctttagtgcacccgctgccagaagggctgagggcttctgcagatgctaagaaggatccagcattcggaggcaaacatgaagctccatcctctccaatttcggggcaaccatgtggagatgatcaaaatgcttcaccttcaaaactctcaaaggaagagttaatacagagtatggatcgtgtagatcgagaaattgcaaaagtagaacagcagatccttaaactgaaaaagaaacaacaacagcttgaagaagaggcagctaaacctcctgagcctgagaagcccgtgtcccctcctcctgtggagcagaaacaccgcagtattgtccaaattatttatgatgagaatcggaaaaaagcagaagaagctcataaaatttttgaaggtcttggcccaaaagttgaactgccactgtataaccagccatcagataccaaggtgtaccatgagaacatcaagacaaaccaggtgatgaggaaaaaactcattttattttttaaaagaagaaatcatgcaagaaaacaaagggaacaaaaaatctgccagcgttatgatcagctcatggaggcatgggagaaaaaagtggacagaatagaaaataatcctcggaggaaagctaaagaaagcaaaacaagggaatactatgaaaagcagtttccagaaattcgaaaacaaagagaacagcaagaaagatttcagcgagttgggcagaggggagctggtctttcagccaccattgctaggagtgagcatgagatttctgaaattattgatgggctctctgagcaggagaataatgagaaacaaatgcggcagctctctgtgattccacctatgatgtttgatgcagaacaaagacgagtcaagttcattaacatgaatgggcttatggaggaccctatgaaagtgtataaagataggcagtttatgaatgtttggactgaccatgaaaaggagatctttaaggacaagtttatccagcatccaaaaaactttggactaattgcatcatacttggagaggaagagtgttcctgattgtgttttgtattactatttaaccaagaaaaatgagaattataaagccctcgtcagaaggaattatgggaaacgcagaggcagaaaccagcaaattgctcgaccctcgcaagaagaaaaagtagaagaaaaagaagaggataaagcagaaaaaacagaaaaaaaagaagaagaaaagaaagatgaagaggaaaaagatgaaaaagaagactccaaagaaaataccaaggaaaaggacaagatagatggtacagcagaagaaactgaggaaagagagcaagccacaccccgggggcgaaagactgccaacagtcagggccgccgtaagggccggatcaccaggtccatgacaaacgaagctgcagctgccagtgctgcagccgcagcggctactgaagagcccccaccacctctgccaccgccaccagaacccatttctacagagcctgtggagacctctcgatggacagaagaagaaatggaagttgctaaaaaaggtctagtagaacatggtcgtaactgggcagcaattgctaaaatggtgggaacgaaaagtgaagctcaatgtaaaaacttctattttaactataaaaggcgacacaatcttgacaacctcttacagcagcataaacagaaaacttcacgaaaacctcgtgaagagcgagatgtgtctcaatgtgaaagtgtcgcttccactgtttctgctcaggaggatgaagatattgaagcctccaatgaagaagaaaatccagaagacagcgaaggtgcagaaaatagttctgatacagaaagtgctccttctccttcaccagttgaagctgtcaagcccagcgaggacagtcctgaaaatgctacttctcgaggaaacacagaacctgcggttgagcttgagcccaccacggaaactgcacccagtacatctccctccttagcagttccaagtacaaaaccagctgaagatgaaagtgtggagacccaggtgaatgacagcatcagtgctgagacagcagagcagatggatgtagatcagcaggagcacagtgctgaagagggttctgtttgtgatcccccacccgctaccaaagctgactctgtggacgttgaagtgagggtgccagaaaaccatgcatctaaagttgaaggtgataataccaaagaaagagacttggatagagccagtgagaaggtggaacctagagatgaagatttggtggtagctcagcaaataaatgcccaaaggcccgagccccagtcagacaatgattccagtgccacgtgcagcgctgatgaggatgtggatggagagccagagaggcagagaatgtttcctatggactcaaagccttcactgttaaaccccactggatctatactcgtctcatctccgttaaaaccaaatccactggatctgccacagcttcagcatcgagctgctgttatcccaccaatggtatcctgcaccccatgtaacataccaattggaaccccagtgagcggctatgctctctaccagcgacacattaaagcaatgcatgagtcagcactcctggaggagcagcggcagagacaagaacagatagatttggaatgtagaagttctacaagtccatgtggcacatccaagagtccaaacagagagtgggaagtccttcagcctgctccacatcaagtgataactaatctccctgaaggcgttcggcttccgacaactcgaccaaccaggccaccgccccctctcatcccgtcatccaaaaccacagtggcttcagaaaaaccatcttttataatgggaggctccatctcacagggaacaccaggcacttatttgacttctcataatcaggcttcctacactcaagaaacacccaagccgtcagtgggatctatctctcttggactgccacggcaacaggaatctgccaaatcagctactttgccctacatcaagcaggaagaattttctccccgaagccaaaactcacaacctgagggtctgttggtcagggcccaacatgaaggtgtagtcagaggtaccgcaggagccatacaagaaggaagtataactcggggaactccaaccagcaaaatttcagtggagagcattccatccctacggggctctatcactcagggcaccccggctctgccccagactggcataccaacagaggctttggtgaaggggtccatttcgagaatgcccattgaagacagcagtcctgagaaaggcagagaggaagctgcatccaaaggccatgttatttatgaaggcaaaagtggacatatcttgtcatatgataatattaagaatgcccgagaagggactaggagtccaagaacagctcatgaaatcagtttaaagagaagctatgaatcagtggaaggaaatataaagcaagggatgtcaatgagggagtctcctgtatcagcaccgttagaggggctgatatgccgagcattacccagggggagtcctcattctgacctcaaagaaaggactgtattgtctggctccataatgcaggggacaccaagagcaacaactgaaagctttgaagatggccttaaatatcccaaacaaattaaaagggaaagtcctcccatacgagcatttgaaggtgccattaccaaaggaaaaccatatgatggcatcaccaccatcaaagaaatggggcgttccattcatgagattccaaggcaagatattttaactcaggaaagtcggaaaactccagaagtggtccagagcacacggccgataattgagggttccatttcccagggcacaccaataaagtttgacaacaactcaggtcaatctgccatcaaacacaatgtcaaatccttaatcacggggcctagcaaactatcccgtggaatgcctccgctggaaattgtgccagagaacataaaagtggtagaacggggaaaatatgaggatgtgaaagcaggcgagaccgtgcgttcccggcacacgtcagtggtaagctctggcccctccgttcttaggtccacactgcatgaagctcccaaagcacaactgagccctgggatttatgatgacaccagtgcacggaggacccctgtgagttatcaaaacaccatgtccagaggctcacccatgatgaacagaacttctgatgttacaatttcttctaacaagtctaccaatcatgaaaggaaatcgacactgacccctacccagagggaaagtatcccagcgaagtctccagtgcctggggtggaccctgtcgtgagccacagtccgtttgatccccatcacagaggcagcactgcaggcgaggtttatcggagccacctgcccacgcacttggatccagccatgccttttcacagggctttggatcctgcagcggctgcttacctgtttcagagacagctttcaccaactccaggttacccaagtcagtatcagctttacgcaatggagaacacaagacagacaatcttaaatgattacattacctcacaacagatgcaagtgaacttgcgtccagatgtggccagaggactctccccaagagagcagccactgggtctcccatacccagcaacgagaggaatcattgacctgaccaatatgcctccaacaattttagtgcctcatccagggggaacaagcactcctcccatggacagaatcacttatattcctggtacacagattactttccctcccaggccgtacaactctgcttccatgtctccaggacacccaacacaccttgcagctgctgcaagtgctgagagggaacgggaacgggagcgggagaaggagcgggagcgggaacggattgctgcagcttcctccgacctctacctgcggccaggctcagaacagcctggccgacctggcagtcatggatatgttcgctccccttccccttcagtaagaactcaggagaccatgttgcaacagagacccagtgttttccaaggaaccaatggaaccagtgtaatcacacctttggatccaactgctcagctacgaatcatgccactgcctgctgggggcccttcaataagccaaggcctgccagcctcccgttacaacactgctgcggatgccctggctgctcttgtggatgctgcagcttctgcaccccagatggatgtgtccaaaacaaaagagatatcttctcacaggtatgaaacacctagcgatgctattgaggtgataagtcctgccagctcacctgcgccaccccaggagaaactgcagacctatcagccagaggttgttaaggcaaatcaagcggaaaatgatcctaccagacaatatgaaggaccattacatcactatcgaccacagcaggaatcaccatctccccaacaacagctgcccccttcttcacaggcagagggaatggggcaagtgcccaggacccatcggctgatcacacttgctgatcacatctgtcaaattatcacacaagattttgctagaaatcaagtttcctcgcagactccccagcagcctcctacttctacattccagaactcaccttctgctttggtatctacacctgtgaggactaaaacatcaaaccgttacagcccagaatcccaggctcagtctgtccatcatcaaagaccaggttcaagggtctctccagaaaatcttgtggacaaatccaggggaagtaggcctggaaaatccccagagaggagtcacgtctcttcggagccctacgagcccatctccccaccccaggttccggttgtgcatgagaaacaggacagcttgctgctcttgtctcagaggggcgcagagcctgcagagcagaggaatgatgcccgctcaccagggagtataagctacttgccttcattcttcaccaagcttgaaaatacatcacccatggttaaatcaaagaagcaggagatttttcgtaagttgaactcctctggtggaggtgactctgatatggcagctgctcagccaggaactgagatctttaatctgccagcagttactacgtcaggctcagttagctctagaggccattcttttgctgatcctgccagtaatcttgggctggaagacattatcaggaaggctctcatgggaagctttgatgacaaagttgaggatcatggagttgtcatgtcccagcctatgggagtagtgcctggtactgccaacacctcagttgtgaccagtggtgagacacgaagagaggaaggggacccatcacctcattcaggaggagtttgcaaaccaaagctgatcagcaagtcaaacagcaggaaatctaagtctcctatacctgggcaaggctacttaggaacggaacggccctcttcagtctcctctgtacattcagaaggggattaccataggcagacgccagggtgggcctgggaagacaggccctcttcaacaggctcaactcagtttccttataaccctctgactatgcggatgctcagcagtactccaccaacaccgattgcatgtgctccctctgcggtgaaccaagcagctcctcaccaacagaacaggatctgggagcgagagcctgccccactgctctcagcacagtacgagaccctgtcggatagtgatgac

SEQ ID NO: 4348 - DNA, 3177 bp, Homo sapiens
  source 1..3177: mol_type = genomic DNA
atgtcaggtgtgatggtcggctcccacgcggacatggcgccggcctctactgcggagggggccggggagaagccaggccctgcggcccctgccccggcggcccagtacgaatgtggggagtgtggcaagtcattccggtggtcgtcccggctcctgcaccaccagcgcacgcacacaggcgagcggccctacaagtgcccagactgccccaaggctttcaaaggctcctcggccctgctctaccaccagcgaggccacacgggcgagcggccctaccagtgccccgactgtcccaaggccttcaagcgctcctctctgctgcagatccaccgtagcgtgcacaccggcctgcgggccttcatctgcggccagtgcggcctggccttcaagtggtcgtcccactaccagtaccacttaaggcagcacacaggcgagcgcccctacccgtgcccggactgccccaaggccttcaagaactcgtccagcctgcggcgccaccgccacgtgcacaccggcgagcggccctacacctgtggagtctgcgggaagagcttcacgcagagcaccaacctgcggcagcaccagcgcgtgcacacgggcgagcggcccttccgctgcccgctctgccccaagaccttcacccactcctccaacctgctgctgcaccagcgcacgcacggcgccgcccccgccccgggtaccgcctccgcggccccgcccccccagtcccgggagcccggcaaggtcttcgtgtgcgacgcctacctgcagcggcacctccagccccacagcccgcccgcgcctcccgccccgccgcccccgcccccgcccgtggtgcctgagctctttttggcggcggcggagaccacggtggagctggtgtaccgctgcgatggctgcgagcagggattcagcagcgaggagctgctcctggagcaccagccgtgccccgggcccgatgcggcgccccagccccaggaggcacccgccgaggcgcccaaggccgaccagccaccgtcccctctgccgcagccccctcctcccgccgccgcccccgcgcctggctttgcctgtctgccctgcggcaagtccttccggacggtggctgggctctcccgccaccagcacagccacggggctgccggcgggcaagcgttccgctgcggcagctgcgacggctccttcccgcagctggccagcctcctggcgcatcagcagtgccacgtggaagaggccgcggccgggcgcccgcccccgcaggctgaggctgcggaggtgacctgcccccaggaaccgctggcgcctgccgcccccgtcccgccgccacccccgtccgcccccgcttctgcggagcggccctacaaatgtgccgagtgcggcaagtccttcaagggctcctccgggctgcgctaccacctgcgggaccacacgggcgagcggccctaccagtgtggcgagtgcggcaaggccttcaagcgctcctccctgctggccatccaccagcgggtgcacacgggcctgcgggccttcacctgtggccagtgcggcctcaccttcaagtggtcgtcccactaccagtaccacctgcggctgcactctggcgagcggccctacgcctgcggggagtgtggcaaggccttccgcaacacgtcgtgcctgcgtcgccaccgccacgtgcacactggcgagaggccccacgcctgcggtgtctgcggcaagagcttcgcgcagacctccaacctgcggcagcaccagcgcgtgcacacgggcgagcggcccttccgctgcccgctctgccccaagaccttcacccactcctccaacctgctgctgcaccagcgcacgcactcggcggagcgccccttcacctgccccatctgcggtcgcggcttcgttatggccgcctatctgcagcggcacctgaggacgcacgccccggccaacacgcctcccagcaccacagcccctgccgccggcccccagccccctgctccactggctgctgcgcgggccccgccagccacccaagatgtccacgtcctgccccacctccaggccacgctctccctcgaggtggcggggggcacggcccaggccccgagcttggggccagcagcgcccaactctcagacgttcctcctggtgcaaactgcccagggcctccagctgatccccagcagcgtgcagccccctacacctccgccccctcccgcacctcccaagctcatcctgctgccctcctccagtgctggggctgggggcggccgtgcaaggcagggcccgcgggcagtggggaaagcgggccagggggcgggagtggtctggctgccaggccctgggggtctaggggtgcagggagcggccagcgctggggccagcgggacagggcagagcctcatcgttctgcagaatgtggggggtggggaggcagggccacaggaaatgagtggggtgcagctccagcccctccgaccagccccagaagtaaccacggtccagctccagccagcgcaggaggtgaccacagtccagctccagccagcacaggaagtaaccacggtccagctccagccagcacaggaggtgaccacggtccagctccagcccgtggccggccagctctccaattccagtgggggagctgtggctactgaggcacccaacctgctggttgttcagagcggggcagctgaggagttgctcactggcccgggccccggggaggcgggggatggcgaggccagcactggtgtggtccaggatgtcctctttgagacactccagacggacgagggcttgcagagcgtgctggtgctgagcggggccgatggcgaacagactcgactctgcgtacaggaggtagaaacacttcctcctgggctgacggagccgcctgccaccggcccacccggacagaaactcctcatcatccgcagcgccccagccactgagctgctggacagcagcaacactggaggaggcaccgccacgctgcagctcctggccccaccgccgtcaggcccagcctcgggccccgcggggctccccggggctccagcctcccagatggtgcaagtggtccccgcaggagctgggcctggtgttatgacccctcagggcctgccctccatccagattgtccagactctacccgcagtccagctggtgcacacgttt

SEQ ID NO: 4349 - DNA, 2607 bp, Homo sapiens
  source 1..2607: mol_type = genomic DNA
atggagcccgagactgcgctgtggggcccggatctgcagggtccggaacagagccccaacgatgctcacagaggtgccgagagtgaaaacgaagaggagagccctcggcaggaaagttctggggaggagatcatcatgggagacccggctcagagtccagaatccaaggactcaacagagatgtccctggagagatcctcccaggacccctctgtcccccagaaccccccaaccccactgggtcactccaatcccttggaccaccagatccccctggaccccccagccccggaggtagtccctaccccatctgactggaccaaggcctgcgaggccagctggcagtggggcgctctcaccacatggaacagccccccagtcgtccccgccaacgagcccagcctgcgggagctggtgcagggccgcccggcgggggcggagaagccctacatctgcaacgagtgcggcaagagcttcagccagtggtccaagctgctgcggcaccagcgcatccacacgggagagcggcccaacacctgctccgagtgcggcaagagcttcacgcagagctcgcacctggtgcagcaccagcgcacgcacaccggcgagaagccctacaagtgccccgactgcggcaagtgcttcagctggagctccaacctggtgcagcaccagcgcacgcacacgggagagaagccctacaagtgcacggagtgcgagaaagccttcacccagagcaccaacctcatcaagcaccagcgatcccacaccggcgagaagccctacaagtgcggcgagtgccgccgggctttctaccgcagctcggacctcatccagcaccaggccacccacacaggcgagaaaccctacaagtgccccgagtgcgggaagcgcttcggccagaaccacaacctcctcaagcaccagaagatccacgcgggcgagaagccataccgctgcaccgagtgcgggaagagcttcatccagagctcggagctgacccagcaccagcgcacgcacacaggcgagaagccctacgagtgcctagagtgcggcaagagcttcggccacagctccaccctcatcaagcaccagcggactcacctgcgcgaggacccgttcaagtgcccagtgtgcggcaagaccttcaccctgagcgccacgttgctgcggcaccagcgcacgcacacgggcgagcggccctacaagtgcccagagtgcggcaagagcttcagcgtcagctccaacctcatcaaccaccagcgcatccaccgcggcgagcggccctacatctgcgccgactgcggcaagagcttcatcatgagctccacccttatccgccaccagcgcatccacaccggtgagaagccctacaagtgttccgactgcggcaagagcttcatccgcagctcccaccttatccagcaccgccgcacgcacaccggcgagaagccctacaagtgccccgagtgcggcaagagcttcagccagagctccaaccttattacccacgtccgcacgcacatggacgagaacctgttcgtgtgctccgactgcgggaaggccttcctggaagcccacgagctggagcagcaccgggtgatccatgagagggggaagaccccagcgcgtagggcccagggcgacagcctgctggggctcggggacccctccctgctgaccccgccgccgggagccaagccgcacaagtgtctcgtgtgcggaaagggcttcaacgacgagggcatcttcatgcaacatcagaggatccacatcggagaaaacccctacaaaaatgcagacggcctcatcgcacacgcagcccccaaacctcctcagttacgatccccaaggctccctttcagagggaattcctaccccggggctgcggagggcagagcggaggcccccggacagccccttaagccgccggagggtcaggagggcttcagccagaggcgggggctgctgtcctccaagacctacatctgctcccactgcggagagagcttcctggatcgctctgtgctcctccagcatcagctcacccacggcaacgaaaagccctttctctttcctgattatagaattggcctaggggaaggcgcagggcccagccccttcttaagtgggaagccctttaaatgccctgaatgcaaacaaagctttggcctcagctctgagctgctgctgcaccagaaagtccatgcaggcgggaagagctcccagaagagtccagagctggggaagagctcttccgtcctcctggagcatctcaggagccccctgggggccagaccctaccgctgctcagattgcagggcctccttcctcgaccgcgtggccctcacccggcaccaagaaacccacacccaggaaaaaccccccaatcccgaggacccccctccagaggcagtcaccctgtccacagatcaggaaggtgagggcgagacccctacccccacagagagcagcagccatggggaagggcaaaaccccaaaaccctagtggaagaaaagccctatctgtgccccgagtgtggagccggcttcacagaagtcgcagccctcctgctccataggagctgccacccaggtgtctccctg

SEQ ID NO: 4350 - DNA, 2595 bp, Homo sapiens
  source 1..2595: mol_type = genomic DNA
atgtctttgcaagactccactctttccagagaggggaaaccagagggagagattatggctgctgtgtttttctcagttggacgcctgagccctgaagttacccagccagatgaagatcttcaccttcaggcagaagaaacacaattggtaaaggaatcggtgacatttaaggatgtggctatagacttcacattggaggagtggaggttgatggaccctacacagaggaacctgcacaaggatgtgatgctagagaattacaggaatctggtctccctggggcttgcagtttccaaaccagacatgatatctcatttggagaatgggaaaggaccatgggtgacggtgagagaaatttcaagaattccctatcctgacatggagcccaaacctgcaaccaagaaggctacacgaacaaaggctatttctgaagatttatcacaggaggccatactagagaaacttacagagaatggtctgtgggattccagaatggaagggttatggaaatggaatgataggatattgagattacaaaataatcaggagaatcatttgagtcaaagaataattccactcaagaagactcccactagtcaaagaggctttagatttgaatctattcttattccagaaccaggcattgccacagaagagcttcacagcagatgccaaacacaagaggaaaatttcacagagaatttaaatttgattacagatacccatttggggaagataatttgcaaggagatgaaaggcagcaaagccataaggcagacttcagaactaactttggggaaaaaatccaataataaggaaaaaccctacaaatgtagtacatgcgaaaaggcctttcattatagatcattgctcattcaacatcaaagaactcatactaaagaaaaaccttatgaatgtaatgaatgtgggaaaacattcagccagccttcatatctcagtcagcacaaaaaaatccacactggagaaaaaccctataaatgtaatgaatgtggaaaggccttcattgcttcttcatcacttatggtacatcagagaattcacactaaagagaaaccttatcagtgtaatgtgtgtgggaaatcttttagccagtgtgcccgtcttaatcagcaccagagaattcaaactggagagaaaccctataaatgtagtgaatgcgggaaagcttttagtgataaatcaaaacttgcaagacatcaggaaactcacaatggtgagaaaccctacaaatgtgatgattgtgggaaagcctttaggaacaagtcatatcttagtgtacatcagaagacccacactgaagagaaaccatatcagtgcaacgagtgtgggaagtcttttaagaataccacaatttttaatgtgcatcagaggattcatactggagagaaaccttttagatgtaacgaatgtggaaaagcctatagaagtaattcaagccttatcgtacatataagaactcacactggggaaaaaccctatgaatgtaatgaatgtgggaaagcattcaaccgcatcgcaaatttcacagaacatcagcgaattcacacaggagaaaaaccctataaatgtaatgaatgtgggaaagcattcattaattattcatgccttactgtacaccacagaatgcatacaggagagaaaccttataaatgtactgaatgtggaaaggccttcatgcgttcttcttctctaattatacatcagcgtattcatactgaagagaaaccttatctgtgcaatgaatgtggggagtctttcagaataaaatcacacttaactgtacatcagagaattcacactggagagaaaccatataaatgtactgactgcgagagggcattcaccaaaatggtaaatctcaaggagcatcagaaaattcatactggagtgaaaccctataaatgttatgactgtggaaagtcctttaggactaaatcataccttattgtacatcagaggacccatactggagaaaaaccatataaatgtaatgaatgtgagaaagccttcactaatacatcacagcttaccgtgcaccaacgaaggcatactggagagaagccctataaatgcaatgaatgtggaaaggttttcacaagtaactcaggctttaatacacatcaaagaacacatactggagagaaaccatttaaatgtaatgactgtgggaaagcatttagccagatggtacatgtcacagaacatcagaaaatccatagtggagagaagccctataagtgtgatgtctgtggaaaagccttcaggaggggttcttaccttacagtgcattggagaacacacactggagaaaaaccctacacctgtaaggaatgtggaaagggttgtattactctatcacagctaaccctacatcagagaattcatactggggagaggccctataaatgtgaagaatgtggaaaagccttcagaactaactcagactttactgtacacttgaggatgcatactggagaaaaaccctataaatgtaatgaatgtggaaaagccttcaggagtagttcgagccttactgtacatcaaagaatacatcaaagagaaactcagttaata

SEQ ID NO: 4351 - DNA, 1116 bp, Homo sapiens
  source 1..1116: mol_type = genomic DNA
atggattcagtggtctttgaggatgtagatgtgaacttcacccaggaggagtgggctttgctggatccttcccagaagaatctctacagagatgtgatgcaggaaaccttcaggaacctggcttctgtaggaaaaaaatggaaagatcagaaaattgaagatgagtacaaaaatcccaggagaaacctaagaggtcttatgggagagagactcttagaaagtaagaaagatcatcagcatggagaaattttgacccaggttccagatgacatgctgaagaagaaaactccccgagtaaaatcatgtggagaagtcagcgtgggtcatgcatcccttaataggcaccacagagctgacactggacacaagccatatgagtatcaggaatatggacagaagccatataaatgtacatactgtaagaaagccttcagtgatctcccctactttcgaacacatgaatgggctcacactggggggaaaccttatgattgtgaggaatgtggaaaaagctttatttcccgttcaagcattcgaagacacaggataatgcacagtggagatggaccctacaaatgtaacttttgtgggaaagccttgatgtgtctcagtttgtatcttatccacaaacgaactcacactggagagaaaccatatgaatgtaaacagtgtggtaaagcctttagtcattctggtagccttcgaatacatgaaagaactcacactggagagaagccttatgaatgcagtgagtgtgggaaagcattccatagttccacatgcctccatgcacataaaataactcacactggggagaagccgtatgaatgtaaacagtgtgggaaagcctttgtttctttcaattccgttcgatatcatgaaagaactcacactggagagaagccctatgaatgtaagcaatgtgggaaagccttcagatctgcctcgcaccttcgaacacatggaaggactcacactggagagaaaccctatgaatgtaaacaatgtggtaaagcctttggatgtgcctcgagcgttaaaatccatgaaaggactcacactggagaaaaaccctgtagctccaacacttcgaaaggccaaggcgagaagattgct

SEQ ID NO: 4352 - DNA, 1584 bp, Homo sapiens
  source 1..1584: mol_type = genomic DNA
atgggaccattgcaatttagagatgtggccatagaattctctctggaggagtggcattgcctggacactgcacagcggaatttatataggaatgtgatgttagagaactacagtaacctggtcttccttggtattactgtttctaagccagacctgatcacctgtctggagcaaggaagaaaacctttgaccatgaagagaaatgagatgatagccaaaccctcagtaatgtgttctcattttgcccaagacctttggccagagcagagcatgaaagattctttccaaaaagtggtactgagaagatatgaaaaatgtgaacatgacaatttacagttaaaaaaaggatgtataagtgtggatgagtgtaaggtgcacaaagaaggttataatgaacttaaccaatgtttgacaactaccccaagaaaaatatgtcaatgtgataaatatgtgaaagtccttcatcaatttccaaattcaaacggacaaaagagaggacatactgggaaaaaacctttcaaatatatagaatgtggcaaagcttttaagcagttctcaactcttactacacataagaaaattcatactggagggaaaccctacaaatgtgaagaatgtggcaaagcctttaaccactcttgtagccttactagacataagaaaattcatactggagagaaaccctacaaatgtgaagaatgtggcaaagcctttaagcactcctccactcttactacacataagagaaatcatactggagagaaaccctacaagtgtgataaatgtggcaaagcctttatgtcatcctcaacccttagtaaacatgagataattcatacggaaaagaaaccctacaaatgtgaagaatgtggcaaagccttcaaccggtcctcaacccttactacacataagataattcatactggagaaaaaccctacaaatgtgaagaatgtgacaaagcctttaagtactcctatacccttactacacataaaagaattcatactgaagacaaaccctacaaatgtgaagaatgtggcaaagcctttaagtactcctctacccttactacacataagagaattcatactggagagaaaccctacaaatgtgaagaatgtggcaaagccttcaagcggtcttcagaccttactacgcataagataattcatactggagagaaaccctacaaatgtgaagaatgtggcaaagcttttaagtactcctctaaccttactacacataagaaaattcatactggagagagaccctacaaatgtgaagaatgtggcaaagccttcaaccagtcctcaatccttactacacataggagaattcatactggagagaaattctacaaatgtgaagaatgtggcaaagcttttaagtgctcctctaaccttactacacataagaaaattcatactggagagagaccctacaaatgtgaagaatgtggcaaagccttcaaccagtcctcaatccttactacacatgagagaatcatactggagagaaattctacaaatgtgaagaatgtggcaaagccttcaagcggtcctcacaccttactacacataaga

SEQ ID NO: 4353 - DNA, 1383 bp, Homo sapiens
  source 1..1383: mol_type = genomic DNA
atggattcagtggcctttgaggatgtggctgtgaacttcaccctggaggagtgggctttgctggatccttcccagaagaatctctacagggatgtgatgcgggaaaccttcaggaacctggcttctgtaggaaaacaatgggaagaccagaacattgaagacccattcaaaattcccaggagaaatataagtcatattccagagagactctgtgaaagtaaagaaggtggtcaaggtgaagaaaccttcagccagattccagatggtattctgaacaagaaaactcctggagtaaaaccgtgtgaaagcagtgtgtgtggagaagttggcatgggtccttcatcacttaataggcacatcagagatcacactggacgtgaaccaaatgaatatcaggaatatggaaagaagtcatatacacgtaaccagtgtggacgagccttgagttatcatcgctcttttccagtacgtgaaaggactcatcctggaggaaagccctatgattgtaaggaatgtggagaaacctttatttctcttgtaagcattcgaagacacatgttaacgcataggggaggtgtaccttacaaatgtaaggtgtgtgggaaagcctttgattatcccagtttatttcgtatacatgaaagaagtcacactggagagaaaccttatgaatgcaagcaatgtgggaaagccttcagttgttccagttacattagaatacatgaaaggactcacactggagataaaccctatgaatgcaagcagtgtgggaaagctttcagttgttccaagtacattcgaatccatgaacgaactcacacaggagagaaaccctacgaatgtaaacagtgcggtaaagcctttaggtgcgccagttctgttcgaagtcacgagaggactcacaccggagagaaactttttgaatgtaaggaatgcgggaaggctttgacttgtcttgcaagtgttagaagacacatgataaagcacactggcaatggaccttataaatgtaaggtgtgtgggaaagcctttgatttccccagttcatttcgaatccatgaaaggacccacactggagagaaaccctatgattgtaagcaatgtgggaaagccttcagttgttccagttcgtttcgaaaacatgaaagaattcacactggagagaaaccctataaatgtacaaaatgtgggaaagccttcagtcgttccagttacttccgaatccatgaaagaactcacactggagagaaaccctatgaatgtaagcaatgtgggaaagccttcagtcgatccacttactttcgagtacatgaaaaaattcatactggagagaaaccctatgagaaccctaaccctaacgcttcagttgtcccagttctttca

SEQ ID NO: 4354 - DNA, 924 bp, Homo sapiens
  source 1..924: mol_type = genomic DNA
atggtggggggcctgccagggaatgtttcccagcaccttgactttgggagcagcctagagcagccacaaggtcattggataattaagacaaagtcaaagaggagacatttcacagatacctcagccaggcaccatgaggcctatgaggtcaagaatggagagaagtttgagaaattaggaaaaaatattagcgtcagcacacaactcactacaaatcagacaaatcctagtggtcagatatcttatgaatgtggacaatgtggcagatatttcattcaaatggcagacttccaccgacatgagaaatgtcacactggtgaaaagtcttttgaatgcaaagaatgtggaaaatacttcagatataactcattacttattcggcatcagataattcacactggaaagaaaccatttaaatgtaaagaatgtggaaaaggtttaagttcagacacagccttgattcagcatcagagaatccacactggagaaaagccctatgaatgtaaggagtgcggcaaggccttcagtagcagctctgtcttcctccagcaccagaggttccacactggggagaagctctatgaatgtaacgaatgttggaaaactttcagttgcagctcaagtttcactgtccatcagcgaatgcacactggggagaaaccttatgaatgtaaagagtgtggaaaacgattaagctccaacacagccttgactcagcatcagcgaattcacactggggagaagccctttgaatgtaaggagtgtgggaaggcattcaatcagaaaataaccctgattcagcaccagcgagttcacactggcgagaaaccttatgagtgtaaagtgtgtggtaaaaccttcagctggtgtggaagattcattctgcatcagaaactacacactcagaagacacctgtccaagca

SEQ ID NO: 4355 - DNA, 1266 bp, Homo sapiens
  source 1..1266: mol_type = genomic DNA
atgttccagaccgcttggcgccaggaaccagtgacctttgaggatgtggctgtgtacttcacccagaatgaatgggccagcctggactctgtgcagagggccctgtacagggaagtgatgctggagaattatgcaaatgtggcttccctggcattcccattcaccacgcctgttctggtctcccagctggagcaaggggaactgccatggggcctcgatccctgggaacctatgggcagggaggctctcagaggtatctgtccaggggatgaggccagaactgagaaggaaggattaactccaaaggatcatgtgtccaaagaaacagagtccttcagactgatggtggggggcctgccagggaatgtttcccagcaccttgactttgggagcagcctagagcagccacaaggtcattggataattaagacaaagtcaaagaggagacatttcacagatacctcagccaggcaccatgaggcctatgaggtcaagaatggagagaagtttgagaaattaggaaaaaatattagcgtcagcacacaactcactacaaatcagacaaatcctagtggtcagatatcttatgaatgtggacaatgtggcagatatttcattcaaatggcagacttccaccgacatgagaaatgtcacactggtgaaaagtcttttgaatgcaaagaatgtggaaaatacttcagatataactcattacttattcggcatcagataattcacactggaaagaaaccatttaaatgtaaagaatgtggaaaaggtttaagttcagacacagccttgattcagcatcagagaatccacactggagaaaagccctatgaatgtaaggagtgcggcaaggccttcagtagcagctctgtcttcctccagcaccagaggttccacactggggagaagctctatgaatgtaacgaatgttggaaaactttcagttgcagctcaagtttcactgtccatcagcgaatgcacactggggagaaaccttatgaatgtaaagagtgtggaaaacgattaagctccaacacagccttgactcagcatcagcgaattcacactggggagaagccctttgaatgtaaggagtgtgggaaggcattcaatcagaaaataaccctgattcagcaccagcgagttcacactggcgagaaaccttatgagtgtaaagtgtgtggtaaaaccttcagctggtgtggaagattcattctgcatcagaaactacacactcagaagacacctgtccaagca

SEQ ID NO: 4356 - DNA, 471 bp, Homo sapiens
  source 1..471: mol_type = genomic DNA
atgctccaaacaacttggcctcaggagtcagtgacctttgaggatgtggctgtttacttcacccagaatcaatgggccagcctcgaccctgcgcagagggccctgtacggggaggtgatgctggagaattatgcaaatgtggcttctctggtagcgtttccattccccaaacctgctctgatctcccacctggagagaggggaagcaccatggggcccagatccctgggacaccgagattctgagaggcatcagtcaaggtggtgagtcctggatcaaaaatgaagggctagttataaagcaggaagcctctgaagaaacagagttgcacagaatgccagtaggaggacttctcaggaacgtttctcagcactttgattttaaaaggaaggcactgaagcagactttcaatctaaatccaaatctgatacttcgaggtggatcagttgaggtcaggagtttgagaccagcc

SEQ ID NO: 4357 - DNA, 819 bp, Homo sapiens
  source 1..819: mol_type = genomic DNA
atggacatgcctgaggtcctcaagtccctgctggagcactctctgccttggccagagaagagaacagataaggaaaaggggaaggaaaagctggaggaggacgaggccgcagccgccagcaccatggctgtctcagcctccctcatgccacccatctgggacaagaccatcccatatgatggcgaatctttccacctggagtacatggacctggatgagttcctgctggagaatggcatccccgccagccccacccacctggcccacaacctgctgctgcctgtagcagagctagaagggaaggagtctgccagctcttccacagcatccccaccatcctcctccactgccatctttcagccctctgaaaccgtgtccagcacagaatcttccctggagaaggagagggagactcccagtcccatcgaccccaattgtgtggaagtggatgtgaacttcaatccggaccccgccgacctggtgctctccagtgtgccaggcggggagctcttcaaccctcggaagcacaagtttgctgaggaggacctgaagccccagcctatgatcaaaaaggccaagaaggtctttgtccccgacgagcagaaggatgaaaagtactggacaagacgcaagaagaacaacgtggcagctaaacggtcacgggatgcccggcgcctgaaagagaatcagatcaccatccgggcagccttcctggagaaggagaacacagccctgcggacggaggtggccgagctacgcaaggaggtgggcaagtgcaagaccatcgtgtccaagtatgagaccaaatacgggcccttg

SEQ ID NO: 4358 - DNA, 909 bp, Homo sapiens
  source 1..909: mol_type = genomic DNA
atgtccgacgcgggcggcggaaagaagccgcctgtggacccgcaggcaggacccggtccggggccggggcgcgcagctggggaaaggggcctgtcggggtccttccccctggtcctgaagaagctgatggagaaccccccgcgcgaggcgcgcctcgataaggaaaaggggaaggaaaagctggaggaggacgaggccgcagccgccagcaccatggctgtctcagcctccctcatgccacccatctgggacaagaccatcccatatgatggcgaatctttccacctggagtacatggacctggatgagttcctgctggagaatggcatccccgccagccccacccacctggcccacaacctgctgctgcctgtagcagagctagaagggaaggagtctgccagctcttccacagcatccccaccatcctcctccactgccatctttcagccctctgaaaccgtgtccagcacagaatcttccctggagaaggagagggagactcccagtcccatcgaccccaattgtgtggaagtggatgtgaacttcaatccggaccccgccgacctggtgctctccagtgtgccaggcggggagctcttcaaccctcggaagcacaagtttgctgaggaggacctgaagccccagcctatgatcaaaaaggccaagaaggtctttgtccccgacgagcagaaggatgaaaagtactggacaagacgcaagaagaacaacgtggcagctaaacggtcacgggatgcccggcgcctgaaagagaatcagatcaccatccgggcagccttcctggagaaggagaacacagccctgcggacggaggtggccgagctacgcaaggaggtgggcaagtgcaagaccatcgtgtccaagtatgagaccaaatacgggcccttg

SEQ ID NO: 4359 - DNA, 1488 bp, Homo sapiens
  source 1..1488: mol_type = genomic DNA
atggagctcccctctcccgagtctgaggaagtccacgagcccagattaggggagctcttgggaaatccagaaggtcagagcctggggagttccccctctcaggacaggggctgcaagcaggtgacagtgacccattggaagatccagacaggagagacagctcaagtgtgcaccaagtcaggaagaaaccatattctgaactcagaccttcttctgcttcagagagagctcatagagggggaagccaatccttgcgatatctgtggcaaaaccttcacgtttaattcggacctagttaggcatcggatttcgcatgctggggagaaaccttacacgtgcgatcagtgtgggaaaggctttggccagagctcacaccttatggagcatcagagaattcacactggagagagactctacgtctgtaatgtgtgtgggaaagacttcattcactattcaggtctcattgagcatcagcgcgttcattcaggagaaaagcccttcaaatgtgcgcagtgtgggaaggcgttttgtcacagttcagacctgattaggcaccagagagttcacaccagagagagaccttttgaatgcaaagagtgtgggaaaggcttcagtcagagctccttacttattcgccatcagaggattcacacgggagaaaggccctatgagtgcaatgaatgtgggaaatccttcataaggagctcgagcctcattcgccattatcagatccacacagaagtgaaacagtatgaatgcaaagaatgtgggaaggcattccgtcatcgctcagaccttattgaacaccagagaattcacaccggagagagaccctttgaatgcaatgagtgtgggaaagcctttattcggagttcaaagctcattcagcatcagaggatccatactggggagaggccttacgtatgcaatgagtgtgggaagcgcttcagccagacgtcaaacttcacccagcatcagagaattcacactggagagaaactctatgaatgtaacgagtgtgggaaagctttctttctgagttcataccttattcgacaccagaaaatccacactggagagagagtgtatgaatgtaaggaatgtgggaaagcgtttctccagaaagcccatctcactgagcaccagaagatccactctggggacaggcccttcgaatgtaaagactgtgggaaagccttcatccagagctccaagctgcttctgcaccagattattcacactggagaaaagccctatgtgtgcagttattgtgggaaaggctttattcagaggtcaaacttccttcaacaccagaaaattcatactgaagagaagctctatgaatgtagtcagtatgggagagattttaactcaactacaaacgttaaaaataatcaaagggttcaccaagagggactctccttgagtaaggcccccatacatttgggtgagaggtctgtagataagggggaacacacaggtaactta

SEQ ID NO: 4360 - DNA, 1608 bp, Homo sapiens
  source 1..1608: mol_type = genomic DNA
atgattttgttgtcttttgtttcagattctaatgtaggaactggtgagaagaaggtgactgaagcctggatttctgaggatgaaaactcacataggacgacgtcagacagactcacggtgatggagctcccctctcccgagtctgaggaagtccacgagcccagattaggggagctcttgggaaatccagaaggtcagagcctggggagttccccctctcaggacaggggctgcaagcaggtgacagtgacccattggaagatccagacaggagagacagctcaagtgtgcaccaagtcaggaagaaaccatattctgaactcagaccttcttctgcttcagagagagctcatagagggggaagccaatccttgcgatatctgtggcaaaaccttcacgtttaattcggacctagttaggcatcggatttcgcatgctggggagaaaccttacacgtgcgatcagtgtgggaaaggctttggccagagctcacaccttatggagcatcagagaattcacactggagagagactctacgtctgtaatgtgtgtgggaaagacttcattcactattcaggtctcattgagcatcagcgcgttcattcaggagaaaagcccttcaaatgtgcgcagtgtgggaaggcgttttgtcacagttcagacctgattaggcaccagagagttcacaccagagagagaccttttgaatgcaaagagtgtgggaaaggcttcagtcagagctccttacttattcgccatcagaggattcacacgggagaaaggccctatgagtgcaatgaatgtgggaaatccttcataaggagctcgagcctcattcgccattatcagatccacacagaagtgaaacagtatgaatgcaaagaatgtgggaaggcattccgtcatcgctcagaccttattgaacaccagagaattcacaccggagagagaccctttgaatgcaatgagtgtgggaaagcctttattcggagttcaaagctcattcagcatcagaggatccatactggggagaggccttacgtatgcaatgagtgtgggaagcgcttcagccagacgtcaaacttcacccagcatcagagaattcacactggagagaaactctatgaatgtaacgagtgtgggaaagctttctttctgagttcataccttattcgacaccagaaaatccacactggagagagagtgtatgaatgtaaggaatgtgggaaagcgtttctccagaaagcccatctcactgagcaccagaagatccactctggggacaggcccttcgaatgtaaagactgtgggaaagccttcatccagagctccaagctgcttctgcaccagattattcacactggagaaaagccctatgtgtgcagttattgtgggaaaggctttattcagaggtcaaacttccttcaacaccagaaaattcatactgaagagaagctctatgaatgtagtcagtatgggagagattttaactcaactacaaacgttaaaaataatcaaagggttcaccaagagggactctccttgagtaaggcccccatacatttgggtgagaggtctgtagataagggggaacacacaggtaactta

SEQ ID NO: 4361 - DNA, 1497 bp, Homo sapiens
  source 1..1497: mol_type = genomic DNA
atgcgagtgctaacattcagggatgtggctgtagaattctccccagaagagtgggaatgcctggactctgctcagcagcgtttgtatagggatgtgatgttagagaactacggaaacctgttctccttgggtcttgctatctttaagccagacttgattacctatctggagcaaagaaaagagccttggaatgcgaggagacagaagacagtagccaaacacccagctggctctttgcattttactgcagagatattgctggagcacgacataaacgattcatttcaaaaagtgatcctgagaaaatctggaagctgtgaccttaatactttacgtttaaagaaagactaccaacgtgtgggtaattgcaaggggcagaaaagcagttataatggcattcatcaatgtttgtcagctacccgtagcaaaacctgtcaatataataaatgtggcaaagcttttgggttgtgctcaatcttcactgaacataagaaaatttttagcagagagaaatgctacaaatgtgaagaatgtggcaaagactgtaggttgtcagattttaccatacagaagagaattcatactgcagatagaagttacaaatgtgaagaatgtggcaaagcctgtaaaaagttctcaaaccttactgaacataatagagttcatactggaaagaaaccctacaaatgtgaagaatgtggcaaaacatttacctgttcctcagcccttactaaacacaagagaaatcatactggagacagaccctacaaatgcgaagaatgtcacaaagcctttaggtgttgctcagaccttactaaacataagagaattcatactggagagaaaccctacaaatgtaaagaatgtcacaaagcctttaggtgttgctcagaccttactaaacataagagaattcatactggagagaaaccctacaaatgtaatgaatgtggaaaagcttttatgtggatctcggcccttagtcaacataacagaattcatactggagagaaaccctacatttgtgaagaatgtggcaaagcctttacctactcctcaacccttattagccacaagagaattcatatggaattgagaccttacaaatgtgaagaatgtggcaaaacctttaagtggttctcagacctgactaatcataagagaattcacactggagagaaaccctacaaatgtgaagaatgtggcaaaagctttacctgctcctcaaaccttattaaacacaagagaattcatatggaagtgagaccttacaaatgtgaagaatgtggcaaaacctttaagtggttcccagacctgactaatcataagagaattcacactggagagaagccctacaaatgtgaagaatgtggcaaaacctttacctgctcctcaagccttattaaacacaagagaagtcatactggagacagacctacaagtgcaaagaatgtggcaaagcctttaggtggttctcagaccttactaaacataagg

SEQ ID NO: 4362 - DNA, 2904 bp, Homo sapiens
  source 1..2904: mol_type = genomic DNA
atggcagaagatgatccatatttgggaaggcctgaacaaatgtttcatttggatccttctttgactcatacaatatttaatccagaagtatttcaaccacagatggcactgccaacagatggcccataccttcaaatattagagcaacctaaacagagaggatttcgtttccgttatgtatgtgaaggcccatcccatggtggactacctggtgcctctagtgaaaagaacaagaagtcttaccctcaggtcaaaatctgcaactatgtgggaccagcaaaggttattgttcagttggtcacaaatggaaaaaatatccacctgcatgcccacagcctggtgggaaaacactgtgaggatgggatctgcactgtaactgctggacccaaggacatggtggtcggcttcgcaaacctgggtatacttcatgtgacaaagaaaaaagtatttgaaacactggaagcacgaatgacagaggcgtgtataaggggctataatcctggactcttggtgcaccctgaccttgcctatttgcaagcagaaggtggaggggaccggcagctgggagatcgggaaaaagagctaatccgccaagcagctctgcagcagaccaaggagatggacctcagcgtggtgcggctcatgtttacagcttttcttccggatagcactggcagcttcacaaggcgcctggaacccgtggtatcagacgccatctatgacagtaaagcccccaatgcatccaacttgaaaattgtaagaatggacaggacagctggatgtgtgactggaggggaggaaatttatcttctttgtgacaaagttcagaaagatgacatccagattcgattttatgaagaggaagaaaatggtggagtctgggaaggatttggagatttttcccccacagatgttcatagacaatttgccattgtcttcaaaactccaaagtataaagatattaatattacaaaaccagcctctgtgtttgtccagcttcggaggaaatctgacttggaaactagtgaaccaaaacctttcctctactatcctgaaatcaaagataaagaagaagtgcagaggaaacgtcagaagctcatgcccaatttttcggatagtttcggcggtggtagtggtgctggagctggaggcggaggcatgtttggtagtggcggtggaggagggggcactggaagtacaggtccagggtatagcttcccacactatggatttcctacttatggtgggattactttccatcctggaactactaaatctaatgctgggatgaagcatggaaccatggacactgaatctaaaaaggaccctgaaggttgtgacaaaagtgatgacaaaaacactgtaaacctctttgggaaagttattgaaaccacagagcaagatcaggagcccagcgaggccaccgttgggaatggtgaggtcactctaacgtatgcaacaggaacaaaagaagagagtgctggagttcaggataacctctttctagagaaggctatgcagcttgcaaagaggcatgccaatgcccttttcgactacgcggtgacaggagacgtgaagatgctgctggccgtccagcgccatctcactgctgtgcaggatgagaatggggacagtgtcttacacttagcaatcatccaccttcattctcaacttgtgagggatctactagaagtcacatctggtttgatttctgatgacattatcaacatgagaaatgatctgtaccagacgcccttgcacttggcagtgatcactaagcaggaagatgtggtggaggatttgctgagggctggggccgacctgagccttctggaccgcttgggtaactctgttttgcacctagctgccaaagaaggacatgataaagttctcagtatcttactcaagcacaaaaaggcagcactacttcttgaccaccccaacggggacggtctgaatgccattcatctagccatgatgagcaatagcctgccatgtttgctgctgctggtggccgctggggctgacgtcaatgctcaggagcagaagtccgggcgcacagcactgcacctggctgtggagcacgacaacatctcattggcaggctgcctgctcctggagggtgatgcccatgtggacagtactacctacgatggaaccacacccctgcatatagcagctgggagagggtccaccaggctggcagctcttctcaaagcagcaggagcagatcccctggtggagaactttgagcctctctatgacctggatgactcttgggaaaatgcaggagaggatgaaggagttgtgcctggaaccacgcctctagatatggccaccagctggcaggtatttgacatattaaatgggaaaccatatgagccagagtttacatctgatgatttactagcacaaggagacatgaaacagctggctgaagatgtgaagctgcagctgtataagttactagaaattcctgatccagacaaaaactgggctactctggcgcagaaattaggtctggggatacttaataatgccttccggctgagtcctgctccttccaaaacacttatggacaactatgaggtctctgggggtacagtcagagagctggtggaggccctgagacaaatgggctacaccgaagcaattgaagtgatccaggcagcctccagcccagtgaagaccacctctcaggcccactcgctgcctctctcgcctgcctccacaaggcagcaaatagacgagctccgagacagtgacagtgtctgcgacagcggcgtggagacatccttccgcaaactcagctttaccgagtctctgaccagtggtgcctcactgctaactctcaacaaaatgccccatgattatgggcaggaaggacctctagaaggcaaaatt

SEQ ID NO: 4363 - DNA, 2907 bp, Homo sapiens
  source 1..2907: mol_type = genomic DNA
atggcagaagatgatccatatttgggaaggcctgaacaaatgtttcatttggatccttctttgactcatacaatatttaatccagaagtatttcaaccacagatggcactgccaacagcagatggcccataccttcaaatattagagcaacctaaacagagaggatttcgtttccgttatgtatgtgaaggcccatcccatggtggactacctggtgcctctagtgaaaagaacaagaagtcttaccctcaggtcaaaatctgcaactatgtgggaccagcaaaggttattgttcagttggtcacaaatggaaaaaatatccacctgcatgcccacagcctggtgggaaaacactgtgaggatgggatctgcactgtaactgctggacccaaggacatggtggtcggcttcgcaaacctgggtatacttcatgtgacaaagaaaaaagtatttgaaacactggaagcacgaatgacagaggcgtgtataaggggctataatcctggactcttggtgcaccctgaccttgcctatttgcaagcagaaggtggaggggaccggcagctgggagatcgggaaaaagagctaatccgccaagcagctctgcagcagaccaaggagatggacctcagcgtggtgcggctcatgtttacagcttttcttccggatagcactggcagcttcacaaggcgcctggaacccgtggtatcagacgccatctatgacagtaaagcccccaatgcatccaacttgaaaattgtaagaatggacaggacagctggatgtgtgactggaggggaggaaatttatcttctttgtgacaaagttcagaaagatgacatccagattcgattttatgaagaggaagaaaatggtggagtctgggaaggatttggagatttttcccccacagatgttcatagacaatttgccattgtcttcaaaactccaaagtataaagatattaatattacaaaaccagcctctgtgtttgtccagcttcggaggaaatctgacttggaaactagtgaaccaaaacctttcctctactatcctgaaatcaaagataaagaagaagtgcagaggaaacgtcagaagctcatgcccaatttttcggatagtttcggcggtggtagtggtgctggagctggaggcggaggcatgtttggtagtggcggtggaggagggggcactggaagtacaggtccagggtatagcttcccacactatggatttcctacttatggtgggattactttccatcctggaactactaaatctaatgctgggatgaagcatggaaccatggacactgaatctaaaaaggaccctgaaggttgtgacaaaagtgatgacaaaaacactgtaaacctctttgggaaagttattgaaaccacagagcaagatcaggagcccagcgaggccaccgttgggaatggtgaggtcactctaacgtatgcaacaggaacaaaagaagagagtgctggagttcaggataacctctttctagagaaggctatgcagcttgcaaagaggcatgccaatgcccttttcgactacgcggtgacaggagacgtgaagatgctgctggccgtccagcgccatctcactgctgtgcaggatgagaatggggacagtgtcttacacttagcaatcatccaccttcattctcaacttgtgagggatctactagaagtcacatctggtttgatttctgatgacattatcaacatgagaaatgatctgtaccagacgcccttgcacttggcagtgatcactaagcaggaagatgtggtggaggatttgctgagggctggggccgacctgagccttctggaccgcttgggtaactctgttttgcacctagctgccaaagaaggacatgataaagttctcagtatcttactcaagcacaaaaaggcagcactacttcttgaccaccccaacggggacggtctgaatgccattcatctagccatgatgagcaatagcctgccatgtttgctgctgctggtggccgctggggctgacgtcaatgctcaggagcagaagtccgggcgcacagcactgcacctggctgtggagcacgacaacatctcattggcaggctgcctgctcctggagggtgatgcccatgtggacagtactacctacgatggaaccacacccctgcatatagcagctgggagagggtccaccaggctggcagctcttctcaaagcagcaggagcagatcccctggtggagaactttgagcctctctatgacctggatgactcttgggaaaatgcaggagaggatgaaggagttgtgcctggaaccacgcctctagatatggccaccagctggcaggtatttgacatattaaatgggaaaccatatgagccagagtttacatctgatgatttactagcacaaggagacatgaaacagctggctgaagatgtgaagctgcagctgtataagttactagaaattcctgatccagacaaaaactgggctactctggcgcagaaattaggtctggggatacttaataatgccttccggctgagtcctgctccttccaaaacacttatggacaactatgaggtctctgggggtacagtcagagagctggtggaggccctgagacaaatgggctacaccgaagcaattgaagtgatccaggcagcctccagcccagtgaagaccacctctcaggcccactcgctgcctctctcgcctgcctccacaaggcagcaaatagacgagctccgagacagtgacagtgtctgcgacagcggcgtggagacatccttccgcaaactcagctttaccgagtctctgaccagtggtgcctcactgctaactctcaacaaaatgccccatgattatgggcaggaaggacctctagaaggcaaaatt

SEQ ID NO: 4364 - DNA, 2697 bp, Homo sapiens
  source 1..2697: mol_type = genomic DNA
atggagagttgctacaacccaggtctggatggtattattgaatatgatgatttcaaattgaactcctccattgtggaacccaaggagccagccccagaaacagctgatggcccctacctggtgatcgtggaacagcctaagcagagaggcttccgatttcgatatggctgtgaaggcccctcccatggaggactgcccggtgcctccagtgagaagggccgaaagacctatcccactgtcaagatctgtaactacgagggaccagccaagatcgaggtggacctggtaacacacagtgacccacctcgtgctcatgcccacagtctggtgggcaagcaatgctcggagctggggatctgcgccgtttctgtggggcccaaggacatgactgcccaatttaacaacctgggtgtcctgcatgtgactaagaagaacatgatggggactatgatacaaaaacttcagaggcagcggctccgctctaggccccagggccttacggaggccgagcagcgggagctggagcaagaggccaaagaactgaagaaggtgatggatctgagtatagtgcggctgcgcttctctgccttccttagagccagtgatggctccttctccctgcccctgaagccagtcatctcccagcccatccatgacagcaaatctccgggggcatcaaacctgaagatttctcgaatggacaagacagcaggctctgtgcggggtggagatgaagtttatctgctttgtgacaaggtgcagaaagatgacattgaggttcggttctatgaggatgatgagaatggatggcaggcctttggggacttctctcccacagatgtgcataaacagtatgccattgtgttccggacacccccctatcacaagatgaagattgagcggcctgtaacagtgtttctgcaactgaaacgcaagcgaggaggggacgtgtctgattccaaacagttcacctattaccctctggtggaagacaaggaagaggtgcagcggaagcggaggaaggccttgcccaccttctcccagcccttcgggggtggctcccacatgggtggaggctctgggggtgcagccgggggctacggaggagctggaggaggtggcagcctcggtttcttcccctcctccctggcctacagcccctaccagtccggcgcgggccccatgggctgctacccgggaggcgggggcggggcgcagatggccgccacggtgcccagcagggactccggggaggaagccgcggagccaagcgccccctccaggaccccccagtgcgagccgcaggccccggagatgctgcagcgagctcgagagtacaacgcgcgcctgttcggcctggcgcagcgcagcgcccgagccctactcgactacggcgtcaccgcggacgcgcgcgcgctgctggcgggacagcgccacctgctgacggcgcaggacgagaacggagacacaccactgcacctagccatcatccacgggcagaccagtgtcattgagcagatagtctatgtcatccaccacgcccaggacctcggcgttgtcaacctcaccaaccacctgcaccagacgcccctgcacctggcggtgatcacggggcagacgagtgtggtgagctttctgctgcgggtaggtgcagacccagctctgctggatcggcatggagactcagccatgcatctggcgctgcgggcaggcgctggtgctcctgagctgctgcgtgcactgcttcagagtggagctcctgctgtgccccagctgttgcatatgcctgactttgagggactgtatccagtacacctggcagtccgagcccgaagccctgagtgcctggatctgctggtggacagtggggctgaagtggaggccacagagcggcaggggggacgaacagccttgcatctagccacagagatggaggagctggggttggtcacccatctggtcaccaagctccgggccaacgtgaacgctcgcacctttgcgggaaacacacccctgcacctggcagctggactggggtacccgaccctcacccgcctccttctgaaggctggtgctgacatccatgctgaaaacgaggagcccctgtgcccactgccttcaccccctacctctgatagcgactcggactctgaagggcctgagaaggacacccgaagcagcttccggggccacacgcctcttgacctcacttgcagcaccaaggtgaagaccttgctgctaaatgctgctcagaacaccatggagccacccctgaccccgcccagcccagcagggccgggactgtcacttggtgatacagctctgcagaacctggagcagctgctagacgggccagaagcccagggcagctgggcagagctggcagagcgtctggggctgcgcagcctggtagacacgtaccgacagacaacctcacccagtggcagcctcctgcgcagctacgagctggctggcggggacctggcaggtctactggaggccctgtctgacatgggcctagaggagggagtgaggctgctgaggggtccagaaacccgagacaagctgcccagcacagaggtgaaggaagacagtgcgtacgggagccagtcagtggagcaggaggcagagaagctgggcccaccccctgagccaccaggagggctctgccacgggcacccccagcctcaggtgcac

SEQ ID NO: 4365 - DNA, 2700 bp, Homo sapiens
  source 1..2700: mol_type = genomic DNA
atggagagttgctacaacccaggtctggatggtattattgaatatgatgatttcaaattgaactcctccattgtggaacccaaggagccagccccagaaacagctgatggcccctacctggtgatcgtggaacagcctaagcagagaggcttccgatttcgatatggctgtgaaggcccctcccatggaggactgcccggtgcctccagtgagaagggccgaaagacctatcccactgtcaagatctgtaactacgagggaccagccaagatcgaggtggacctggtaacacacagtgacccacctcgtgctcatgcccacagtctggtgggcaagcaatgctcggagctggggatctgcgccgtttctgtggggcccaaggacatgactgcccaatttaacaacctgggtgtcctgcatgtgactaagaagaacatgatggggactatgatacaaaaacttcagaggcagcggctccgctctaggccccagggccttacggaggccgagcagcgggagctggagcaagaggccaaagaactgaagaaggtgatggatctgagtatagtgcggctgcgcttctctgccttccttagagccagtgatggctccttctccctgcccctgaagccagtcatctcccagcccatccatgacagcaaatctccgggggcatcaaacctgaagatttctcgaatggacaagacagcaggctctgtgcggggtggagatgaagtttatctgctttgtgacaaggtgcagaaagatgacattgaggttcggttctatgaggatgatgagaatggatggcaggcctttggggacttctctcccacagatgtgcataaacagtatgccattgtgttccggacacccccctatcacaagatgaagattgagcggcctgtaacagtgtttctgcaactgaaacgcaagcgaggaggggacgtgtctgattccaaacagttcacctattaccctctggtggaagacaaggaagaggtgcagcggaagcggaggaaggccttgcccaccttctcccagcccttcgggggtggctcccacatgggtggaggctctgggggtgcagccgggggctacggaggagctggaggaggtggcagcctcggtttcttcccctcctccctggcctacagcccctaccagtccggcgcgggccccatgggctgctacccgggaggcgggggcggggcgcagatggccgccacggtgcccagcagggactccggggaggaagccgcggagccaagcgccccctccaggaccccccagtgcgagccgcaggccccggagatgctgcagcgagctcgagagtacaacgcgcgcctgttcggcctggcgcagcgcagcgcccgagccctactcgactacggcgtcaccgcggacgcgcgcgcgctgctggcgggacagcgccacctgctgacggcgcaggacgagaacggagacacaccactgcacctagccatcatccacgggcagaccagtgtcattgagcagatagtctatgtcatccaccacgcccaggacctcggcgttgtcaacctcaccaaccacctgcaccagacgcccctgcacctggcggtgatcacggggcagacgagtgtggtgagctttctgctgcgggtaggtgcagacccagctctgctggatcggcatggagactcagccatgcatctggcgctgcgggcaggcgctggtgctcctgagctgctgcgtgcactgcttcagagtggagctcctgctgtgccccagctgttgcatatgcctgactttgagggactgtatccagtacacctggcagtccgagcccgaagccctgagtgcctggatctgctggtggacagtggggctgaagtggaggccacagagcggcaggggggacgaacagccttgcatctagccacagagatggaggagctggggttggtcacccatctggtcaccaagctccgggccaacgtgaacgctcgcacctttgcgggaaacacacccctgcacctggcagctggactggggtacccgaccctcacccgcctccttctgaaggctggtgctgacatccatgctgaaaacgaggagcccctgtgcccactgccttcaccccctacctctgatagcgactcggactctgaagggcctgagaaggacacccgaagcagcttccggggccacacgcctcttgacctcacttgcagcaccaaggtgaagaccttgctgctaaatgctgctcagaacaccatggagccacccctgaccccgcccagcccagcagggccgggactgtcacttggtgatacagctctgcagaacctggagcagctgctagacgggccagaagcccagggcagctgggcagagctggcagagcgtctggggctgcgcagcctggtagacacgtaccgacagacaacctcacccagtggcagcctcctgcgcagctacgagctggctggcggggacctggcaggtctactggaggccctgtctgacatgggcctagaggagggagtgaggctgctgaggggtccagaaacccgagacaagctgcccagcacagcagaggtgaaggaagacagtgcgtacgggagccagtcagtggagcaggaggcagagaagctgggcccaccccctgagccaccaggagggctctgccacgggcacccccagcctcaggtgcac

SEQ ID NO: 4366 - DNA, 8892 bp, Homo sapiens
  source 1..8892: mol_type = genomic DNA
atggaccctagaaatactgctatgttaggattgggttctgattccgaaggtttttcaagaaagagtccttctgccatcagtactggcacattggtcagtaagagagaagtagagctagaaaaaaacacaaaggaggaagaggaccttcgcaaacggaatcgagaaagaaacatcgaagctgggaaagatgatggtttgactgatgcacagcaacagttttcagtgaaagaaacaaacttttcagagggaaatttaaaattgaaaattggcctccaggctaagagaactaaaaaacctccaaagaacttggagaactatgtatgtcgacctgccataaaaacaactattaagcacccaaggaaagcacttaaaagtggaaagatgacggatgaaaagaatgaacactgtccttcaaaacgagacccttcaaagttgtacaagaaagcagatgatgttgcagccattgaatgccagtctgaagaagtcatccgtcttcattcacagggagaaaacaatcctttgtctaagaagctgtctccagtacactcagaaatggcagattatattaatgcaacgccatctactcttcttggtagccgggatcctgatttaaaggacagagcattacttaatggaggaactagtgtaacagaaaagttggcacagctgattgctacctgtcctccttccaagtcttccaagacaaaaccgaagaagttaggaactggcactacagcaggattggttagcaaggatttgatcaggaaagcaggtgttggctctgtagctggaataatacataaggacttaataaaaaagccaaccatcagcacagcagttggattggtaactaaagatcctgggaaaaagccagtgtttaatgcagcagtaggattggtcaataaggactctgtgaaaaaactgggaactggcactacagcggtattcattaataaaaacttaggcaaaaagccaggaactatcactacagtaggactgctaagcaaagattcaggaaagaagctaggaattggtattgttccaggtttagtgcataaagagtctggcaagaagttaggacttggcactgtggttggactggttaataaagatttgggaaagaaattgggttctactgttggcctagtggccaaggactgtgcaaagaagattgtagcaagttcagcaatgggattggttaataaggacattggaaagaaactaatgagttgtcctttggcaggtctgatcagtaaagatgccataaaccttaaagccgaagcactgctccccactcaggaaccgcttaaggcttcttgtagtacaaacatcaataatcaggaaagtcaggaactttctgaatccctgaaagatagtgccaccagcaaaacttttgaaaagaatgttgtacggcagaataaagaaagcatattggaaaagttctcagtacgaaaagaaatcattaatttggagaaagaaatgtttaatgaaggaacatgcattcagcaagacagtttctcatccagtgaaaagggatcttatgaaacctcaaagcatgaaaagcagcctcctgtatattgcacttctccggactttaaaatgggaggtgcttctgatgtatctaccgctaaatccccattcagtgcagtaggagaaagcaatctcccttccccatcacctactgtatctgttaatcctttaaccagaagtccccctgaaacttcttcacagttggctcctaatccattacttttaagttctactacagaactaatcgaagaaatttctgaatctgttggaaagaaccagtttacttctgaaagtacccacttgaacgttggtcataggtcagttggtcatagtataagtattgaatgtaaagggattgataaagaggtaaatgattcaaaaactacccatatagatattccaagaataagctcttcccttggaaaaaagccaagtttgacttctgaatccagcattcatactattactccttcagttgttaacttcactagtttatttagtaataagccttttttaaaactgggtgcagtatctgcatcagacaaacactgccaagttgctgaaagcctaagtactagtttgcagtccaaaccattaaaaaaaagaaaaggaagaaaacctcggtggactaaagtggtggcaagaagcacatgccggtctccaaaagggctagaattagaaagatcagagctttttaaaaacgtttcatgtagctcactatcaaatagtaattctgagccagccaagtttatgaaaaacattggacccccttcatttgtagatcatgacttccttaaacgccgattgccaaagttgagcaaatccacagctccatctcttgctctcttagctgatagtgaaaaaccatctcataagtcttttgctactcacaaactatcctccagtatgtgtgtctctagtgaccttttgtctgatatttataagcccaaaagaggaaggcctaaatctaaggagatgcctcaactggaagggccacctaaaaggactttaaaaatccctgcttctaaagtgttttctttacagtctaaggaagaacaagaacccccaattttacagccagaaattgaaatcccttccttcaaacaaggtctgtctgtgtctccttttccaaaaaagagaggcaggcctaagaggcaaatgaggtcaccagtcaagatgaagccacctgtactgtcagtggctccatttgttgccactgaaagtccaagcaagctagaatctgaaagtgacaaccatagaagtagcagtgatttctttgagagcgaggatcaacttcaggatccagatgacctagatgacagtcataggccaagtgtctgtagtatgagtgaccttgagatggaaccagataaaaaaattaccaagagaaacaatggacaattaatgaaaacaattatccgcaaaataaataaaatgaagactttaaagagaaagaaactgttgaatcagattctttcaagttctgtagaatcaagtaataaagggaaagtgcaatccaaactccataatacggtatcaagtcttgctgccacatttggctctaaattgggccaacagataaatgtcagcaagaaaggaaccatttatataggaaagagaagaggtcgcaaaccaaaaactgtcttaaatggtattctttctggtagtcctactagccttgctgttcttgagcaaacagctcaacaggcagctgggtcagcattaggacagattcttcccccattactgccttcatctgctagtagttctgagattcttccatcacctatttgctctcagtcttctgggactagtggaggtcagagccctgtaagtagtgatgcaggttttgttgaacccagttcagtgccatatttgcatttacactccagacagggcagtatgattcagactcttgcaatgaagaaggcctcaaaggggaggaggcggttatctcctcctactttgttgccaaattctccttcgcacttgagtgaactcacatctctaaaagaagctactccttccccaatcagtgagtctcatagtgatgagaccattcccagtgatagtggaattggaacagataataacagcacatcagacagggcagagaaattttgtgggcaaaaaaagaggaggcattcttttgagcatgtttctctgattccccctgaaacctctacagtgctaagcagtcttaaagaaaaacataaacacaaatgtaagcgcaggaatcatgattacctcagctatgacaagatgaaaaggcagaaacgaaaacggaaaaagaaatatccccagcttcgaaatagacaggatccagactttattgcagagctggaggaactaataagtcgcctaagtgaaattcggatcactcatcgaagtcatcattttatcccccgagatcttctgccaactatctttcgaatcaactttaatagtttctatacacatccttctttccccttagaccctttgcactacattcgaaaacctgacttaaaaaagaaaagagggagaccccctaagatgagggaggcaatggctgaaatgccttttatgcacagccttagttttcctctttctagtactggattctatccatcttatggtatgccttactctccttcaccccttacagctgctcccataggattaggttactatggaaggtatcctcccactctttatccacctcctccatctccttctttcaccacgccacttccacctccttcctatatgcatgctggtcatttacttctcaatcctgccaaataccataagaaaaagcataagctacttcgacaggaggcctttcttacaaccagcaggactcccctcctttccatgagtacctaccccagtgttcctcctgagatggcctatggttggatggttgagcacaaacacaggcaccgtcacaaacacagagaacaccgttcttctgaacaaccccaggtttctatggacactggctcttcccgatctgtcctggaatctttgaagcgctatagatttggaaaggatgctgttggagagcgatataagcataaggaaaagcaccgttgtcacatgtcctgccctcatctctctccttcaaaaagcttaataaacagagaggaacagtgggtccaccgagagccttcagaatctagtccattggccttgggattgcagacacctttacagattgactgttcagaaagttctccaagcttatcccttggaggattcactcccaactctgagccagccagcagtgatgaacatacaaaccttttcacaagtgcaataggcagctgcagagtttcaaaccctaactccagtggccggaagaaattaactgacagccctggactcttttctgcacaggacacttcactaaatcggcttcacagaaaggagtcactgccttctaacgaaagggcagtacagactttggcaggctcccagccaacctctgataaaccctcccagcggccatcagagagcacaaattgtagccctacccggaaaaggtcttcatctgagagtacttcttcaacagtaaacggagttccctctcgaagtccaagattagttgcttctggggatgactctgtggatagtctgctgcagcggatggtacaaaatgaggaccaagagcccatggagaaaagtattgatgctgtgattgcaactgcctctgcaccaccttcttccagtccaggccgtagccacagcaaggaccgaaccctgggaaaaccagacagccttttagtgcctgcagtcacaagtgactcttgcaataatagcatctcactcctatctgaaaagttgacaagcagctgttccccccatcatatcaagagaagtgtagtggaagctatgcaacgccaagctcggaaaatgtgcaattacgacaaaatcttggccacaaagaaaaacctagaccatgtcaataaaatcttaaaagccaaaaaacttcaaaggcaggccaggacagggaataactttgtgaaacgtaggccaggtcgacctcggaaatgtccccttcaggctgtcgtatcaatgcaagcattccaggctgctcagtttgtcaacccagaattgaacagagacgaggaaggagcagcactgcacctcagtcctgacacagttacagatgtaattgaggctgttgttcagagtgtaaatctgaacccagaacataaaaaggggttgaagagaaaaggttggctattggaagaacagaccagaaaaaagcagaagccattaccagaggaagaagagcaagagaataataaaagctttaatgaagcaccagttgagattcccagtccttctgaaaccccagctaaaccttctgaacctgaaagtaccttgcagcctgtgctttctctcatcccaagggaaaagaagcccccacgtcccccaaagaagaagtatcagaaagcagggctgtattctgacgtttacaaaactacagacccaaagagtcgattgatccaattaaagaaagagaagctggagtatactccaggagagcatgaatatggattatttccagcgcccattcatgttggaaagtatctaagacaaaagagaattgacttccagcttccttatgatatcctttggcagtggaaacacaatcagctatacaaaaagccagatgtcccactatataagaaaattcgttcaaatgtctacgttgatgtcaaacccctttctggttacgaagctaccacctgtaactgtaagaagccagatgatgacaccaggaagggctgtgttgatgactgcctcaatagaatgatctttgctgagtgttcccccaacacttgcccatgtggcgagcaatgctgtaaccagaggatacagaggcatgaatgggtgcaatgtctagaacgatttcgagctgaggaaaaaggttggggaatcagaaccaaagagcccctaaaagctgggcagttcatcattgaatacctaggggaggtcgtcagtgaacaggagttcaggaacaggatgattgagcagtatcataatcacagtgaccactactgcctgaacctggatagtgggatggtgattgacagttaccgcatgggaaatgaggcccgattcatcaaccatagctgtgacccaaattgtgaaatgcagaaatggtctgttaatggagtataccggattggactctatgctcttaaagacatgccagctgggactgaactcacttatgattataactttcattccttcaatgtggaaaaacagcaactttgtaagtgtggctttgagaaatgtcgaggaatcatcggaggcaagagtcagcgtgtgaatggactcaccagcagcaaaaacagccagcccatggccacacacaaaaaatctggacggtcaaaagagaagagaaagtctaagcacaagctgaagaaaaggagaggccatctctctgaggaacccagtgaaaatatcaacaccccaactagattgaccccccaattacagatgaagccaatgtccaatcgtgaaaggaactttgtgttaaagcatcatgtattcttggtccgaaactgggagaagattcgtcaaaaacaggaggaagtaaagcacaccagtgataatattcactcagcatcattatatacccgttggaatgggatctgccgagatgatgggaatatcaagtctgatgtcttcatgacccagttctctgccctgcagacagctcgatctgttcgaacaagacggttggcagctgcagaggaaaatattgaagtggctcgggcagcccgcctagcccagatcttcaaagaaatttgtgatggtatcatctcttataaagattcttcccggcaagcactggcagctccacttttgaaccttcccccaaagaaaaagaatgctgattattatgagaagatctctgatcccctagatcttatcaccatagagaagcagatcctcactggttactataagacagtggaagcttttgatgctgacatgctcaaagtctttcggaatgctgagaagtactatgggcgtaaatccccagttgggagagatgtttgtcgtctacgaaaggcctattacaatgcccggcatgaggcatcagcccagattgatgagattgtgggagagacagcaagtgaggcagacagcagtgagacctcagtctctgaaaaggagaatgggcatgagaaggacgacgatgttattcgctgtatctgtggcctctacaaggatgaaggtctcatgatccagtgtgacaagtgcatggtatggcagcactgtgattgtatgggagtgaactcagatgtggagcactacctttgtgagcagtgtgacccaaggcctgtggacagggaggttcccatgatccctcggccccactatgcccaacctggctgtgtctacttcatctgtttgctccgagatgacttgctgcttcgtcagggtgactgtgtgtatctgatgagggatagtcggcgcacccctgatggccacccggtccgtcagtcctatcgactgttatctcacattaaccgagataaacttgacatctttcgcattgagaagctttggaagaatgaaaaagaggaacggtttgcctttggtcaccattatttccgtccccacgaaacacaccactctccatcccgtcggttctatcataatgaactatttcgggtgccactctatgagatcattcccttggaggctgtagtggggacctgctgtgtgttggacctttatacgtattgtaaagggagacccaaaggagtaaaggagcaagatgtgtacatctgtgattatcggcttgacaagtcagcacacctgttttacaagatccaccggaaccgctatcctgtctgcaccaaaccctatgcttttgatcacttccccaagaagctcactcccaaaaaagatttctcgcctcattacgtcccagacaactacaagaggaatggaggacgatcatcctggaagtctgagcgctcaaagccacccctaaaagacttgggccaggaggatgatgctctacccttgattgaagaggttctagccagtcaagagcaagcagccaatgagatacccagcctggaggagccagaacgggaaggggccactgctaacgtcagtgagggtgaaaaaaaaacagaggaaagtagtcaagaaccccagtcaacctgtacccctgaggaacgacggcataaccaacgggaacgactcaaccagatcttgctcaatctccttgaaaaaatccctggaaaaaatgccattgatgtgacctacttgctggaggaaggatcaggcaggaaactgcgaaggcgtactttgtttatcccagaaaacagctttcgaaag

SEQ ID NO: 4367 - DNA, 1482 bp, Homo sapiens
  source 1..1482: mol_type = genomic DNA
atgtcgaccacacttctgtccgccttctacgatgtcgacttcttgtgcaagacagagaaatccctggccaacctcaacctgaacaacatgctggacaagaaggcggtggggacgcctgtggccgccgcccccagctcgggcttcgcgccgggattcctccgacggcactcggccagcaacctgcatgcactcgcccaccccgcgcccagccccggcagctgctcgcccaagttcccgggcgccgctaacggcagcagctgcggcagcgcggcggccggcggtccgacctcctacggcacccttaaggagccgtcggggggcggcggcacagccctgctcaacaaggagaacaaattccgggaccgctcgtttagcgagaacggcgatcgcagccagcacctcctgcacctgcagcagcagcagaaggggggcggcggctcccagatcaactccacgcgctacaagaccgagctgtgccggcccttcgaggagagcggcacgtgcaagtacggcgaaaagtgccagttcgcgcatggcttccacgagctgcgcagcctgactcgccatccgaagtacaagaccgagctgtgccgcacctttcataccatcggcttctgcccctatgggccgcgctgccacttcatccacaacgcggacgagcggcggcccgcgccgtcggggggcgcctccggggacctgcgtgcctttggcacgcgcgatgcgttgcacctgggcttcccgcgggagccgcggcccaagttgcaccacagcctcagcttctcgggcttcccgtcgggccaccatcagcccccgggcggcctcgagtcgccgctgctgctcgacagccccacgtcgcgcacgccgccgccgccctcctgctcttcggcctcgtcctgctcctcctccgcctcctcctgttcctcggcctccgcggcctccacgccctcgggcgccccgacatgctgcgcctccgcggcggccgcggctgcggccgctctgctgtacggcaccgggggcgccgaggacctgctggcgccgggggccccgtgcgcggcctgctcgtcggcctcgtgcgccaacaacgccttcgccttcggtccggagctcagcagcctcatcacgccgctcgccatccagacccacaactttgccgccgtggccgccgccgcctactaccgcagtcagcagcagcagcagcagcagggcctggcgccccccgcgcagccgccggcgccgcccagcgcgaccctccccgccggggccgccgcacctccctcgccgcccttcagcttccagctgccgcgccgcctgtccgactcgcccgtgttcgacgcgccccccagccccccggactcgctgtcggaccgcgacagctacctaagcggctccctgagctccggcagcctcagcggctctgagtctcccagcctcgaccctggccgccgcctgccaatcttcagccgcctctccatctccgacgac

SEQ ID NO: 4368 - DNA, 2757 bp, Homo sapiens
  source 1..2757: mol_type = genomic DNA
atggccgccgacgtcttcatgtgctccccgcgccggcctcgcagccggggccgccaggtgctgctcaagccccaggtgtccgaggacgacgacgactcggacacggatgagccgtccccgccgcccgcctccggcgcggccaccccggcccgggcccacgcgagcgccgcgccaccgccgcctcgggccgggccgggccgcgaggaacctccgcgccgccagcagatcatccacagcggccacttcatggtgtcgtcgccgcaccgagagcacccgcccaagaagggctacgatttcgacacggtcaacaaacagacgtgccagacctacagcttcggcaagactagctcctgccacctgtccatcgacgcctcgctcaccaagctcttcgagtgcatgactttggcctacagtgggaagttggtgtctccaaagtggaagaatttcaagggcctgaagctacagtggagagacaagatccggctcaataatgccatctggcgggcctggtacatgcagtatctggagaagcgcaagaatcctgtgtgccactttgtgacacccctggacggctctgtggacgtagacgagcaccgccggccggaggccatcaccacggaagggaagtactggaagagccgcatcgagattgtgatccgggagtatcacaagtggagaacctacttcaagaaaaggctacagcagcacaaggatgaggacctctccagcctggtccaggacgatgacatgctgtattggcacaagcacggggatggatggaagacccccgtccccatggaggaggatcccctgctggacacagacatgctcatgtcggaattcagcgacaccctcttctccacactttcttcacaccagccggtggcctggcccaatccccgggaaatagcacatctgggaaatgcagacatgatccagccgggactgattcctttgcagcctaacctggacttcatggacacctttgagcctttccaggacctcttctcttctagccgctccatttttggctccatgctacctgcatctgcctcagcacctgtaccagatcccaacaacccacctgcacaggagagcatcctgccgaccacagccctccccactgtgagccttcctgacagcctcatcgcgccccctaccgccccatccctggctcacatggatgagcagggctgtgaacacacctcccggactgaggacccgtttatccagcccacggacttcggtccctcagagccgccactgagtgtcccgcagcccttcctccctgtcttcaccatgcccctgctgtctcccagccccgccccaccgcccatctcccccgtgttaccattagttcctcctcctgccactgccctgaaccccccggctccacccaccttccatcagccacagaagtttgctggagtcaacaaagcgccgtctgtcatcacccacacggcctctgccaccctcacccacgatgcccccgccaccacctttagccagagtcagggccttgtgatcaccacccatcaccctgccccgtcagcggccccttgtgggctggcactgtctcctgtcacccggcctccccagccacggttaacttttgtgcaccccaaacctgtatccttgactgggggcaggcctaagcagccccacaaaatagtgcctgctcccaaaccagagcccgtgtccttggtgttgaagaatgcccgtatcgccccagctgccttttcaggccaaccacaagcggtgatcatgacgtcagggcctctgaagagagaagggatgttggcctccaccgtgtcccagtccaacgtggtcattgcgcctgctgccatcgccagggctcctggggtcccggagttccacagcagcatcctggtgacagatctcggccatggcacgagcagcccgcctgcccccgtctcccggctcttcccaagcacagcgcaagaccccctggggaagggcgagcaggtcccgctgcatgggggcagcccccaggtcactgtcacagggcccagtcgggactgcccaaactcagggcaggcctctccgtgtgcatcggagcagagccccagtcctcaatctccccagaacaactgctcagggaaatccgaccccaaaaatgtggctgcactaaagaaccggcagatgaagcacatctcagctgagcagaaaaggcgcttcaacatcaagatgtgcttcgacatgctcaacagcctcatctccaacaattccaagctgaccagtcacgccatcacactgcagaagactgtggagtacatcaccaagctgcagcaggagagaggccagatgcaggaggaggcccggcggctgcgggaggagatcgaggagctcaatgccaccatcatctcctgccagcagctgctccctgccacgggagtccccgttacccggcgccagtttgatcacatgaaagacatgtttgacgaatacgtgaaaacccggaccttgcagaattggaagttctggattttcagcatcatcatcaagccgctgtttgagtcgttcaagggcatggtgtccaccagcagcctggaggagctgcaccggacggcgctctcctggctggaccagcactgctccctgcccatcctcaggccgatggtattgagcacgctgcggcagctgagcacctccacctccatcctcacagacccggcacagctgccagagcaggcgtccaaggctgtcaccaggattggcaagagattgggagagtcc

SEQ ID NO: 4369 - DNA, 3222 bp, Homo sapiens
  source 1..3222: mol_type = genomic DNA
atgaaggatattggacagcagctatacactacacacttgaacggcggacataattccttgaccatgtcacccaaacagcctgatgctaatggagcacctcggccaaatagacaagaagcacaaacccttttgtatcaaggctcagaggcagaggctgccatgatgaccattgctacatgtgcaaagtgcaaaagtgttcacaagatctctcttcaagatttgcagaagggtacagggaaggacggtatgtatgtctgcttccagtgcagcctcggtgcagctcctcccaattttcattttgtgagcaataattccagtgcgactcatgttggaaataaaactgaaaacttctcaagttctgtcaatagcaaatttaaggtaaggaactttaagccaggcaaatactattgtgataaatgtcgattctctacaaaggacccgctgcagtacaaaaagcacacccttcaacacgaggagattaaattcatttgttctcactgcagctacatttcgtatacgaaaggagagtttcagaggcatttggtgaaacacacaggcatatttccttatcagtgtgagtattgtgactatggtgctattagaaatgattatattgtcaaacacacgaagagagtacatgaaagggcaggtgcgaaacggccagtcaaagctgttgccaagctggagccaaaaagaaccggaacttcaaaacaaaacccagagcttctaaaagcttccaatccacggactacatttcaaaataagtggtcagaccaactgtcaggtttctctctccatgcaaataaagacaaaatgcacaatatcatgttgttacctgaaccaaaggaataccaaaaagatgtagtttgtattccaaataaaatgaccctgtctgagccaaatgaagtcaacctatttgagaacaaaaatgttgaagtagaagtgttatcccctgcaaaagaacctgttcagccaggtatgccattgacagttgttgcaccagcagaactagttgtccctgcaaactgtttagcccagttgatagatgtgaaggttgtcaatggtacacagcagcttgttctgaaactgtttccgctggaagaaaataattgccttgaagctgggagggataatggaggtaattctgaacgtatggtgaaagagaagggttcaaatgaacaagaaaaagtactttctgcagaaaaaacaaagtcactgacagttgacgggaatgttggaaaactcgtaggcattgatagttttcaaccttcagttcagaaacagcttaaaaatgtgaaatgggtaaggtcttatgattttattatgccaaattctagtgtgcacaacaatggaaaatccttcattaattcggaaacaattgaggattttcagaaaaaaaataatttgtatccacatagaactgcttttccttccgttgccttaaaaggtcattctctagcatctgtatttaaaaacagtgttttacgtagtcttggagctgcatcaaacccttttccatataaagctgctgtttgttttgctgaaagtggaagaaatttacacagtagctcacagcagttactcccatttgctgcatcacctgcaacctgttccttctctggagaaaagggcttattgcctgtaagtgaaaatgacttggaatctacaagtaaagtcaatattcctgtaaaagtggtttcctctaataggaagcaggaagataaccagacagaggaacacaaggcagtttcaactgtaggccagatttcctctcaacataagagtgagtatttacatataaacataactggagaagatagatctcaacagcctggggataagcctttggaattaaagaattctgaaaggactaacaacactaatgatggcccagtcatctcatcagtattttctctgagctctggatctgaaaatgtccccgagggcattaagtggaatagctcaacgtctaaaataaagtcaattgaactgttgcgcagaaagatagctcagttaattgagtcctgtgggaagccgtcatctttggcttcaaatagtgcacatcgtcgctctgtagggcaggcatcaaagggaacttcaaaagctacctctgaaggtattcaagaaatcaacgtgtcactcactggtcttggccattccacaggtactcttcagaaacctccgaatgatggtggtattactggtaatagacagcttactcatcaacaaatatatccacactttgcagatggcagtaataggaaaaccaaaagcagagtggccaggaaggctcatgttgccacgccagtgttaatccccaaaggggctgtgttgagggttcttaattcctctgagaatgcccacatcatagaggctacatgtgaagcacctgtcagcataccttgcagtgaaagacagttaataaaaccagttccattttgccctgtgagacaggcggactcagacttacagcctttaagaagtgaaagggggccaatagatatgtccccaaatatcgagacacctctgcggcctaaactgagaaaagagagtgctgtctgtagcaccatccatagaaaaactggcctcttgtatggacagcaaggaagcagtgaattaaataagcaagggagactgctttccagaagtctttctataagtagaaataaaaccaaacaagtacacttatccaggaagaaaaacaaaattcaagctgaacctagccgctgtctcaaggatccttcaatttttcaggttgcaaggcaactaagactgatagcagctaagccagatcagttgattaagtgtccccgtcggaaccagccagtcattgtgttaaaccaccctgatgtggactcgccagaagtgaccaatgtgatgaaggtaataaataaatacaaaggcaatgtcctcaaagttgttttatcagagaggactaggtgtcagctaggcatcagacggcatcatgtacgcctgacctaccagaatgcggaagaagccagtcaaattaaaaggcaaatgatgttgaaaatgaaactcaaaaaagttcataaaaacaactaccaggtagtggattccttgcctgatgattcttcacagtgtgtatttaagtgctggttttgtgggcgactgtatgaagaccaggaagagtggatgagtcatggccaacggcatttgatagaagcaactagagattgggatgttctttcctccaagggcaaa

SEQ ID NO: 4370 - DNA, 4449 bp, Homo sapiens
  source 1..4449: mol_type = genomic DNA
atgccatctgaacagaaacagttattttgtgatgaaaaacaaactactttaaaaaaagattatgatgtgaaaaatgagatagttgataggtcggcacctaaaccaaaaatttcaggaagtattcattatgcactaaaaaatgtgaaaattgatttgccaaaaataaatattccaaatgaagtcctattgaaacatgaagttgacaaatacagaaaattatttcagagtaaacagcagactgcaagaaaatctatcagtataaagactgtaagctgtgtagaggagtgtacattgcttcataagtctgagagagctgaagaagagggtgtaaaaatgtctgcaaaaatactcaatttcagctgtttaaaatgccgagacaacactcgatatagcccaaatgatttgcagaaacactttcaaatgtggcaccatggcgaattaccttcatatccttgtgaaatgtgcaacttttcagcaaatgactttcaggtatttaaacaacacagacgaacccatagaagcactttagtaaaatgtgacatttgtaacaatgagagtgtatatactttactgaacttgacaaagcatttcacatccacacattgtgttaatggtaattttcaatgtgaaaagtgtaagttctccacccaggatgttggcacatttgttcagcacattcatagacataatgaaattcattataagtgtggtaaatgtcatcatgtatgttttaccaaaggagagcttcagaagcaccttcatattcattctggtacttttcccttcacttgtcaatattgtagctatggtgccaccaggagagaacaccttgtaagacatgttataactttgcacaaagaacatttatatgcaaaagaaaaactggaaaaagacaaatatgaaaaaagaatggcaaagacttctgcaggacttaagctaatactgaaaagatataaaataggtgcatcaaggaagacgttctggaaacgtaagaaaattaacagtggaagtgacagaagtatagaaaagaacactcaagtgcttaagaaaatgaacaaaacacagactaaatctgaagaccagagccatgttgttcaagagcatttaagtgaagaaaaggatgaaagactacactgtgagaataatgataaagcccctgaatcagagtcagagaagccaactcctctgtccactgggcaaggtaatagagctgaagagggaccaaacgctagttcaggtttcatgaagactgctgtactaggacctacactgaaaaatgtaatgatgaaaaataataaactagcagtttcccctaactataatgctacgtttatgggcttcaagatgatggatggaaaacagcatattgtattaaaattggtgcctatcaaacaaaatgtatgttcaccaggctcacagtcaggtgctgcaaaggacggtactgctaatttgcagccccagactttggacactaatggatttttaacaggagtaacaactgagttaaatgacacagtttatatgaaagcagctactccattttcatgttcatcttctatactttcagggaaagcaagttcagaaaaagaaatgactttgatatctcaaaggaataatatgcttcaaacaatggattatgagaaaagtgtatcttctttgtcagcaacatcagaattggttacagcatcagtgaatttgaccacaaaatttgaaacaagagataatgttgacttctggggaaatcatctcactcagagtcaccccgaggtattaggtaccaccattaaaagtccagataaagtcaactgtgttgccaaaccaaatgcatacaacagtggagatatgcataattattgcattaattatggcaactgtgagttacctgttgaatcctccaaccaaggatcattaccttttcataattactcaaaagtgaataattctaataaacgtcgtaggttttcaggaacagcagtgtatgaaaaccctcaaagagaatcttcatccagcaaaacagttgtccaacaaccaattagtgaatcatttttatcactagtgaggcaggagagctcaaaaccagatagcctattagcatctattagccttttaaatgataaagatggaactttaaaagcaaaatctgaaattgaagaacagtatgttttagaaaaaggacaaaacattgatggacaaaacctgtacagtaatgaaaatcaaaatttagagtgtgcgactgaaaaatctaaatgggaagacttttctaatgtcgattcacctatgatgcctagaatcacatctgttttctctctccagagccaacaggcatcagaatttctgccacctgaagtaaaccaattgcttcaggatgtattgaaaataaaacctgatgtaaaacaagactctagtaacactccaaataaaggcttgccacttcattgtgaccagtcatttcaaaaacacgagagagaaggcaaaattgttgaatcttcgaaagatttcaaagtgcaaggcatcttcccagttccacctggcagtgtgggtattaatgtgcctacaaatgatttgaatttgaaatttggaaaagaaaaacaagtgtcatcaataccacaagatgtgagagattcagagaagatgcctagaatttcaggttttggcacattacttaagactcagtcagatgcgataataacacagcagcttgtaaaagacaaactacgagccaccacacaaaatttaggttctttttatatgcagagtccacttttaaattcagaacaaaaaaaaactataattgttcagacttcaaaaggattcttaataccattgaacattactaacaagcctgggctaccagttattcctggaaatgcacttccattggttaattcacaaggtatccctgcttctctttttgtaaacaagaaacctgggatggttttaacacttaataatgggaaacttgaaggtgtttccgctgtcaaaaccgagggtgccccagctcgtggaactgtgactaaggagccttgcaaaacacctattttgaaggtagaaccaaacaataattgtcttacacctggactttgttccagcattggcagttgtttgagcatgaaaagtagctcagaaaatactttgccattaaaaggcccttacattttgaaaccaacgagttctgtgaaagctgttcttattcctaacatgctatctgagcaacagagcactaagttgaatatctccgattcagtaaaacagcagaatgagatttttccaaaaccacctctttataccttcttgcctgatggcaaacaagctgtttttttaaagtgtgtgatgccaaataaaactgagctgcttaagcccaaattagtccaaaatagtacttatcaaaatatacagccaaagaaacctgaaggaacaccacaaagaatattgctgaaaatttttaaccctgttttaaatgtgactgctgctaataatctgtcagtaagcaactctgcatcctcattgcaaaaagacaacgtaccatctaatcagattataggaggagagcagaaagagccagaatctagagatgccttacccttcttactagatgacttaatgccagcaaatgaaattgtgataacttctactgcaacatgcccagaatcttctgaggaaccaatatgtgtcagtgactgttcagagtccagggtattaaggtgtaaaacaaattgtagaattgagaggaacttcaatagaaaaaagacttccaaaaaaattttttcaaaaacaaaaactcatggaagtaaagactctgaaactgcctttgtatctagaaacagaaactgtaaacgaaagtgtagggatagttaccaagaacctccaagaagaaaagcaacattgcatagaaagtgtaaagaaaaggcaaaacctgaagatgtccgtgaaacatttggatttagcagacctaggctttcaaaagattccatcagaactttgcggcttttcccttttagttctaaacagcttgtgaaatgtcctaggagaaaccaaccagttgtagttttgaatcatcctgacgcagatgcaccagaagtagtaagtgtaatgaaaactattgctaaatttaatggacatgtacttaaggtttcattgtcaaaaagaactataaatgctttactgaaaccagtttgttataaccctcctaaaacaacttatgatgatttttccaagaggcacaaaacatttaaacctgttagttctgtgaaagaaagatttgtgctaaaattaacactcaaaaagacaagcaaaaacaattaccagattgtgaagactacctctgaaaatattttgaaggctaaatttaactgttggttttgtggtagagtatttgacaatcaggatacttgggctggtcatgggcagagacatttaatggaagctactcgggattggaacatgttagaa

SEQ ID NO: 4371 - DNA, 2211 bp, Homo sapiens
  source 1..2211: mol_type = genomic DNA
atgcctgaccatgacagcacagccctcttaagccggcaaaccaagaggagaagagttgacattggagtgaaaaggacggtagggacagcatctgcattttttgctaaggcaagagcaacgttttttagtgccatgaatccccaaggttctgagcaggatgttgagtattcagtggtgcagcatgcagatggggaaaagtcaaatgtactccgcaagctgctgaagagggcgaactcgtatgaagatgccatgatgccttttccaggagcaaccataatttcccagctgttgaaaaataacatgaacaaaaatggtggcacggagcccagtttccaagccagcggtctctctagtacaggctccgaagtacatcaggaggatatatgcagcaactcttcaagagacagccccccagagtgtctttccccttttggcaggcctactatgagccagtttgatatggatcgcttatgtgatgagcacctgagagcaaagcgcgcccgggttgagaatataattcggggtatgagccattcccccagtgtggcattaaggggcaatgaaaatgaaagagagatggccccgcagtctgtgagtccccgagaaagttacagagaaaacaaacgcaagcaaaagcttccccagcagcagcaacagagtttccagcagctggtttcagcccgaaaagaacagaagcgagaggagcgccgacagctgaaacagcagctggaggacatgcagaaacagctgcgccagctgcaggaaaagttctaccaaatctatgacagcactgattcggaaaatgatgaagatggtaacctgtctgaagacagcatgcgctcggagatcctggatgccagggcccaggactctgtcggaaggtcagataatgagatgtgcgagctagacccaggacagtttattgaccgagctcgagccctgatcagagagcaggaaatggctgaaaacaagccgaagcgagaaggcaacaacaaagaaagagaccatgggccaaactccttacaaccggaaggcaaacatttggctgagaccttgaaacaggaactgaacactgccatgtcgcaagttgtggacactgtggtcaaagtcttttcggccaagccctcccgccaggttcctcaggtcttcccacctctccagatcccccaggccagatttgcagtcaatggggaaaaccacaatttccacaccgccaaccagcgcctgcagtgctttggcgacgtcatcattccgaaccccctggacacctttggcaatgtgcagatggccagttccactgaccagacagaagcactgcccctggttgtccgcaaaaactcctctgaccagtctgcctccggccctgccgctggcggccaccaccagcccctgcaccagtcgcctctctctgccaccacgggcttcaccacgtccaccttccgccaccccttcccccttcccttgatggcctatccatttcagagcccattaggtgctccctccggctccttctctggaaaagacagagcctctcctgaatccttagacttaactagggataccacgagtctgaggaccaagatgtcatctcaccacctgagccaccacccttgttcaccagcacacccgcccagcaccgccgaagggctctccttgtcgctcataaagtccgagtgcggcgatcttcaagatatgtctgaaatatcaccttattcgggaagtgcaatgcaggaaggattgtcacccaatcacttgaaaaaagcaaagctcatgtttttttatacccgttatcccagctccaatatgctgaagacctacttctccgacgtaaagttcaacagatgcattacctctcagctcatcaagtggtttagcaatttccgtgagttttactacattcagatggagaagtacgcacgtcaagccatcaacgatggggtcaccagtactgaagagctgtctataaccagagactgtgagctgtacagggctctgaacatgcactacaataaagcaaatgactttgaggttccagagagattcctggaagttgctcagatcacattacgggagtttttcaatgccattatcgcaggcaaagatgttgatccttcctggaagaaggccatatacaaggtcatctgcaagctggatagtgaagtccctgagattttcaaatccccgaactgcctacaagagctgcttcatgag

SEQ ID NO: 4372 - DNA, 1776 bp, Homo sapiens
  source 1..1776: mol_type = genomic DNA
atggatccaaactccatcttgctttctcctcagccccagatctgctcccacctagcagaagcttgtacggaaggcgagagaagctcatcccctccagagctggatagagactccccgtttccctggagtcaggtccccagctccagccctacagaccccgaatggtttggtgatgagcacatccaggcaaagagggccagagtggagaccattgtccgaggcatgtgtctctccccgaatcctctggtgccaggcaatgcgcaagctggggtcagcccacgctgcccaaagaaggcccgagagaggaagaggaagcagaaccttcccacaccgcaaggcctcctgatgccagcccctgcctgggaccagggcaacaggaaggggggccctcgtgtgagagaacaacttcatctgctgaagcaacagctaagacatctgcaagagcacatcctacaggctgccaagcccagggacacagctcaggggccaggaggctgtggcacggggaaaggccctctgagtgcaaagcaggggaatggctgtgggcctcgcccctgggttgtggacggtgaccaccagcaaggtaccagcaaggacctctctggggcagaaaaacaccaagagtctgagaagcccagtttccttccttctggagcaccagcttcactagagattctgaggaaagagctgaccagggcagtgtcccaggctgtggactcggtattacaaaaggtactattggatccaccaggccacctgactcagctgggcagaagcttccaggggcaggtggcagagggtagaagcgagccctcacctcctgtgggaggggcctgtaaagatccacttgctttggctgccttgcccaggagggtccagctacaagctggggtcccagtaggaaatttatcactggccaagcgtctagattctcctaggtaccctatccctccaagaatgacccccaaaccctgtcaggatcccccagcaaactttcccttgactgcaccttcccacatccaggaaaatcagattcttagccagctactgggtcatagatacaacaatggccattggagtagcagtcctccccaggactcatcttcccagaggcacccctcctcagagcctgccctacgaccttggagaactactaagccgcaaccattggtcctgagccagcagcagtgtcccttgcctttcacctctgcccatctggaaagtctaccccttcttccctcggtgaagatggaacagagaggcctgcatgctgtcatggaggcactgcctttctctttggtccacatccaggagggtctaaaccctggtcacttgaagaaggccaaactaatgtttttcttcacacgatatcccagctccaacctcctgaaggtttattttcctgatgttcagttcaaccgctgcattacctcccagatgatcaagtggttcagcaactttcgtgagttttattacatccaaatggaaaaatctgcccggcaagcaatttcagatggtgtcacaaatcccaaaatgctggtggttctccgcaattcagaactttttcaagctctcaatatgcactacaacaagggaaatgactttgaggttccagattgcttcttggaaattgccagcttgacgttacaggagttcttcagggctgtctccgcagggagagactcagatccttcctggaagaaacccatttataaaattatttcgaaactggacagtgacatcccagagatattcaaatcttccagctatccccag

SEQ ID NO: 4373 - DNA, 1095 bp, Homo sapiens
  source 1..1095: mol_type = genomic DNA
atggatccaaactccatcttgctttctcctcagccccagatctgctcccacctagcagaagcttgtacggaaggcgagagaagctcatcccctccagagctggatagagactccccgtttccctggagtcaggtccccagctccagccctacagaccccgaatggtttggtgatgagcacatccaggcaaagagggccagagtggagaccattgtccgaggcatgtgtctctccccgaatcctctggtgccaggcaatgcgcaagctggggtcagcccacgctgcccaaagaaggcccgagagaggaagaggaagcagaaccttcccacaccgcaaggcctcctgatgccagcccctgcctgggaccagggcaacaggaaggggggccctcgtgtgagagaacaacttcatctgctgaagcaacagctaagacatctgcaagagcacatcctacaggctgccaagcccagggacacagctcaggggccaggaggctgtggcacggggaaaggccctctgagtgcaaagcaggggaatggctgtgggcctcgcccctgggttgtggacggtgaccaccagcaaggtaccagcaaggacctctctggggcagaaaaacaccaagagtctgagaagcccagtttccttccttctggagcaccagcttcactagagattctgaggaaagagctgaccagggcagtgtcccaggctgtggactcggtattacaaaagttcaaccgctgcattacctcccagatgatcaagtggttcagcaactttcgtgagttttattacatccaaatggaaaaatctgcccggcaagcaatttcagatggtgtcacaaatcccaaaatgctggtggttctccgcaattcagaactttttcaagctctcaatatgcactacaacaagggaaatgactttgaggttccagattgcttcttggaaattgccagcttgacgttacaggagttcttcagggctgtctccgcagggagagactcagatccttcctggaagaaacccatttataaaattatttcgaaactggacagtgacatcccagagatattcaaatcttccagctatccccag

SEQ ID NO: 4374 - DNA, 1020 bp, Homo sapiens
  source 1..1020: mol_type = genomic DNA
atgccagagtggccaccttgcttatctgtggccccggccctggtgatcaccatggcagctgggaagggagccccgttgagcccatcggctgaaaacagatggcgacttagcgaacctgagctgggccggggctgcaagccagtgctgctcgagaagacgaaccgcctgggccctgaggctgctgtgggcagggcgggccgggatgtgggcagtgcggagctggcactgttggtagccccaggcaagccccgacctggcaagccgctgcccccgaagacacgtggagagcagaggcagagcgccttcacggagctgccgaggatgaaggaccggcaggtggatgctcaggcccaggagagggagcacgatgaccccacaggccaacctggtgccccacagctgacccagaacatccccagaggcccagctggcagcaaagtcttctctgtgtggcccagcggagcacgaagtgagcaaagaagcgcctttagcaaaccaaccaagcgaccagcagagaggcctgagctaacctcagtcttccctgcaggggaatctgcagatgccctgggggagctgtctggactcctcaacactacagacctcgcttgttggggtcgactttcaactcccaagcttttggttggtgatttgtggaacttgcaagcattgccacagaatgctccactctgtagcacttttctgggtgcccctacactgtggctggagcatacccaggcccaggtgcccccaccctcatcatcctccaccacttcgtgggccctcctgccacccaccctcacctccctgggcttgtccacccagaactggtgtgcaaagtgcaacctgtcctttcgcctaacgtccgacctggtctttcacatgcgatcccaccacaaaaaggagcatgcggggcctgacccacattctcagaagcggagagaagaggcccttgcctgccctgtgtgccaggagcacttccgggagcgccaccacctctcccggcacatgacttctcacagc

SEQ ID NO: 4375 - DNA, 1374 bp, Homo sapiens
  source 1..1374: mol_type = genomic DNA
atgttggagcaaaggagggagccctggtctggtgagagtgaagtgaaaatagcaaaaaattcagatgggagggagtgcatcaaaggtgtgaacacagggagcagctatgcattgggaagcaatgcagaagacaaaccaattaaaaaacaacttggagtatcctttcacttacatctgtctgaactggagctatttccagatgaaagggtaataaatggatgtaatcaagttgaaaactttatcaaccacagttcctctgtttcctgtcttcaagaaatgtcttccagtgtcaaaacccccatttttaataggaatgattttgatgattcttcatttctcccacaagaacagaaagtacaccttagagaaaaaccttatgaatgtaatgagcatagcaaagtctttagagtatcttccagccttactaaacatcaagtaatccatactgtagagaaaccttacaaatgtaattcatgcggcaaggtctttagtcgcaattcacaccttgcagaacattgtagaattcatactggagagaaaccttacaaatgtaatgtctgtggcaaggtttttagttacaattcaaactttgcacgacatcaaagaattcataccagagagaagccgtatgaatgtaatgaatgtggtaaagtcttcagtaataattcttaccttgcacgacatcaaagaattcatgctgaagagaaaccttacaaatgtaatgaatgtggtaaaggcttcagtcataagtcatctctagcaaatcattggagaatttatactggagagaagccttacaaatgtgatgaatgtggcaaggccttctataggattgcgctccttgtacgacatcagaaaattcatactggagagaaaccttacaaatgtaatgaatgtggaaaggtctttattcaaaattcgcacctagcacaacattggagaattcatacaggagagaaaccttacaaatgtaatgaatgtggaaaagtatttaatcaactttcaaatcttgcacgacatcgaagaattcatactggagagaagccttacaaatgtaatgaatgtggtaaagcatttagtgagtattcaggcctttcagcccatcttgtaatccacactggagagaagccttacaaatgtagtgaatgtggcaaggcattcagacacaagttatcactaaccaatcatcagagaatccatactggagaaagaccttacaaatgtaatgaatgtggcaaggtcttcaatcgaattgcacaccttgcacgacatcggaaaattcatactggagagaaaccttacaaatgtaatgagtgtggcaaggcctttagtcgcatttcatacctagcacaacattggacaattcatatggga

SEQ ID NO: 4376 - DNA, 1476 bp, Homo sapiens
  source 1..1476: mol_type = genomic DNA
atgctgtgtgatgaaaaagcccagaagagaaggaagaggaaagcaaaggagtcagggatggctcttcctcagggacacttaacattcagggacgtggccatagaattctctcaggcggagtggaaatgcctggaccctgcacagagggctttatacaaggatgtgatgttggagaactacaggaacctggtctccctggggagcagctatgcattgggaagcaatgcagaagacaaaccaattaaaaaacaacttggagtatcctttcacttacatctgtctgaactggagctatttccagatgaaagggtaataaatggatgtaatcaagttgaaaactttatcaaccacagttcctctgtttcctgtcttcaagaaatgtcttccagtgtcaaaacccccatttttaataggaatgattttgatgattcttcatttctcccacaagaacagaaagtacaccttagagaaaaaccttatgaatgtaatgagcatagcaaagtctttagagtatcttccagccttactaaacatcaagtaatccatactgtagagaaaccttacaaatgtaattcatgcggcaaggtctttagtcgcaattcacaccttgcagaacattgtagaattcatactggagagaaaccttacaaatgtaatgtctgtggcaaggtttttagttacaattcaaactttgcacgacatcaaagaattcataccagagagaagccgtatgaatgtaatgaatgtggtaaagtcttcagtaataattcttaccttgcacgacatcaaagaattcatgctgaagagaaaccttacaaatgtaatgaatgtggtaaaggcttcagtcataagtcatctctagcaaatcattggagaatttatactggagagaagccttacaaatgtgatgaatgtggcaaggccttctataggattgcgctccttgtacgacatcagaaaattcatactggagagaaaccttacaaatgtaatgaatgtggaaaggtctttattcaaaattcgcacctagcacaacattggagaattcatacaggagagaaaccttacaaatgtaatgaatgtggaaaagtatttaatcaactttcaaatcttgcacgacatcgaagaattcatactggagagaagccttacaaatgtaatgaatgtggtaaagcatttagtgagtattcaggcctttcagcccatcttgtaatccacactggagagaagccttacaaatgtagtgaatgtggcaaggcattcagacacaagttatcactaaccaatcatcagagaatccatactggagaaagaccttacaaatgtaatgaatgtggcaaggtcttcaatcgaattgcacaccttgcacgacatcggaaaattcatactggagagaaaccttacaaatgtaatgagtgtggcaaggcctttagtcgcatttcatacctagcacaacattggacaattcatatggga

SEQ ID NO: 4377 - DNA, 1605 bp, Homo sapiens
  source 1..1605: mol_type = genomic DNA
atgctgtgtgatgaaaaagcccagaagagaaggaagaggaaagcaaaggagtcagggatggctcttcctcagggacacttaacattcagggacgtggccatagaattctctcaggcggagtggaaatgcctggaccctgcacagagggctttatacaaggatgtgatgttggagaactacaggaacctggtctccctgggaatctctcttcctgacctgaatattaactccatgttggagcaaaggagggagccctggtctggtgagagtgaagtgaaaatagcaaaaaattcagatgggagggagtgcatcaaaggtgtgaacacagggagcagctatgcattgggaagcaatgcagaagacaaaccaattaaaaaacaacttggagtatcctttcacttacatctgtctgaactggagctatttccagatgaaagggtaataaatggatgtaatcaagttgaaaactttatcaaccacagttcctctgtttcctgtcttcaagaaatgtcttccagtgtcaaaacccccatttttaataggaatgattttgatgattcttcatttctcccacaagaacagaaagtacaccttagagaaaaaccttatgaatgtaatgagcatagcaaagtctttagagtatcttccagccttactaaacatcaagtaatccatactgtagagaaaccttacaaatgtaattcatgcggcaaggtctttagtcgcaattcacaccttgcagaacattgtagaattcatactggagagaaaccttacaaatgtaatgtctgtggcaaggtttttagttacaattcaaactttgcacgacatcaaagaattcataccagagagaagccgtatgaatgtaatgaatgtggtaaagtcttcagtaataattcttaccttgcacgacatcaaagaattcatgctgaagagaaaccttacaaatgtaatgaatgtggtaaaggcttcagtcataagtcatctctagcaaatcattggagaatttatactggagagaagccttacaaatgtgatgaatgtggcaaggccttctataggattgcgctccttgtacgacatcagaaaattcatactggagagaaaccttacaaatgtaatgaatgtggaaaggtctttattcaaaattcgcacctagcacaacattggagaattcatacaggagagaaaccttacaaatgtaatgaatgtggaaaagtatttaatcaactttcaaatcttgcacgacatcgaagaattcatactggagagaagccttacaaatgtaatgaatgtggtaaagcatttagtgagtattcaggcctttcagcccatcttgtaatccacactggagagaagccttacaaatgtagtgaatgtggcaaggcattcagacacaagttatcactaaccaatcatcagagaatccatactggagaaagaccttacaaatgtaatgaatgtggcaaggtcttcaatcgaattgcacaccttgcacgacatcggaaaattcatactggagagaaaccttacaaatgtaatgagtgtggcaaggcctttagtcgcatttcatacctagcacaacattggacaattcatatggga

SEQ ID NO: 4378 - DNA, 1614 bp, Homo sapiens
  source 1..1614: mol_type = genomic DNA
atgaccacattcaaggaggcagtgaccttcaaggatgtggctgtggtcttcactgaggaggagctggggctgctggaccctgcccagaggaagctgtaccgagatgtgatgctggagaacttcaggaacctgctctcagtggggcatcaaccgttccaccaagatacttgccacttcctaagggaagaaaagttttggatgatggggacagcaacccaaagagaagggaattcaggaggcaagatccaaactgagttggagtctgttccagaagcaggagcacatgaagagtggtcctgccagcaaatctgggaacaaattgcaaaagacttaaccaggtctcaggactctatcataaataactctcagttctttgaaaatggtgatgtcccctcccaggttgaagcaggactacccacaattcatacaggacagaaaccttcccagggtgggaagtgtaaacagtccatcagtgatgttcccatctttgatcttcctcagcagttatactcagaagagaagtcttatacatgtgatgagtgtggaaaaagcatctgttacatctcagctcttcatgttcatcagagagtccacgtgggagagaaactctttatgtgtgatgtgtgtggcaaggaatttagtcaaagctcacatctgcaaactcatcagagagtccacactggagagaaaccattcaaatgtgagcaatgtgggaaaggtttcagtcgtagatcagcacttaatgttcatcgtaaattacacacaggagagaaaccttacatttgtgaggcatgtgggaaggccttcattcatgattcccagcttaaggaacataagagaatccatactggggagaaaccattcaaatgtgatatatgtggtaagaccttctattttaggtcaagacttaagagccattccatggttcacacaggagaaaaaccatttaggtgtgatacatgtgataagagctttcatcagagatcagcacttaataggcattgcatggtccacacaggagagaaaccgtacagatgtgagcagtgtggaaaaggctttattggtaggctagatttttataagcatcaggtggtccacacaggagaaaaaccatataattgtaaagaatgtgggaagagcttcagatggtcctcatgccttttgaaccatcagcgagtccacagtggagaaaaaagcttcaaatgtgaagaatgtggaaagggattttatacaaattcacaactgtcttcccatcagagatcccacagtggtgaaaagccatataaatgtgaggagtgtgggaagggctatgttactaagtttaatcttgacttgcaccagagggtccacacgggagagagaccttataattgtaaggaatgtgggaagaactttagccgggcctcaagtattttgaatcataagagactccactgccagaaaaaaccattcaaatgtgaggactgtggaaagaggcttgtacacaggacataccgtaaagaccagccgagagactatagtggggaaaacccatccaaatgtgaggattgtgggagacgctacaagaggcgcttgaatctggatatacttttatcattatttctaaatgacaca

SEQ ID NO: 4379 - DNA, 1647 bp, Homo sapiens
  source 1..1647: mol_type = genomic DNA
atgataaagagaagcaaagtacttgtattctgttcaaagattatggaggaggcagtgaccttcaaggatgtggctgtggtcttcactgaggaggagctggggctgctggaccctgcccagaggaagctgtaccgagatgtgatgctggagaacttcaggaacctgctctcagtggggcatcaaccgttccaccaagatacttgccacttcctaagggaagaaaagttttggatgatggggacagcaacccaaagagaagggaattcaggaggcaagatccaaactgagttggagtctgttccagaagcaggagcacatgaagagtggtcctgccagcaaatctgggaacaaattgcaaaagacttaaccaggtctcaggactctatcataaataactctcagttctttgaaaatggtgatgtcccctcccaggttgaagcaggactacccacaattcatacaggacagaaaccttcccagggtgggaagtgtaaacagtccatcagtgatgttcccatctttgatcttcctcagcagttatactcagaagagaagtcttatacatgtgatgagtgtggaaaaagcatctgttacatctcagctcttcatgttcatcagagagtccacgtgggagagaaactctttatgtgtgatgtgtgtggcaaggaatttagtcaaagctcacatctgcaaactcatcagagagtccacactggagagaaaccattcaaatgtgagcaatgtgggaaaggtttcagtcgtagatcagcacttaatgttcatcgtaaattacacacaggagagaaaccttacatttgtgaggcatgtgggaaggccttcattcatgattcccagcttaaggaacataagagaatccatactggggagaaaccattcaaatgtgatatatgtggtaagaccttctattttaggtcaagacttaagagccattccatggttcacacaggagaaaaaccatttaggtgtgatacatgtgataagagctttcatcagagatcagcacttaataggcattgcatggtccacacaggagagaaaccgtacagatgtgagcagtgtggaaaaggctttattggtaggctagatttttataagcatcaggtggtccacacaggagaaaaaccatataattgtaaagaatgtgggaagagcttcagatggtcctcatgccttttgaaccatcagcgagtccacagtggagaaaaaagcttcaaatgtgaagaatgtggaaagggattttatacaaattcacaactgtcttcccatcagagatcccacagtggtgaaaagccatataaatgtgaggagtgtgggaagggctatgttactaagtttaatcttgacttgcaccagagggtccacacgggagagagaccttataattgtaaggaatgtgggaagaactttagccgggcctcaagtattttgaatcataagagactccactgccagaaaaaaccattcaaatgtgaggactgtggaaagaggcttgtacacaggacataccgtaaagaccagccgagagactatagtggggaaaacccatccaaatgtgaggattgtgggagacgctacaagaggcgcttgaatctggatatacttttatcattatttctaaatgacaca

SEQ ID NO: 4380 - DNA, 489 bp, Homo sapiens
  source 1..489: mol_type = genomic DNA
atgatgcctgggcagatcccggacccttcggtgaccacaggctccctgccagggcttggccccctgaccgggctccccagctcggccctgactgtggaggagctgaaatacgctgacatccgcaacctcggggccatgattgcacccttgcacttcctggaggtgaaactgggcaagaggccccagcccgtgaaaagtgagctagatgaggaagaggagcgaaggaaaaggcgccgggagaagaacaaagtcgcagcagcccgatgccggaacaagaagaaggagcgcacggagtttctgcagcgggaatccgagcggctggaactcatgaacgcagagctgaagacccagattgaggagctgaagcaggagcggcagcagctcatcctgatgctgaaccgacaccgccccacctgcatcgtccggaccgacagtgtcaagacccccgagtcagaaggcaacccactgctcgagcagctcgagaagaag

SEQ ID NO: 4381 - DNA, 522 bp, Homo sapiens
  source 1..522: mol_type = genomic DNA
atggtagcaggctggcctgccactcctcctgctatgatgcctgggcagatcccggacccttcggtgaccacaggctccctgccagggcttggccccctgaccgggctccccagctcggccctgactgtggaggagctgaaatacgctgacatccgcaacctcggggccatgattgcacccttgcacttcctggaggtgaaactgggcaagaggccccagcccgtgaaaagtgagctagatgaggaagaggagcgaaggaaaaggcgccgggagaagaacaaagtcgcagcagcccgatgccggaacaagaagaaggagcgcacggagtttctgcagcgggaatccgagcggctggaactcatgaacgcagagctgaagacccagattgaggagctgaagcaggagcggcagcagctcatcctgatgctgaaccgacaccgccccacctgcatcgtccggaccgacagtgtcaagacccccgagtcagaaggcaacccactgctcgagcagctcgagaagaag

SEQ ID NO: 4382 - DNA, 1323 bp, Homo sapiens
  source 1..1323: mol_type = genomic DNA
atggccccaagagcccagatccagggaccgctgacatttggggatgtggctgtggcctttacccggattgagtggagacacctggatgctgctcagcgggccctgtacagggatgtgatgctggagaactatgggaatctggtgtctgtggggcttctctcttccaaaccaaaactaattactcagttggagcaaggggcagagccctggactgaggtgcgagaggctccatcaggcacacatgcagtcgaggattactggtttgaaacaaagatgtcagccctaaagcaaagcacttctgaagcatctgttctgggagagcgaacgaaaagtgtcatgatggaaaaaggcctggactgggagggcagaagctccacagagaagaactataagtgcaaggaatgtgggaaagtcttcaaatacaattcgtcctttattagccaccagagaaatcacaccagtgagaaaccacataaatgtaaagaatgtgggatcgcctttatgaacagttcatcccttttaaatcaccataaggttcatgcaggcaaacagccttatagatgtattgaatgtgggaagttcctgaagaagcactcaacgtttatcaaccatcagagaattcattctagggagaaaccccacaaatgcattgaatgtggaaaaactttcagaaagaactcaatccttttaagtcatcagagaattcatactggccagaaaccctacaaatgtaatgactgtgggaaagccttcgctcagaatgcagctcttactcgtcatgaaagaatacatagtggagagaagccttttaaatgtaacaagtgtgggagagctttcagggataattcaactgtgttggaacatcagaaaatccatactggtgagaagccatatcagtgtaatgaatgtggaaaagcctttaggaagagctcaactcttattagtcaccaaagaatgcatactggggagaaaccctatcactgcagtaaatgtggaaaatctttcaggtatagctcatcctttgctggtcatcagaaaactcacagtggaaataaaccgtatcagtgtcgtgactgtgggaaggcctttacaaagagctcaacccttactggacatcagagaattcatactggagaaaaaccctatcactgtaagaaatgtgggaaagcctttcggcacagctcaggccttgttgaacatcagagactccatactggggaaaaaccttataaatgtaatgaatgtgggaaagcttttccccgaagttcagcccttaagcaacataagaaaattcataataaagaaagagccatgaaatgtagt

SEQ ID NO: 4383 - DNA, 1389 bp, Homo sapiens
  source 1..1389: mol_type = genomic DNA
atgccgggaccccttagaagcctagaaatggaatcattgcaatttagagatgtggctgtagaattctctctggaggagtggcattgcctggacactgcacagcagaatttatatagggatgtgatgttagagaactacagacacctggtcttccttggtattattgtctctaagccagacctgatcacctgtctggagcaaggaataaaacctctgactatgaagagacatgagatgattgccaaacccccagttgtgtgttctcattttgcccaagacctttggccagagcagagcataaaagattcttaccaaaaagtgatactgagaaaatttgaaaaatgtggacatggcaatttacactttaaaaaaggctgtgaaagtgtggatgagtgtaagttacacaaaagaggttataatggacttaaccaatgtttgacaactacccagagcaaaatatttcaatgtggtaaatatgtgaaagtctttcatcaattttcaaattcaaagagacataaaagaagacatactgaaaaaaaacctttgaaatatatagaaggtgacaaagcttttaaccagtcctcaacccatactacacataaaaaaattgatactggagagaaaccatacaaatgtgaagaatgtggcaaagccttcaaccggtcctcacaccttactacacataagataactcatactagagagaaaccctacaaatgtgaagaatgtggcaaagtctttaagtacttctctagctttactacacataagaaaattcatagtggagagaaaccctacatttgtgaagaatgtggcaaagcctttatgtacccctatacccttactacacataagataatccatactggagagcaaccctacaaatgtaaagaatgtgacaaagcttttaaccatcctgcaactctttcttcacataagaaaattcatactggagagaaaccgtacacgtgtgataaatgtggcaaagcctttatttcatcctcgatccttagtaaacatgagaagattcatacgggagagaaaccctacaaatgtgaagaatgtggcaaagccttcacccgctcctcacaccttactatgcataagataattcatactggagagaaaccatacaaatgtgaagaatgtggcaaagcctttacatggtctgcaggcctccataaacataggagaactcatactggagagaaaccctacaaatgtgaagaatgtggcaaagcgtatactacatcctcaaatctaactgaacataagacaactcatactggagagaaaccttacaaatgtaaagaatgtggcaaagcttttaactggtcctcagaccttaataaacataagagaattcatattggacagaaaccaagaacg

SEQ ID NO: 4384 - DNA, 1863 bp, Homo sapiens
  source 1..1863: mol_type = genomic DNA
atggcggatttcgaagagttgaggaatatggtttctagttttagggtttctgaactacaagtattactaggctttgctggacggaataaaagtggacgcaagcatgacctcctgatgagggcgctgcatttattgaagagcggctgcagccctgcggttcagattaaaatccgagaattgtatagacgccgatatccacgaactcttgaaggactttctgatttatccacaatcaaatcatcggttttcagtttggatggtggctcatcacctgtagaacctgacttggccgtggctggaatccactcgttgccttccacttcagttacacctcactcaccatcctctcctgttggttctgtgctgcttcaagatactaagcccacatttgagatgcagcagccatctcccccaattcctcctgtccatcctgatgtgcagttaaaaaatctgcccttttatgatgtccttgatgttctcatcaagcccacgagtttagttcaaagcagtattcagcgatttcaagagaagttttttatttttgctttgacacctcaacaagttagagagatatgcatatccagggattttttgccaggtggtaggagagattatacagtccaagttcagttgagactttgcctggcagagacaagttgccctcaagaagataactatccaaatagtctatgtataaaagtaaatgggaagctatttcctttgcctggctatgcaccaccgcctaaaaatgggattgaacagaagcgccctggacgccccttgaatattacatctttagttaggttatcttcagctgtgccaaaccaaatttccatttcttgggcatcagaaattgggaagaattactctatgtctgtatatcttgtacggcagcttacatcagccatgttattacagagattaaaaatgaaaggtattagaaaccctgatcattccagagcactaattaaagaaaaacttactgcagatcctgatagtgaaattgctacaactagccttcgggtatccttgatgtgccctttaggaaaaatgaggctgacaatcccatgccgtgcagtgacttgtacacatctgcagtgttttgatgctgccctctatctacaaatgaatgagaaaaagcccacctggatttgtcctgtgtgtgacaaaaaagctgcctatgaaagtctaatattagatgggctttttatggaaattctcaatgactgttctgatgtagatgagatcaaattccaagaagatggttcttggtgtccaatgagaccgaagaaagaagctatgaaagtatccagccaaccgtgtacaaaaatagaaagttcaagcgtcctcagtaagccttgttcagtgactgtagccagtgaggcaagcaagaagaaagtagatgttattgatcttacaatagaaagctcttctgacgaagaggaagaccctcctgccaaaaggaaatgcatctttatgtcagaaacacaaagcagcccaaccaaaggggttctcatgtatcagccatcttctgtaagggtgcccagtgtgacttcggttgatcctgctgctattccgccttcattaacagactactcagtaccattccaccatacgccaatatcaagcatgtcatcagatttgccaggtttggattttctttcccttattccagttgatccccagtactgtcctcctatgtttttggatagtctcacctcacccttaacagcaagcagtacgtctgtcaccaccaccagctcccatgaaagcagtactcatgttagttcatccagcagcaggagtgagacaggggtcataaccagcagtggaagtaacattcctgacatcatctcattggac

SEQ ID NO: 4385 - DNA, 1716 bp, Homo sapiens
  source 1..1716: mol_type = genomic DNA
atggcggatttcgaagagttgaggaatatggtttctagttttagggtttctgaactacaagtattactaggctttgctggacggaataaaagtggacgcaagcatgacctcctgatgagggcgctgcatttattgaagagcggctgcagccctgcggttcagattaaaatccgagaattgtatagacgccgatatccacgaactcttgaaggactttctgatttatccacaatcaaatcatcggttttcagtttggatggtggctcatcacctgtagaacctgacttggccgtggctggaatccactcgttgccttccacttcagttacacctcactcaccatcctctcctgttggttctgtgctgcttcaagatactaagcccacatttgagatgcagcagccatctcccccaattcctcctgtccatcctgatgtgcagttaaaaaatctgcccttttatgatgtccttgatgttctcatcaagcccacgagtttagttcaaagcagtattcagcgatttcaagagaagttttttatttttgctttgacacctcaacaagttagagagatatgcatatccagggattttttgccaggtggtaggagagattatacagtccaagttcagttgagactttgcctggcagagacaagttgccctcaagaagataactatccaaatagtctatgtataaaagtaaatgggaagctatttcctttgcctggctatgcaccaccgcctaaaaatgggattgaacagaagcgccctggacgccccttgaatattacatctttagttaggttatcttcagctgtgccaaaccaaatttccatttcttgggcatcagaaattgggaagaattactctatgtctgtatatcttgtacggcagcttacatcagccatgttattacagagattaaaaatgaaaggtattagaaaccctgatcattccagagcactaattaaagaaaaacttactgcagatcctgatagtgaaattgctacaactagccttcgggtatccttgatgtgccctttaggaaaaatgaggctgacaatcccatgccgtgcagtgacttgtacacatctgcagtgttttgatgctgccctctatctacaaatgaatgagaaaaagcccacctggatttgtcctgtgtgtgacaaaaaagctgcctatgaaagtctaatattagatgggctttttatggaaattctcaatgactgttctgatgtagatgagatcaaattccaagaagatggttcttggtgtccaatgagaccgaagaaagaagctatgaaagtatccagccaaccgtgtacaaaaatagaaagttcaagcgtcctcagtaagccttgttcagtgactgtagccagtgaggcaagcaagaagaaagtagatgttattgatcttacaatagaaagctcttctgacgaagaggaagaccctcctgccaaaaggaaatgcatctttatgtcagaaacacaaagcagcccaaccaaaggggttctcatgtatcagccatcttctgtaagggtgcccagtgtgacttcggttgatcctgctgctattccgccttcattaacagactactcagtaccattccaccatacgccaatatcaagcatgtcatcagatttgccaggagaacaaagaagaaatgatattaataatgaactgaagcttggaacatcttctgatactgtgcaacag

SEQ ID NO: 4386 - DNA, 1884 bp, Homo sapiens
  source 1..1884: mol_type = genomic DNA
atggcggagctgggcgaattaaagcacatggtgatgagtttccgggtgtctgagctccaggtgcttcttggctttgctggccggaacaagagtggacggaagcacgagctcctggccaaggctctgcacctcctgaagtccagctgtgcccctagtgtccagatgaagatcaaagagctttaccgacgacgctttccccggaagaccctggggccctctgatctctcccttctctctttgccccctggcacctctcctgtaggctcccctggtcctctagctcccattcccccaacgctgttggcccctggcaccctgctgggccccaagcgtgaggtggacatgcacccccctctgccccagcctgtgcaccctgatgtcaccatgaaaccattgcccttctatgaagtctatggggagctcatccggcccaccacccttgcatccacttctagccagcggtttgaggaagcgcactttacctttgccctcacaccccagcaagtgcagcagattcttacatccagagaggttctgccaggagccaaatgtgattataccatacaggtgcagctaaggttctgtctctgtgagaccagctgcccccaggaagattattttccccccaacctctttgtcaaggtcaatgggaaactgtgccccctgccgggttaccttcccccaaccaagaatggggccgagcccaagaggcccagccgccccatcaacatcacacccctggctcgactctcagccactgttcccaacaccattgtggtcaattggtcatctgagttcggacggaattactccttgtctgtgtacctggtgaggcagttgactgcaggaacccttctacaaaaactcagagcaaagggtatccggaacccagaccactcgcgggcactgatcaaggagaaattgactgctgaccctgacagtgaggtggccactacaagtctccgggtgtcactcatgtgcccgctagggaagatgcgcctgactgtcccttgtcgtgccctcacctgcgcccacctgcagagcttcgatgctgccctttatctacagatgaatgagaagaagcctacatggacatgtcctgtgtgtgacaagaaggctccctatgaatctcttatcattgatggtttatttatggagattcttagttcctgttcagattgtgatgagatccaattcatggaagatggatcctggtgcccaatgaaacccaagaaggaggcatctgaggtttgccccccgccagggtatgggctggatggcctccagtacagcccagtccaggggggagatccatcagagaataagaagaaggtcgaagttattgacttgacaatagaaagctcatcagatgaggaggatctgccccctaccaagaagcactgttctgtcacctcagctgccatcccggccctacctggaagcaaaggagtcctgacatctggccaccagccatcctcggtgctaaggagccctgctatgggcacgttgggtggggatttcctgtccagtctcccactacatgagtacccacctgccttcccactgggagccgacatccaaggtttagatttattttcatttcttcagacagagagtcagcactatggcccctctgtcatcacctcactagatgaacaggatgcccttggccacttcttccagtaccgagggaccccttctcactttctgggcccactggcccccacgctggggagctcccactgcagcgccactccggcgccccctcctggccgtgtcagcagcattgtggcccctgggggggccttgagggaggggcatggaggacccctgccctcaggtccctctttgactggctgtcggtcagacatcatttccctggac

SEQ ID NO: 4387 - DNA, 1959 bp, Homo sapiens
  source 1..1959: mol_type = genomic DNA
atgtttacactccaagattcgtatgttaagcaaatggttatgagccttagagtttctgaactccaagtactgttgggctacgccgggagaaacaagcacggacgcaaacacgaacttctcacaaaagccctgcatttgctaaaggctggctgtagtcctgctgtgcaaatgaaaattaaggaactctataggcggcggttcccacagaaaatcatgacgcctgcagacttgtccatccccaacgtacattcaagtcctatgccagcaactttgtctccatctaccattccacaactcacttacgatggtcaccctgcatcatcgccattactccctgtttctcttctgggacctaaacatgaactggaactcccacatcttacatcagctcttcacccagtccatccggatataaaacttcaaaaattaccattttatgatttactggatgaactgataaaacccaccagtctagcatcagacaacagtcagcgctttcgagaaacctgttttgcatttgccttgacaccacaacaagtgcagcaaatcagtagttccatggatatttctgggaccaaatgtgacttcacagtacaggtccagttaaggttttgtttatcagaaaccagttgtccacaagaagatcacttcccacccaatctttgtgtgaaagtgaatacaaaaccttgcagccttccaggttaccttccacctacaaaaaatggcgtggaaccaaagcgacccagccgaccaattaatatcacctcacttgtccgactgtccacaacagtaccaaacacgattgttgtttcttggactgcagaaattggaagaaactattccatggcagtatatcttgtaaaacagttgtcctcaacagttcttcttcagaggttacgagcaaagggaataaggaatccggatcattctagagctttaattaaagagaagttgactgcggatccagacagtgaaatagctacaaccagcctaagggtttctctactatgtccacttggtaaaatgcggctgacaattccgtgtcgggcccttacatgttctcatctacaatgttttgacgcaactctttacattcagatgaatgagaaaaaaccaacctgggtttgtcctgtctgtgataagaaggctccatatgaacaccttattattgatggcttgtttatggaaatcctaaagtactgtacagactgtgatgaaatacaatttaaggaggatggcacttgggcaccgatgagatcaaaaaaggaagtacaggaagtttctgcctcttacaatggagtcgatggatgcttgagctccacattggagcatcaggtagcgtctcaccaccagtcctcaaataaaaacaagaaagtagaagtgattgacctaaccatagacagttcatctgatgaagaggaagaagagccatctgccaagaggacctgtccttccctatctcccacatcaccactaaataataaaggcattttaagtcttccacatcaagcatctccagtatcccgcaccccaagccttcctgctgtagacacaagctacattaatacctccctcatccaagactataggcatcctttccacatgacacccatgccttacgacttacaaggattagatttctttcctttcttatcaggagacaatcagcattacaacacctccttgcttgccgctgcagcagcagcagtttcagatgatcaagacctcctacactcgtctcggtttttcccgtatacctcctcacagatgtttcttgatcagttaagtgcaggaggcagtacttctctgccaaccaccaatggaagcagtagtggcagtaacagcagcctggtttcttccaacagcctaagggaaagccatagccacaccgtcacaaacaggagcagcacggacacggcatccatctttggcatcataccagacattatttcattggac

SEQ ID NO: 4388 - DNA, 1530 bp, Homo sapiens
  source 1..1530: mol_type = genomic DNA
atggcggcggagctggtggaggccaaaaacatggtgatgagttttcgagtctccgaccttcagatgctcctgggtttcgtgggccggagtaagagtggactgaagcacgagctcgtcaccagggccctccagctggtgcagtttgactgtagccctgagctgttcaagaagatcaaggagctgtacgagacccgctacgccaagaagaactcggagcctgccccacagccgcaccggcccctggaccccctgaccatgcactccacctacgaccgggccggcgctgtgcccaggactccgctggcaggccccaatattgactaccccgtgctctacggaaagtacttaaacggactgggacggttgcccgccaagaccctcaagccagaagtccgcctggtgaagctgccgttctttaatatgctggatgagctgctgaagcccaccgaattagtcccacagaacaacgagaagcttcaggagagcccgtgcatcttcgcattgacgccaagacaggtggagttgatccggaactccagggaactgcagcccggagttaaagccgtgcaggtcgtcctgagaatctgttactcagacaccagctgccctcaggaggaccagtacccgcccaacatcgctgtgaaggtcaaccacagctactgctccgtcccgggctactacccctccaataagcccggggtggagcccaagaggccgtgccgccccatcaacctcacccacctcatgtacctgtcctcggccaccaaccgcatcactgtcacctgggggaactacggcaagagctactcggtggccctgtacctggtgcggcagctgacctcatcggagctgctgcagaggctgaagaccattggggtaaagcacccggagctgtgcaaggcactggtcaaggagaagctgcgccttgatcctgacagcgagatcgccaccaccggtgtgcgggtgtccctcatctgtccgctggtgaagatgcggctctccgtgccctgccgggcagagacctgtgcccacctgcagtgcttcgacgccgtcttctacctgcagatgaacgagaagaagcccacctggatgtgccccgtgtgcgacaagccagccccctacgaccagctcatcatcgacgggctcctctcgaagatcctgagcgagtgtgaggacgccgacgagatcgagtacctggtggacggctcgtggtgcccgatccgcgccgaaaaggagcgcagctgcagcccgcagggcgccatcctcgtgctgggcccctcggacgccaatgggctcctgcccgcccccagcgtcaacgggagcggtgccctgggcagcacgggtggcggcggcccggtgggcagcatggagaatgggaagccgggcgccgatgtggtggacctcacgctggacagctcatcgtcctcggaggatgaggaggaggaggaagaggaggaggaagacgaggacgaagaggggccccggcccaagcgccgctgccccttccagaagggcctggtgccggcctgc

SEQ ID NO: 4389 - DNA, 1869 bp, Homo sapiens
  source 1..1869: mol_type = genomic DNA
atggaggctgaagagacgatggaatgccttcaggagttccctgaacatcataaaatgatcctcgaccgattgaatgaacagcgagagcaggaccggtttactgacatcaccctaattgtcgacggacaccattttaaggctcacaaggctgttttggctgcttgtagtaagttcttctacaaattctttcaggagtttacccaagaaccattggtggagatagaaggtgttagtaaaatggcctttcgccatttaattgagttcacatatacagcaaaattaatgatacaaggagaagaagaagccaatgatgtatggaaagcagcagagtttctacaaatgctagaagctatcaaagcccttgaagtcaggaacaaagaaaactcagctcccttagaggaaaataccacaggaaaaaatgaggccaaaaaaaggaagattgcagaaacttcaaatgttatcactgagtcattgccatctgcagaatcagaacctgttgaaattgaggtagagattgccgaaggcaccattgaagtggaagatgaaggcatcgaaacattagaggaagtggcttctgccaagcagtccgtaaagtacatacagagcacaggttcctctgatgattctgctctagcactgttggcagatattaccagcaagtaccgtcaaggtgacagaaaagggcagattaaagaagatggctgtccatctgaccccacgagcaaacaggtagaaggtattgaaattgtggaacttcagctgtcacatgtgaaggacttgttccattgtgagaaatgtaaccgttcatttaaattgttttaccattttaaggagcacatgaaatcacactccactgagagtttcaagtgtgaaatatgcaataaacgatatcttcgagagagcgcatggaaacagcacctaaattgttaccaccttgaagaaggtggagtcagtaagaagcaaagaactgggaaaaaaattcatgtatgtcagtactgtgagaaacagtttgaccattttggacattttaaagaacatcttcgaaaacatacaggtgaaaaaccttttgaatgtccaaattgtcatgaacgatttgctagaaatagcactctgaaatgtcacctcactgcatgccaaactggagtaggggcaaaaaaaggaaggaagaagctctacgaatgccaggtctgcaacagtgtgtttaacagctgggaccagttcaaagatcacttggtaatacacactggagataaacccaaccattgtactttatgtgatttgtggtttatgcaaggaaatgaattaaggaggcatctcagtgatgctcacaatatttcagagcgtctagtaacggaagaagttctttcagtagaaacacgtgtgcaaactgaacctgtaacatcaatgactattatagaacaagttgggaaggtgcatgtgctaccattgcttcaggttcaggtggattcagcacaagtgactgtggaacaagtccatccagatctgctccaggacagccaggtgcacgattcacacatgagtgagcttccagagcaggtccaagtgagttatctagaagtgggccgaattcagactgaagaaggtactgaagtacatgtagaggagctgcatgttgaacgggtcaatcaaatgccagtggaagtacaaactgaacttctagaagcagatttggaccacgtgaccccagaaatcatgaaccaagaggagagagagtctagccaagcagatgctgctgaggctgccagggaagatcacgaagatgctgaggatttagagaccaagccaacagtggattctgaagcagaaaaggcagagaatgaggacagaacagctctgccagttttagaa

SEQ ID NO: 4390 - DNA, 1767 bp, Homo sapiens
  source 1..1767: mol_type = genomic DNA
atggaggctgaagagacgatggaatgccttcaggagttccctgaacatcataaaatgatcctcgaccgattgaatgaacagcgagagcaggaccggtttactgacatcaccctaattgtcgacggacaccattttaaggctcacaaggctgttttggctgcttgtagtaagttcttctacaaattctttcaggagtttacccaagaaccattggtggagatagaaggtgttagtaaaatggcctttcgccatttaattgagttcacatatacagcaaaattaatgatacaaggagaagaagaagccaatgatgtatggaaagcagcagagtttctacaaatgctagaagctatcaaagcccttgaagtcaggaacaaagaaaactcagctcccttagaggaaaataccacaggaaaaaatgaggccaaaaaaaggaagattgcagaaacttcaaatgttatcactgagtcattgccatctgcagaatcagaacctgttgaaattgaggtagagattgccgaaggcaccattgaagtggaagatgaaggcatcgaaacattagaggaagtggcttctgccaagcagtccgtaaagtacatacagagcacaggttcctctgatgattctgctctagcactgttggcagatattaccagcaagtaccgtcaaggtgacagaaaagggcagattaaagaagatggctgtccatctgaccccacgagcaaacaggagcacatgaaatcacactccactgagagtttcaagtgtgaaatatgcaataaacgatatcttcgagagagcgcatggaaacagcacctaaattgttaccaccttgaagaaggtggagtcagtaagaagcaaagaactgggaaaaaaattcatgtatgtcagtactgtgagaaacagtttgaccattttggacattttaaagaacatcttcgaaaacatacaggtgaaaaaccttttgaatgtccaaattgtcatgaacgatttgctagaaatagcactctgaaatgtcacctcactgcatgccaaactggagtaggggcaaaaaaaggaaggaagaagctctacgaatgccaggtctgcaacagtgtgtttaacagctgggaccagttcaaagatcacttggtaatacacactggagataaacccaaccattgtactttatgtgatttgtggtttatgcaaggaaatgaattaaggaggcatctcagtgatgctcacaatatttcagagcgtctagtaacggaagaagttctttcagtagaaacacgtgtgcaaactgaacctgtaacatcaatgactattatagaacaagttgggaaggtgcatgtgctaccattgcttcaggttcaggtggattcagcacaagtgactgtggaacaagtccatccagatctgctccaggacagccaggtgcacgattcacacatgagtgagcttccagagcaggtccaagtgagttatctagaagtgggccgaattcagactgaagaaggtactgaagtacatgtagaggagctgcatgttgaacgggtcaatcaaatgccagtggaagtacaaactgaacttctagaagcagatttggaccacgtgaccccagaaatcatgaaccaagaggagagagagtctagccaagcagatgctgctgaggctgccagggaagatcacgaagatgctgaggatttagagaccaagccaacagtggattctgaagcagaaaaggcagagaatgaggacagaacagctctgccagttttagaa

SEQ ID NO: 4391 - DNA, 8154 bp, Homo sapiens
  source 1..8154: mol_type = genomic DNA
atgcctcgaactaaacaaattcatcccagaaatctaagagacaaaattgaagaagcacaaaaagaacttaatggggcagaagtttcaaaaaaagaaatcttacaggctggtgttaaaggaacttcggaatcccttaaaggtgtgaaacgcaaaaagatcgtagctgagaatcacctgaaaaaaataccaaaatccccactgagaaatcctcttcaggcaaaacataaacaaaatacagaagagtcatctttcgccgttcttcatagtgcttcggagtctcacaagaaacagaattatattcctgtaaaaaatgggaagcagtttaccaaacaaaatggagaaacacctggaataattgctgaagcctcaaaatctgaagaatctgtctccccaaagaagcccttgtttctgcagcaaccatctgaactgcgtagatggagatccgaaggcgctgatcctgccaaattcagtgacctcgatgaacaatgtgactcaagttccttgtcaagtaaaaccaggactgacaatagcgaatgcatctcttctcattgtggcactacgtccccctcctatacaaacactgcattcgatgtcttactgaaagcaatggagccagaactgagcaccttgtcacaaaagggctcaccttgtgcaattaagacagaaaaactgaggccaaataaaactgcacgttcccctcccaaattaaaaaacagttcaatggatgccccaaatcagacttcacaggaattggttgctgaatcacagtcttcttgtacctcatacacagtccatatgtctgctgctcagaagaatgagcaaggggcaatgcagtcagcttctcatttgtatcatcaacatgaacactttgttcccaaatccaaccaacataatcaacagcttccggggtgttcaggtttcacaggatcactgacaaatctgcaaaatcaagagaatgccaaacttgaacaggtttataatatagcagtgacatcatctgtaggcctaacttcaccttccagtagatctcaggttactcctcaaaaccagcaaatggattctgcttcacctttgtcaataagtccggctaattctacacagtcgccccccatgccaatctataattcaactcatgttgcctctgttgttaatcaaagcgtagagcaaatgtgcaatcttcttctgaaagatcagaagccaaaaaaacaaggaaaatatatttgtgagtattgcaatagagcatgtgcaaagcctagtgtgcttttaaagcatatccgctcccacactggagagcgaccctatccctgtgtgacttgtggattttcatttaagactaaaagtaatctgtataagcacaagaaatcccacgcacatactatcaaactgggtcttgtcttgcaaccagatgctggtggcttgttcttgtcccacgagtcccccaaagcacttagtattcattcagacgtagaagacagtggggagagcgaggaggaaggcgccactgatgagagacagcatgacctgggcgccatggagctgcagcctgtgcacataataaagaggatgtcaaatgctgaaactttactaaaatcaagcttcactccaagcagtccagaaaatgtgataggtgactttttgctacaggacagatctgcagaatcacaagctgtgacagagttaccgaaagttgtggtccaccatgtcactgtgtcccccttaagaactgacagtccaaaggccatggatcccaagcctgaactttctagtgcacaaaagcagaaggaccttcaggtgacaaacgtacagccactttcagccaacatgtcccagggtggagtctccaggttggagactaatgagaattcccaccagaaaggcgacatgaatccactggaaggaaagcaagactctcacgtaggaacggtacacgcccagctacaaaggcagcaggctaccgattactcccaagagcagcaaggaaagctcctgagtcctcgaagtttaggaagtacggattctggttacttttcacgttctgaaagtgccgatcaaacagtgagtccaccaactccctttgccagaaggttacccagcacagaacaagactctggaaggagtaacggaccctctgcagctcttgtcaccacgtcaacaccctctgctttgcccacaggggaaaaggcattgcttttaccaggtcagatgcgcccacctttggccacaaaaacacttgaggagcggatatcgaagcttatctcagacaatgaagctttggtagatgacaagcaactggatagtgtgaagccgcggagaacctcactgtcaagacgaggaagcattgattcccccaaatcatacatatttaaagattctttccagtttgatttaaaaccagtgggacggagaacaagttcaagctctgatataccgaagtcacctttcacccctactgaaaaatcaaagcaagtgtttcttctgtctgtaccttcacttgactgtttacctatcacaagaagtaattccatgccgaccacaggttattcagcagtacctgcaaatataatacctcctcctcatccactaagaggaagtcagtcatttgatgacaaaattggcgctttctatgatgatgtctttgtatcgggacctaacgctcctgtgccccagagtgggcatccccgtacacttgtgagacaagcagccatagaagactcttcagcaaatgaaagtcatgttcttggtactggacagtccctggatgagagccaccaaggatgccatgctgctggtgaagccatgtcagtgaggagcaaggcactggcacaaggcccacatatagaaaaaaagaagtctcatcaagggcgagggacaatgtttgagtgtgaaacttgtagaaacaggtataggaaactggaaaattttgaaaatcataagaaattttactgttctgagttacatggaccaaaaacaaaggtagccatgagagaacctgagcacagccctgtgcccggcggtctgcagcctcagattctacactacagagtcgctgggtcctccggcatctgggaacagacgccccagataagaaaaaggaggaaaatgaaaagtgttggggatgatgaagaacttcagcaaaatgaaagtggaacatctccaaaaagttctgaaggccttcagtttcagaatgctctgggctgtaatcccagtttgcctaaacataatgttaccataagaagtgaccagcagcataaaaatatacagttgcaaaactcccatattcaccttgttgccaggggccctgagcagaccatggatcccaagctgtcgaccatcatggaacaacagataagttcagcagcccaggacaagatagaactgcagagacacggaactggaatctctgtcatccagcacaccaactccctgagcaggcccaactcatttgacaagcctgagccttttgaaagagcctccccagtttctttccaggagctgaatagaacggggaagtccgggtctctaaaagtgataggaatctcccaagaggaaagtcacccttctcgggacgggtctcatcctcaccagcttgcactatcagacgctctcagaggagaacttcaggaaagctccagaaagagtccaagtgaacgacatgtgttaggacagccctcaagacttgtccggcagcacaacatccaagttccagagattttggtcacagaagaaccagatcgagacctggaagctcaatgccatgatcaagaaaagtcagagaagttcagttggccccagcgtagtgaaaccttgtcaaaattgccaacagagaaactgccacccaaaaagaaaaggctccgtctggctgagatagaacattcctcaacagaatcgagctttgattccactctctccaggagtctaagtagggagagcagtttatctcacacttcaagtttctcagcctctttagacatagaggacgtttctaaaacggaggcttcccccaaaatcgattttctaaataaagccgagtttcttatgattccagctggcttgaatactctgaatgttcctggatgtcaccgggaaatgaggcgtactgcatcagaacagattaattgcacgcaaacgtcaatggaggtctctgatctcagaagcaaatcattcgattgtggaagcatcaccccaccccagacaacaccacttactgaattgcagcctccatcttcaccttctcgagtgggagtgactgggcatgtgcctctcttagaaagaaggagaggcccactggtacggcaaatatctttaaacatagccccagatagtcatctgtctcctgtacacccaacatctttccaaaatactgctcttcccagtgtgaatgcagtgccatatcaggggcctcagctcactagtacatctttagctgagttttctgcaaatactttgcactctcagactcaggttaaggatctgcaggcagaaacatcaaactccagctctaccaacgtttttcctgttcaacagctctgtgatatcaatttgttaaatcaaatccatgcaccgcctagccaccagagcacacagctatctctgcaagtgtctacgcagggtagcaagccagataaaaattctgttttatctgggtcttctaaaagtgaggattgctttgctcccaaataccaattgcattgtcaggttttcacttcaggcccatcttgctcttctaatcctgtgcattctttgccaaatcaagttatttcagatccagttggaacagatcattgtgtgacatcagcaacattaccaaccaaattaattgacagcatgtctaattcgcatcctctgctaccaccagagctcaggccccttggaagtcaggtgcagaaggtgccatcatcattcatgctgcccatacgcctgcagagtagtgttcctgcttactgttttgctacactcacatccctgccacaaatactagtgacccaagatctgcccaatcagccaatttgccagactaatcatagtgtagtgccaatcagtgaagaacaaaattctgtgccaacattacaaaaaggtcatcagaatgctttgccaaacccagagaaggaatttctatgtgaaaatgttttttcagagatgagccaaaattcttctctatcagaatccttgcccataactcagaaaatatctgttggtcgactttcccctcaacaagaatcttcagcttcgagtaaaaggatgctttccccagcaaatagtttagacattgccatggaaaagcaccagaagcgggccaaagatgaaaatggagctgtttgtgcaacagacgtgagacctttagaggctttgagttcgagagttaatgaagctagtaaacagaagaagcctattttagtgagacaggtttgtactacagagcccctggacggtgtgatgttggaaaaggatgttttttctcaacctgaaattagtaatgaggctgttaatttgacaaatgttttaccagctgataattcatcaacaggatgctctaaatttgtcgttatagaacctataagtgaattgcaggaatttgaaaacatcaagtcatccacatcattaactcttacagttcgaagttcacctgctccttcagaaaatactcatatttctcctttgaaatgtacagacaataaccaagaaaggaagtctccaggggttaaaaatcaaggtgacaaagtgaacatccaagagcaaagtcaacagccagtcacttctctttcattgtttaacatcaaggacacccagcagctggctttccctagcctgaaaactacaaccaactttacatggtgttatctcttaaggcagaagtcgttgcatttgcctcagaaggaccagaaaacttcagcctatactgattggacagtaagcgccagtaatccaaatccactcggtttgcccacaaaagttgcacttgctctccttaattcaaaacagaacactggaaaatcactatactgtcaagcaataactacccattccaagtcagacttattggtctattcaagcaagtggaaaagcagcttaagcaagagagcattaggtaatcaaaagtccacagtagttgaattcagcaataaagatgcctctgaaattaacagtgagcaagataaagaaaattccttaatcaaaagtgaaccaagaagaattaaaatatttgatggaggatataagtcaaatgaagagtatgtatatgtccgaggcaggggaagaggaaaatacatttgtgaagaatgtggaatacgttgtaagaaacctagcatgttaaagaaacacatacgaacccatacagatgtccgcccctaccactgcacttactgtaacttctcctttaagactaaaggaaatctgacaaaacacatgaagtccaaggcacatagcaagaaatgtgtggatttaggcgtctcagtaggtttaatagatgaacaggatacagaagaatcagatgaaaaacagagattcagttatgagcgatctggatatgatcttgaagaatctgatggcccagatgaggatgacaatgaaaatgaagacgatgatgaggacagccaggctgaatcagtcctgtcagccacaccctcagtcacagctagcccgcagcaccttccatctagaagtagccttcaggaccctgtgagtactgacgaggatgtcaggatcaccgattgcttttctggggtacacacggacccaatggacgttctgcccagggcgctgctcaccagaatgactgtcctgagcacagcacagtctgactacaataggaagacactctctccggggaaggccaggcagcgtgctgcgagagatgaaaacgacacaattccgtctgtagacacttccaggtccccgtgtcatcagatgtctgtggactaccctgagtcagaagaaattctgagaagttctatggcaggaaaagctgttgctataacacagagcccatcatctgtaagacttcctcctgctgcagctgagcacagcccccagacagcagcggggatgccttctgtggcctcaccacatcctgaccctcaagaacagaagcagcaaataactctacagccgactccaggcttgccttctccccacactcatttgtttagccaccttcctttgcattcccagcagcaatcgaggacaccttataatatggttccagttggggggatccatgtggtacctgctggcctcacatactccacgtttgtgccccttcaggctggaccagtgcagctcacgatccctgctgtcagtgtcgttcacagaactttgggtactcataggaatacggtcacagaagtgtctggcactacaaaccctgctggagtggctgaattaagcagtgttgtgccatgtattcctatcggccaaatccgcgtgccaggccttcagaacctaagtaccccaggcttgcagtcactcccctcgttaagcatggaaaccgtcaatattgtaggcctagccaatacaaatatggccccacaagtccatccaccaggactggctctgaatgctgtcggactgcaggttctgactgcaaacccttcatcacaaagcagccccgcccctcaggcacacattccaggtctccagatcttgaacatagcattgcccaccttaatcccctcagtcagtcaagtagccgttgatgcacagggagctccagaaatgccagcttcccaaagcaaagcatgcgagacacaacccaagcagacttctgtagccagcgcaaaccaggtcagcaggaccgagtctcctcaggggttacctacagtccagcgggaaaatgcaaaaaaagttctgaatccacctgcccctgcaggtgaccatgcaaggcttgatggcctgagtaaaatggacacagagaaggctgcctcggcaaatcacgtgaagcccaagcctgaactcacttccatacagggccaaccagcgtccacgtcacaacctctgctgaaggcacattctgaagtttttacaaagccctcaggccagcagactctctctccagacagacaggttcccaggcccacagcactaccgcggaggcagcccactgtgcacttcagcgacgtgagcagcgatgatgacgaggacaggcttgtgatagcaacc

SEQ ID NO: 4392 - DNA, 7215 bp, Homo sapiens
  source 1..7215: mol_type = genomic DNA
atggatcctgaacaaagtgtcaagggcaccaagaaggctgagggaagtccccggaagcggctgaccaaaggagaggccattcagaccagtgtttcttccagcgtcccatacccaggcagcggcacagctgccacccaagagagccccgcccaagagctcttagccccgcagcccttcccgggcccctcatcagttcttagggaaggctctcaggagaaaacgggccagcagcagaagccccccaaaaggccccccatcgaagcatccgtccacatctcacagcttccgcagcaccctctgacaccagcattcatgtcgcctggcaaacctgagcatctcctggaggggtccacatggcaactggttgaccccatgagacctggaccctctggctccttcgtggcccctgggctccatcctcagagccagctccttccttcccacgcttccatcattccccccgaggaccttcctggagtccccaaagtcttcgtgcctcgtccttcccaggtctccttgaagcccacagaagaggcacacaagaaggagaggaagccccagaagccaggcaagtacatctgccagtactgcagccggccctgtgccaagcccagcgtgctccagaagcacattcgctcacacacaggtgagaggccctacccctgcggcccctgtggcttctccttcaagaccaagagtaatctctacaagcacaggaagtcccatgcccaccgcatcaaagcaggcctggcctcaggcatgggtggcgagatgtacccacatgggctggagatggagcggatccctggggaagagtttgaggagcccactgagggagaaagcacagattctgaagaggagactagtgccacctctggtcaccctgcagagctctccccaagacccaagcagccccttctctccagcgggctatacagctctgggagccacagttccagccacgaacgctgttccctgtcccagtccagcacagcccagtcactcgaagacccccctccatttgtggaaccctcatctgagcaccccctgagccataaacctgaagacacccacacgattaagcagaagctggccctccgcttaagcgagaggaagaaggtgatcgatgagcaggcgtttctgagcccaggcagcaaagggagtactgagtctgggtatttctctcgctccgagagtgcagagcagcaggtcagccccccaaacaccaacgccaagtcctacgctgagatcatctttggcaagtgtgggcgaataggacagcggaccgccatgctgacagccacctccacccagcccctcctgcccctgtccaccgaagacaagcccagcctggtgcctttgtctgtaccccggacgcaggtgatcgagcacatcacgaagctcatcaccatcaacgaggccgtggtggacaccagcgagatcgacagcgtgaagccaaggcggagctcactgtccaggcgcagcagcatggagtccccaaaatccagcctctaccgggagcccctgtcatcccacagtgagaaaaccaagcctgaacaatcactgctgagcctccagcacccgcccagtaccgccccccctgtgcctctcctgagaagccactcaatgccttctgccgcctgcactatcagcaccccccaccaccccttccgaggtagctactccttcgatgaccatatcaccgactccgaagccctgagccacagcagtcacgtgtttacctcccacccccggatgctgaagcgccagccggcaatcgaattacctttgggaggggaatacagttctgaggagcctggcccaagcagcaaagacacagcctccaagccctcggacgaagtggaacccaaggaaagcgagcttaccaaaaagaccaagaagggtttgaaaacaaaaggggtgatctacgaatgtaacatatgtggtgctcggtacaagaaaagggataactacgaagcccacaaaaaatactactgctcagagcttcagatcgcaaagcccatctctgcaggcacccacacatctccagaagctgaaaagagtcagattgagcatgagccgtggtcccaaatgatgcattacaaactgggaaccaccctggaactcactccactgaggaagaggaggaaagagaagagccttggggacgaggaagagccacctgcctttgagtccacaaaaagtcagtttggcagccccgggccatctgatgctgctcggaaccttcccctggagtccaccaagtcaccagcagaaccaagtaaatcagtgccctccttggagggacccacgggcttccagccaaggactcccaagccagggtccggttcagaatcagggaaggagaggagaacaacgtccaaagaaatttctgtcatccagcacaccagctcctttgagaaatctgattctctcgagcagccgagtggcttggaaggggaagacaaacctctggcccagttcccatcacccccacctgccccacacggacgctctgctcactccctgcagcctaagttggtccgccagcccaacattcaggttcctgagatcctagtaactgaggagcctgaccggccggacacagagccagagccgccccctaaggaacctgagaagactgaggagttccaatggccccagcgcagccagacacttgcccagctcccagctgagaagctgccacccaaaaagaagaggttgcgcctggcagagatggcccaatcatcaggggagtccagcttcgagtcctctgtgcctctgtctcgcagcccgagccaggaaagcaatgtctctttgagtgggtccagccgctcagcctcgtttgagagggatgaccatgggaaagccgaggcccccagtccctcatctgacatgcgccccaaacccctgggcacccacatgttgactgtccccagccaccacccacatgcccgagagatgcggaggtcagcctcagagcagagccccaacgtttcccattctgcccacatgaccgagacacgcagcaaatcctttgactatggcagcttgtccttgacaggcccttctgctccagccccagtggctccaccagcgcgggtggccccgccagagagaagaaaatgcttcttggtgagacaggcctctctgagcaggcctccagaatctgagttggaggttgcccccaagggaagacaggagagcgaagaaccacagccctcatccagtaaaccctctgccaaaagctcattgtcccagatttcctctgcggccacctcacatggtggacccccgggaggcaagggcccagggcaggacaggcccccattggggcccactgtgccctacacagaagcactgcaagtgttccaccaccccgttgcccagacacccctgcatgagaagccatacctgcccccaccagtctcccttttctccttccagcatctcgtgcagcatgagccaggacagtctccagaattcttctccacccaggccatgtccagcctcctgtcctcaccatactccatgcccccacttcctccctccttatttcaagccccaccgcttcctctccagcctactgttctgcacccaggccaactccatctcccccagctcatgcctcacccagccaacatccccttcaggcagcccccttccttcctccccatgccatacccgacctcctcagcactgtcttctgggtttttcctgcctctgcaatcccagtttgcacttcagctccctggtgatgtggaaagccatctgccccagatcaaaaccagcctggccccactggcaacaggaagtgctggcctctcccccagcacagagtacagcagtgacatccggctaccccctgtggctcccccagccagctcctcagcacctacatcagctcctccactggccctgcctgcctgtccagacaccatggtgtccctggttgtgcctgtccgtgttcagaccaatatgccgtcctatgggagcgcaatgtacaccaccctttcccagatcttggtcacccagtcccaaggcagctcagcaactgtggcacttcccaagtttgaggaacccccatcaaaggggacgactgtatgtggtgcagatgtgcatgaggttgggcccggcccttctgggttaagtgaagagcaaagcagagctttcccaactccatacctgagagtgcctgtgacattacctgaaagaaaaggcacttccctgtcatcagagagtatcttgagcctggaggggagttcatcaacagcagggggaagcaaacgtgtcctttcaccagctggcagccttgaacttaccatggaaacccagcagcaaaaaagagtgaaggaggaggaggcttccaaggcagatgaaaaacttgagctggtaaaaccatgcagtgtggtccttaccagcaccgaggatgggaagaggccagagaaatcccacttaggcaaccagggccaaggcaggagggagctagaaatgctgtccagcctgtcctcagatccatctgacacaaaggaaattcctcccctccctcaccctgcattgtcccatgggacagccccaggctcagaagctttgaaggaatatccccagccatctggcaaacctcaccgaagagggttgaccccactgagcgtgaagaaagaagattccaaggaacaacctgatctcccctccttggcacctccgagctctctgcctctgtcagaaacgtcctccagaccagccaagtcacaagaaggtacggactcaaagaaggtactgcagttccccagcctccacacaaccactaatgtcagttggtgctatttaaactacattaagccaaatcacatccagcatgcagataggaggtcctctgtttacgctggttggtgcataagtttgtacaaccccaaccttccgggggtttccactaaagctgctttgtccctcctgaggtctaagcagaaagtgagcaaagagacatacaccatggccacagctccgcatcctgaggcaggaaggcttgtgccatccagctcccgcaagccccgcatgacagaggttcacctcccttcactggtttccccggaaggccagaaagatctagctagagtggagaaggaagaagagaggagaggggagccggaggaggatgctcctgcctcccagagaggggagccggcgaggatcaaaatcttcgaaggagggtacaaatcaaacgaagagtatgtatatgtgcgaggccgcggccgagggaaatatgtttgtgaggagtgtggaattcgctgcaagaagcccagcatgctgaagaaacacatccgcacccacactgacgtccggccctatgtgtgcaagcactgtcactttgcttttaaaaccaaagggaatctgactaagcacatgaagtcgaaggcccacagcaaaaagtgccaagagacaggggtgctggaggagctggaagccgaagaaggaaccagtgacgacctgttccaggactcggaaggacgagagggttcagaggctgtggaggagcaccagttttcggacctggaggactcggactcagactcagacctggacgaagacgaggatgaggatgaggaggagagccaggatgagctgtccagaccatcctcagaggcgcccccgcctggcccaccacatgcactgcgggcagactcctcacccatcctgggccctcagcccccagatgcccccgcctctggcacggaggctacacgaggcagctcggtctcggaagctgagcgcctgacagccagcagctgctccatgtccagccagagcatgccgggcctcccctggctgggaccggcccctctgggctctgtggagaaagacacaggctcagccttgagctacaagcctgtgtccccaagaagaccgtggtccccaagcaaagaagcaggcagccgtccaccactagcccgcaaacactcgctaaccaaaaacgactcatctccccagcgatgctccccggcccgagaaccacaggcctcagccccaagcccacctggcctgcacgtggacccaggaaggggcatgggcgctctcccttgtgggtctccaagacttcagctgtctcctctcaccctctgccccctgggaagagaactggcccctcgagcacatgtgctctccaaactcgagggtaccaccgacccaggcctccccagatactcgcccaccaggagatggtctccaggtcaggccgagtcaccaccacggtcagcgccgccagggaagtgggccttggctgggccgggcagcccctcagcgggggagcatggcccaggcttggggctggacccacgggttctcttcccgcccgcgcctctacctcacaagctcctcagcagaagcccagagacctgcgcctccccgtggaaggccgagtcccgaagtccctcctgctcacccggccctgctcatcctctctcctcccgacccttctccgccctccatgacttccacggccacatcctggcccggacagaggagaacatcttcagccacctgcctctgcactcccagcacttgacccgtgccccatgtcccttgattcccatcggtgggatccagatggtgcaggcccggccaggagcccaccccaccctgctgccagggcccaccgcagcctgggtcagtggcttctccgggggtggcagcgacctgacaggggcccgggaggcccaggagcgaggccgctggagtcccactgagagctcgtcagcctccgtgtcgcctgtggctaaggtctccaaattcacactctcctcagagctggagggcggggactaccccaaggagagggagaggaccggcggaggcccgggcaggcctcctgactggacaccccatgggaccggggcacctgcagagcccacacccacgcacagcccctgcaccccacccgacaccttgccccggccgccccagggacgccgggcagcgcagtcctggagcccccgcttggagtccccgcgtgcaccgaccaaccccgagccttctgccaccccgccgctggaccgcagcagctctgtgggctgcctggcagaggcctctgcccgcttcccagcccggacgaggaacctctccggggaacccaggaccaggcaggactcccccaagccctcaggaagtggggagcccagggcacatccacatcagcctgaggacagggttccccccaacgct

SEQ ID NO: 4393 - DNA, 7218 bp, Homo sapiens
  source 1..7218: mol_type = genomic DNA
atggatcctgaacaaagtgtcaagggcaccaagaaggctgagggaagtccccggaagcggctgaccaaaggagaggccattcagaccagtgtttcttccagcgtcccatacccaggcagcggcacagctgccacccaagagagccccgcccaagagctcttagccccgcagcccttcccgggcccctcatcagttcttagggaaggctctcaggagaaaacgggccagcagcagaagccccccaaaaggccccccatcgaagcatccgtccacatctcacagcttccgcagcaccctctgacaccagcattcatgtcgcctggcaaacctgagcatctcctggaggggtccacatggcaactggttgaccccatgagacctggaccctctggctccttcgtggcccctgggctccatcctcagagccagctccttccttcccacgcttccatcattccccccgaggaccttcctggagtccccaaagtcttcgtgcctcgtccttcccaggtctccttgaagcccacagaagaggcacacaagaaggagaggaagccccagaagccaggcaagtacatctgccagtactgcagccggccctgtgccaagcccagcgtgctccagaagcacattcgctcacacacaggtgagaggccctacccctgcggcccctgtggcttctccttcaagaccaagagtaatctctacaagcacaggaagtcccatgcccaccgcatcaaagcaggcctggcctcaggcatgggtggcgagatgtacccacatgggctggagatggagcggatccctggggaagagtttgaggagcccactgagggagaaagcacagattctgaagaggagactagtgccacctctggtcaccctgcagagctctccccaagacccaagcagccccttctctccagcgggctatacagctctgggagccacagttccagccacgaacgctgttccctgtcccagtccagcacagcccagtcactcgaagacccccctccatttgtggaaccctcatctgagcaccccctgagccataaacctgaagacacccacacgattaagcagaagctggccctccgcttaagcgagaggaagaaggtgatcgatgagcaggcgtttctgagcccaggcagcaaagggagtactgagtctgggtatttctctcgctccgagagtgcagagcagcaggtcagccccccaaacaccaacgccaagtcctacgctgagatcatctttggcaagtgtgggcgaataggacagcggaccgccatgctgacagccacctccacccagcccctcctgcccctgtccaccgaagacaagcccagcctggtgcctttgtctgtaccccggacgcaggtgatcgagcacatcacgaagctcatcaccatcaacgaggccgtggtggacaccagcgagatcgacagcgtgaagccaaggcggagctcactgtccaggcgcagcagcatggagtccccaaaatccagcctctaccgggagcccctgtcatcccacagtgagaaaaccaagcctgaacaatcactgctgagcctccagcacccgcccagtaccgccccccctgtgcctctcctgagaagccactcaatgccttctgccgcctgcactatcagcaccccccaccaccccttccgaggtagctactccttcgatgaccatatcaccgactccgaagccctgagccacagcagtcacgtgtttacctcccacccccggatgctgaagcgccagccggcaatcgaattacctttgggaggggaatacagttctgaggagcctggcccaagcagcaaagacacagcctccaagccctcggacgaagtggaacccaaggaaagcgagcttaccaaaaagaccaagaagggtttgaaaacaaaaggggtgatctacgaatgtaacatatgtggtgctcggtacaagaaaagggataactacgaagcccacaaaaaatactactgctcagagcttcagatcgcaaagcccatctctgcaggcacccacacatctccagaagctgaaaagagtcagattgagcatgagccgtggtcccaaatgatgcattacaaactgggaaccaccctggaactcactccactgaggaagaggaggaaagagaagagccttggggacgaggaagagccacctgcctttgagtccacaaaaagtcagtttggcagccccgggccatctgatgctgctcggaaccttcccctggagtccaccaagtcaccagcagaaccaagtaaatcagtgccctccttggagggacccacgggcttccagccaaggactcccaagccagggtccggttcagaatcagggaaggagaggagaacaacgtccaaagaaatttctgtcatccagcacaccagctcctttgagaaatctgattctctcgagcagccgagtggcttggaaggggaagacaaacctctggcccagttcccatcacccccacctgccccacacggacgctctgctcactccctgcagcctaagttggtccgccagcccaacattcaggttcctgagatcctagtaactgaggagcctgaccggccggacacagagccagagccgccccctaaggaacctgagaagactgaggagttccaatggccccagcgcagccagacacttgcccagctcccagctgagaagctgccacccaaaaagaagaggttgcgcctggcagagatggcccaatcatcaggggagtccagcttcgagtcctctgtgcctctgtctcgcagcccgagccaggaaagcaatgtctctttgagtgggtccagccgctcagcctcgtttgagagggatgaccatgggaaagccgaggcccccagtccctcatctgacatgcgccccaaacccctgggcacccacatgttgactgtccccagccaccacccacatgcccgagagatgcggaggtcagcctcagagcagagccccaacgtttcccattctgcccacatgaccgagacacgcagcaaatcctttgactatggcagcttgtccttgacaggcccttctgctccagccccagtggctccaccagcgcgggtggccccgccagagagaagaaaatgcttcttggtgagacaggcctctctgagcaggcctccagaatctgagttggaggttgcccccaagggaagacaggagagcgaagaaccacagccctcatccagtaaaccctctgccaaaagctcattgtcccagatttcctctgcggccacctcacatggtggacccccgggaggcaagggcccagggcaggacaggcccccattggggcccactgtgccctacacagaagcactgcaagtgttccaccaccccgttgcccagacacccctgcatgagaagccatacctgcccccaccagtctcccttttctccttccagcatctcgtgcagcatgagccaggacagtctccagaattcttctccacccaggccatgtccagcctcctgtcctcaccatactccatgcccccacttcctccctccttatttcaagccccaccgcttcctctccagcctactgttctgcacccaggccaactccatctcccccagctcatgcctcacccagccaacatccccttcaggcagcccccttccttcctccccatgccatacccgacctcctcagcactgtcttctgggtttttcctgcctctgcaatcccagtttgcacttcagctccctggtgatgtggaaagccatctgccccagatcaaaaccagcctggccccactggcaacaggaagtgctggcctctcccccagcacagagtacagcagtgacatccggctaccccctgtggctcccccagccagctcctcagcacctacatcagctcctccactggccctgcctgcctgtccagacaccatggtgtccctggttgtgcctgtccgtgttcagaccaatatgccgtcctatgggagcgcaatgtacaccaccctttcccagatcttggtcacccagtcccaaggcagctcagcaactgtggcacttcccaagtttgaggaacccccatcaaaggggacgactgtatgtggtgcagatgtgcatgaggttgggcccggcccttctgggttaagtgaagagcaaagcagagctttcccaactccatacctgagagtgcctgtgacattacctgaaagaaaaggcacttccctgtcatcagagagtatcttgagcctggaggggagttcatcaacagcagggggaagcaaacgtgtcctttcaccagctggcagccttgaacttaccatggaaacccagcagcaaaaaagagtgaaggaggaggaggcttccaaggcagatgaaaaacttgagctggtaaaaccatgcagtgtggtccttaccagcaccgaggatgggaagaggccagagaaatcccacttaggcaaccagggccaaggcaggagggagctagaaatgctgtccagcctgtcctcagatccatctgacacaaaggaaattcctcccctccctcaccctgcattgtcccatgggacagccccaggctcagaagctttgaaggaatatccccagccatctggcaaacctcaccgaagagggttgaccccactgagcgtgaagaaagaagattccaaggaacaacctgatctcccctccttggcacctccgagctctctgcctctgtcagaaacgtcctccagaccagccaagtcacaagaaggtacggactcaaagaaggtactgcagttccccagcctccacacaaccactaatgtcagttggtgctatttaaactacattaagccaaatcacatccagcatgcagataggaggtcctctgtttacgctggttggtgcataagtttgtacaaccccaaccttccgggggtttccactaaagctgctttgtccctcctgaggtctaagcagaaagtgagcaaagagacatacaccatggccacagctccgcatcctgaggcaggaaggcttgtgccatccagctcccgcaagccccgcatgacagaggttcacctcccttcactggtttccccggaaggccagaaagatctagctagagtggagaaggaagaagagaggagaggggagccggaggaggatgctcctgcctcccagagaggggagccggcgaggatcaaaatcttcgaaggagggtacaaatcaaacgaagagtatgtatatgtgcgaggccgcggccgagggaaatatgtttgtgaggagtgtggaattcgctgcaagaagcccagcatgctgaagaaacacatccgcacccacactgacgtccggccctatgtgtgcaagcactgtcactttgcttttaaaaccaaagggaatctgactaagcacatgaagtcgaaggcccacagcaaaaagtgccaagagacaggggtgctggaggagctggaagccgaagaaggaaccagtgacgacctgttccaggactcggaaggacgagagggttcagaggctgtggaggagcaccagttttcggacctggaggactcggactcagactcagacctggacgaagacgaggatgaggatgaggaggagagccaggatgagctgtccagaccatcctcagaggcgcccccgcctggcccaccacatgcactgcgggcagactcctcacccatcctgggccctcagcccccagatgcccccgcctctggcacggaggctacacgaggcagctcggtctcggaagctgagcgcctgacagccagcagctgctccatgtccagccagagcatgccgggcctcccctggctgggaccggcccctctgggctctgtggagaaagacacaggctcagccttgagctacaagcctgtgtccccaagaagaccgtggtccccaagcaaagaagcaggcagccgtccaccactagcccgcaaacactcgctaaccaaaaacgactcatctccccagcgatgctccccggcccgagaaccacaggcctcagccccaagcccacctggcctgcacgtggacccaggaaggggcatgggcgctctcccttgtgggtctccaagacttcagctgtctcctctcaccctctgccccctgggaagagaactggcccctcgagcacatgtgctctccaaactcgagggtaccaccgacccaggcctccccagatactcgcccaccaggagatggtctccaggtcaggccgagtcaccaccacggtcagcgccgccagggaagtgggccttggctgggccgggcagcccctcagcgggggagcatggcccaggcttggggctggacccacgggttctcttcccgcccgcgcctctacctcacaagctcctcagcagaagcccagagacctgcgcctccccgtggcagaaggccgagtcccgaagtccctcctgctcacccggccctgctcatcctctctcctcccgacccttctccgccctccatgacttccacggccacatcctggcccggacagaggagaacatcttcagccacctgcctctgcactcccagcacttgacccgtgccccatgtcccttgattcccatcggtgggatccagatggtgcaggcccggccaggagcccaccccaccctgctgccagggcccaccgcagcctgggtcagtggcttctccgggggtggcagcgacctgacaggggcccgggaggcccaggagcgaggccgctggagtcccactgagagctcgtcagcctccgtgtcgcctgtggctaaggtctccaaattcacactctcctcagagctggagggcggggactaccccaaggagagggagaggaccggcggaggcccgggcaggcctcctgactggacaccccatgggaccggggcacctgcagagcccacacccacgcacagcccctgcaccccacccgacaccttgccccggccgccccagggacgccgggcagcgcagtcctggagcccccgcttggagtccccgcgtgcaccgaccaaccccgagccttctgccaccccgccgctggaccgcagcagctctgtgggctgcctggcagaggcctctgcccgcttcccagcccggacgaggaacctctccggggaacccaggaccaggcaggactcccccaagccctcaggaagtggggagcccagggcacatccacatcagcctgaggacagggttccccccaacgct

SEQ ID NO: 4394 - DNA, 1689 bp, Homo sapiens
  source 1..1689: mol_type = genomic DNA
atggcagctctgtcccccacatttgccacgtccacccaggattccacctgtctccaggactcagaatttcctgtttcttcaaaagaccattcctgtccccagaatttggacctgttcgtgtgcagtggtctggagcctcacacacccagtgttggttcccaggaatcggtgactttccaagatgtcgctgtggactttaccgagaaggagtggcccttgctggattcttctcagagaaaactgtacaaagatgtaatgctggagaactacagcaacctcacttcactggattgggagactccatctaaaaccaagtggtcacttcttatggaagatatttttgggaaggaaacgcccagtggtgtgacgatggaaagagccggtcttggagagaagtccactgaatacgctcacttgttcgaagtctttggcatggaccctcatctcactcagccaatgggaaggcacgctggcaagaggccctatcaccgccgcgactatggggtagcgttcaagggcaggccgcacctcactcagcacatgagcatgtacgacgggagaaaaatgcatgaatgtcatcagtgccaaaaagccttcaccacgagcgcgtccctcacacggcacaggagaatccacaccggggagaagccttacgagtgcagcgactgcgggaaagccttcaacgacccttcagcccttaggagccacgcaagaactcacctcaaagagaagccctttgactgcagtcagtgtggaaatgcattccggaccctctcggccctgaaaatccacatgcgagttcacactggcgagaggccttacaagtgtgatcagtgcgggaaggcttacggccggagctgccacctcatcgcacacaagagaacgcacaccggagagaggccctacgagtgtcacgactgtgggaaagctttccagcacccctcccacctcaaagagcacgtgaggaatcacacgggggagaagccctacgcgtgcacgcagtgcggcaaagccttccgctggaagtccaactttaatttgcacaagaagaaccacatggtggagaagacctacgaatgtaaagaatgcgggaaatcctttggcgatctcgtgtcccggaggaaacacatgaggattcacatcgtcaagaaacccgtggaatgtcggcagtgcgggaagaccttccgaaaccagtccatccttaagactcacatgaactctcacactggagagaaaccatacgggtgcgatctctgcgggaaagctttcagcgcgagttcaaacctcaccgcacacaggaagatacacacgcaagagagacgctacgaatgcgccgcctgcgggaaagtcttcggtgactatttatcccggcggaggcacatgagcgttcaccttgtaaagaaacgagttgagtgtaggcagtgtggcaaggccttcaggaaccagtcaacgctgaagacgcacatgcgaagccacacgggggagaaaccgtacgaatgcgatcactgtgggaaggccttcagcataggctccaacctgaatgtgcacaggcggatccacaccggggagaagccctacgaatgccttgtctgcgggaaagccttcagcgaccactcatccctcaggagccacgtgaaaactcaccggggagagaagctctttgtgtcatccgtgtggaaaaggctccag

SEQ ID NO: 4395 - DNA, 1746 bp, Homo sapiens
  source 1..1746: mol_type = genomic DNA
atgtcggaaagctggcaacagccgccacagacgcagccgcagcagccacagccaccgcagcctcagcaccatgcagagccaccgccagccctggcagagcacacgctgcctccgggcacggcggagaaccccctgggctgtgccgtctatggcatcctcctgcagccagaccccggcctgcagcccccacaacacgcacccctgcaggcagcaggagagccaggccccaaatgtggcgtgtgtggtcacgacctggcgcacctgtccagtccgcatgagcaccagtgtctggcgggccatgaccgctcattccagtgcacacagtgtctcaagatcttccaccaggccactgacctgctggagcaccagtgcgtgcaggctgagcagaagcccttcgtctgtggggtctgcaagatgggcttctcactactcacctcactggcacagcaccacagctcccacagtggcctggtgaagtgttccatctgtgaaaagacctacaagccagctgaggcagcggagccagccaccacagccgccccgtcgcttcccgcagcacccgcgccttccactgtcacccctgctgaacaggccgacaagccctacagctgccccatctgccaaaagcccttcaagcacctgtcggagctctctcggcatgagcggatccacaccggtgagaagccctacaagtgcacgctgtgtgacaaaagcttcagccagtcgtcgcacctggtgcaccacaagcgcacgcacagctccgagcggccctacaagtgcgcagtctgcgagaagaccttcaagcaccgctctcacctggtgcgccacatgtacgcgcactcgggcgagcaccacctgttccgctgcaacgtgtgcgagttgcatttcaaggagtcgtcggagctgctgcagcacccgtgcacgccaagtggggagcggcccttccgctgcggcgagtgccagaaggccttcaagcggccctcggacctgcggcagcatgagcgcacacacagcgccgagcggcccttcaagtgcgacctgtgccccatgggcttcaagcagcagtacgcactgatgcgccaccggcgcacacacaagaccgaggagcccttcaaatgcggcctatgtgagaagggctttgggcagcccagccacctgctctaccaccagcacgtgcacaccctcgagactctcttcaagtgccccgtgtgccagaaaggctttgaccaatctgccgagctgctgcggcacaagtgcctgcccggcgcggccgagcggcccttcaagtgccctgtgtgcaacaaggcctacaagcgcgcgtcggccctgcagaagcaccagctggcccactgtgcggcggcagagaagcccctgcgctgcacgctttgcgaacgccgcttcttctcctcttccgagttcgtgcagcaccgctgcgatccggcccgcgagaagccactcaagtgcccagactgcgagaaacgcttcaagtacgcgtcagacctgcagcggcaccggcgggtacacacaggcgagaagccctacaagtgccccaactgcgacaaggccttcaagcagcgggagcatctcaacaagcaccagggcgtgcacgcccgcgagcagcagttcaagtgtgtatggtgcggggagcgcttcctagacgtggccttgttgcaggagcacagcgcgcagcacagtgccgccgccgcggcagcggagggcgcctaccaggtagccgcctgcctgccc

SEQ ID NO: 4396 - DNA, 1041 bp, Homo sapiens
  source 1..1041: mol_type = genomic DNA
atggaaacacccttctacggcgatgaggcgctgagcggcctgggcggcggcgccagtggcagcggcggcagcttcgcgtccccgggccgcttgttccccggggcgcccccgacggccgcggccggcagcatgatgaagaaggacgcgctgacgctgagcctgagtgagcaggtggcggcagcgctcaagcctgcggccgcgccgcctcctacccccctgcgcgccgacggcgcccccagcgcggcaccccccgacggcctgctcgcctctcccgacctggggctgctgaagctggcctcccccgagctcgagcgcctcatcatccagtccaacgggctggtcaccaccacgccgacgagctcacagttcctctaccccaaggtggcggccagcgaggagcaggagttcgccgagggcttcgtcaaggccctggaggatttacacaagcagaaccagctcggcgcgggcgcggccgctgccgccgccgccgccgccgccggggggccctcgggcacggccacgggctccgcgccccccggcgagctggccccggcggcggccgcgcccgaagcgcctgtctacgcgaacctgagcagctacgcgggcggcgccgggggcgcggggggcgccgcgacggtcgccttcgctgccgaacctgtgcccttcccgccgccgccacccccaggcgcgttggggccgccgcgcctggctgcgctcaaggacgagccacagacggtgcccgacgtgccgagcttcggcgagagcccgccgttgtcgcccatcgacatggacacgcaggagcgcatcaaggcggagcgcaagcggctgcgcaaccgcatcgccgcctccaagtgccgcaagcgcaagctggagcgcatctcgcgcctggaagagaaagtgaagaccctcaagagtcagaacacggagctggcgtccacggcgagcctgctgcgcgagcaggtggcgcagctcaagcagaaagtcctcagccacgtcaacagcggctgccagctgctgccccagcaccaggtgcccgcgtac

SEQ ID NO: 4397 - DNA, 7665 bp, Homo sapiens
  source 1..7665: mol_type = genomic DNA
atgccgccgctcctggcgcccctgctctgcctggcgctgctgcccgcgctcgccgcacgaggcccgcgatgctcccagcccggtgagacctgcctgaatggcgggaagtgtgaagcggccaatggcacggaggcctgcgtctgtggcggggccttcgtgggcccgcgatgccaggaccccaacccgtgcctcagcaccccctgcaagaacgccgggacatgccacgtggtggaccgcagaggcgtggcagactatgcctgcagctgtgccctgggcttctctgggcccctctgcctgacacccctggacaatgcctgcctcaccaacccctgccgcaacgggggcacctgcgacctgctcacgctgacggagtacaagtgccgctgcccgcccggctggtcagggaaatcgtgccagcaggctgacccgtgcgcctccaacccctgcgccaacggtggccagtgcctgcccttcgaggcctcctacatctgccactgcccacccagcttccatggccccacctgccggcaggatgtcaacgagtgtggccagaagcccgggctttgccgccacggaggcacctgccacaacgaggtcggctcctaccgctgcgtctgccgcgccacccacactggccccaactgcgagcggccctacgtgccctgcagcccctcgccctgccagaacgggggcacctgccgccccacgggcgacgtcacccacgagtgtgcctgcctgccaggcttcaccggccagaactgtgaggaaaatatcgacgattgtccaggaaacaactgcaagaacgggggtgcctgtgtggacggcgtgaacacctacaactgccgctgcccgccagagtggacaggtcagtactgtaccgaggatgtggacgagtgccagctgatgccaaatgcctgccagaacggcgggacctgccacaacacccacggtggctacaactgcgtgtgtgtcaacggctggactggtgaggactgcagcgagaacattgatgactgtgccagcgccgcctgcttccacggcgccacctgccatgaccgtgtggcctccttctactgcgagtgtccccatggccgcacaggtctgctgtgccacctcaacgacgcatgcatcagcaacccctgtaacgagggctccaactgcgacaccaaccctgtcaatggcaaggccatctgcacctgcccctcggggtacacgggcccggcctgcagccaggacgtggatgagtgctcgctgggtgccaacccctgcgagcatgcgggcaagtgcatcaacacgctgggctccttcgagtgccagtgtctgcagggctacacgggcccccgatgcgagatcgacgtcaacgagtgcgtctcgaacccgtgccagaacgacgccacctgcctggaccagattggggagttccagtgcatctgcatgcccggctacgagggtgtgcactgcgaggtcaacacagacgagtgtgccagcagcccctgcctgcacaatggccgctgcctggacaagatcaatgagttccagtgcgagtgccccacgggcttcactgggcatctgtgccagtacgatgtggacgagtgtgccagcaccccctgcaagaatggtgccaagtgcctggacggacccaacacttacacctgtgtgtgcacggaagggtacacggggacgcactgcgaggtggacatcgatgagtgcgaccccgacccctgccactacggctcctgcaaggacggcgtcgccaccttcacctgcctctgccgcccaggctacacgggccaccactgcgagaccaacatcaacgagtgctccagccagccctgccgccacgggggcacctgccaggaccgcgacaacgcctacctctgcttctgcctgaaggggaccacaggacccaactgcgagatcaacctggatgactgtgccagcagcccctgcgactcgggcacctgtctggacaagatcgatggctacgagtgtgcctgtgagccgggctacacagggagcatgtgtaacatcaacatcgatgagtgtgcgggcaacccctgccacaacgggggcacctgcgaggacggcatcaatggcttcacctgccgctgccccgagggctaccacgaccccacctgcctgtctgaggtcaatgagtgcaacagcaacccctgcgtccacggggcctgccgggacagcctcaacgggtacaagtgcgactgtgaccctgggtggagtgggaccaactgtgacatcaacaacaatgagtgtgaatccaacccttgtgtcaacggcggcacctgcaaagacatgaccagtggctacgtgtgcacctgccgggagggcttcagcggtcccaactgccagaccaacatcaacgagtgtgcgtccaacccatgtctgaaccagggcacgtgtattgacgacgttgccgggtacaagtgcaactgcctgctgccctacacaggtgccacgtgtgaggtggtgctggccccgtgtgcccccagcccctgcagaaacggcggggagtgcaggcaatccgaggactatgagagcttctcctgtgtctgccccacgggctggcaagggcagacctgtgaggtcgacatcaacgagtgcgttctgagcccgtgccggcacggcgcatcctgccagaacacccacggcggctaccgctgccactgccaggccggctacagtgggcgcaactgcgagaccgacatcgacgactgccggcccaacccgtgtcacaacgggggctcctgcacagacggcatcaacacggccttctgcgactgcctgcccggcttccggggcactttctgtgaggaggacatcaacgagtgtgccagtgacccctgccgcaacggggccaactgcacggactgcgtggacagctacacgtgcacctgccccgcaggcttcagcgggatccactgtgagaacaacacgcctgactgcacagagagctcctgcttcaacggtggcacctgcgtggacggcatcaactcgttcacctgcctgtgtccacccggcttcacgggcagctactgccagcacgatgtcaatgagtgcgactcacagccctgcctgcatggcggcacctgtcaggacggctgcggctcctacaggtgcacctgcccccagggctacactggccccaactgccagaaccttgtgcactggtgtgactcctcgccctgcaagaacggcggcaaatgctggcagacccacacccagtaccgctgcgagtgccccagcggctggaccggcctttactgcgacgtgcccagcgtgtcctgtgaggtggctgcgcagcgacaaggtgttgacgttgcccgcctgtgccagcatggagggctctgtgtggacgcgggcaacacgcaccactgccgctgccaggcgggctacacaggcagctactgtgaggacctggtggacgagtgctcacccagcccctgccagaacggggccacctgcacggactacctgggcggctactcctgcaagtgcgtggccggctaccacggggtgaactgctctgaggagatcgacgagtgcctctcccacccctgccagaacgggggcacctgcctcgacctccccaacacctacaagtgctcctgcccacggggcactcagggtgtgcactgtgagatcaacgtggacgactgcaatccccccgttgaccccgtgtcccggagccccaagtgctttaacaacggcacctgcgtggaccaggtgggcggctacagctgcacctgcccgccgggcttcgtgggtgagcgctgtgagggggatgtcaacgagtgcctgtccaatccctgcgacgcccgtggcacccagaactgcgtgcagcgcgtcaatgacttccactgcgagtgccgtgctggtcacaccgggcgccgctgcgagtccgtcatcaatggctgcaaaggcaagccctgcaagaatgggggcacctgcgccgtggcctccaacaccgcccgcgggttcatctgcaagtgccctgcgggcttcgagggcgccacgtgtgagaatgacgctcgtacctgcggcagcctgcgctgcctcaacggcggcacatgcatctccggcccgcgcagccccacctgcctgtgcctgggccccttcacgggccccgaatgccagttcccggccagcagcccctgcctgggcggcaacccctgctacaaccaggggacctgtgagcccacatccgagagccccttctaccgttgcctgtgccccgccaaattcaacgggctcttgtgccacatcctggactacagcttcgggggtggggccgggcgcgacatccccccgccgctgatcgaggaggcgtgcgagctgcccgagtgccaggaggacgcgggcaacaaggtctgcagcctgcagtgcaacaaccacgcgtgcggctgggacggcggtgactgctccctcaacttcaatgacccctggaagaactgcacgcagtctctgcagtgctggaagtacttcagtgacggccactgtgacagccagtgcaactcagccggctgcctcttcgacggctttgactgccagcgtgcggaaggccagtgcaaccccctgtacgaccagtactgcaaggaccacttcagcgacgggcactgcgaccagggctgcaacagcgcggagtgcgagtgggacgggctggactgtgcggagcatgtacccgagaggctggcggccggcacgctggtggtggtggtgctgatgccgccggagcagctgcgcaacagctccttccacttcctgcgggagctcagccgcgtgctgcacaccaacgtggtcttcaagcgtgacgcacacggccagcagatgatcttcccctactacggccgcgaggaggagctgcgcaagcaccccatcaagcgtgccgccgagggctgggccgcacctgacgccctgctgggccaggtgaaggcctcgctgctccctggtggcagcgagggtgggcggcggcggagggagctggaccccatggacgtccgcggctccatcgtctacctggagattgacaaccggcagtgtgtgcaggcctcctcgcagtgcttccagagtgccaccgacgtggccgcattcctgggagcgctcgcctcgctgggcagcctcaacatcccctacaagatcgaggccgtgcagagtgagaccgtggagccgcccccgccggcgcagctgcacttcatgtacgtggcggcggccgcctttgtgcttctgttcttcgtgggctgcggggtgctgctgtcccgcaagcgccggcggcagcatggccagctctggttccctgagggcttcaaagtgtctgaggccagcaagaagaagcggcgggagcccctcggcgaggactccgtgggcctcaagcccctgaagaacgcttcagacggtgccctcatggacgacaaccagaatgagtggggggacgaggacctggagaccaagaagttccggttcgaggagcccgtggttctgcctgacctggacgaccagacagaccaccggcagtggactcagcagcacctggatgccgctgacctgcgcatgtctgccatggcccccacaccgccccagggtgaggttgacgccgactgcatggacgtcaatgtccgcgggcctgatggcttcaccccgctcatgatcgcctcctgcagcgggggcggcctggagacgggcaacagcgaggaagaggaggacgcgccggccgtcatctccgacttcatctaccagggcgccagcctgcacaaccagacagaccgcacgggcgagaccgccttgcacctggccgcccgctactcacgctctgatgccgccaagcgcctgctggaggccagcgcagatgccaacatccaggacaacatgggccgcaccccgctgcatgcggctgtgtctgccgacgcacaaggtgtcttccagatcctgatccggaaccgagccacagacctggatgcccgcatgcatgatggcacgacgccactgatcctggctgcccgcctggccgtggagggcatgctggaggacctcatcaactcacacgccgacgtcaacgccgtagatgacctgggcaagtccgccctgcactgggccgccgccgtgaacaatgtggatgccgcagttgtgctcctgaagaacggggctaacaaagatatgcagaacaacagggaggagacacccctgtttctggccgcccgggagggcagctacgagaccgccaaggtgctgctggaccactttgccaaccgggacatcacggatcatatggaccgcctgccgcgcgacatcgcacaggagcgcatgcatcacgacatcgtgaggctgctggacgagtacaacctggtgcgcagcccgcagctgcacggagccccgctggggggcacgcccaccctgtcgcccccgctctgctcgcccaacggctacctgggcagcctcaagcccggcgtgcagggcaagaaggtccgcaagcccagcagcaaaggcctggcctgtggaagcaaggaggccaaggacctcaaggcacggaggaagaagtcccaggacggcaagggctgcctgctggacagctccggcatgctctcgcccgtggactccctggagtcaccccatggctacctgtcagacgtggcctcgccgccactgctgccctccccgttccagcagtctccgtccgtgcccctcaaccacctgcctgggatgcccgacacccacctgggcatcgggcacctgaacgtggcggccaagcccgagatggcggcgctgggtgggggcggccggctggcctttgagactggcccacctcgtctctcccacctgcctgtggcctctggcaccagcaccgtcctgggctccagcagcggaggggccctgaatttcactgtgggcgggtccaccagtttgaatggtcaatgcgagtggctgtcccggctgcagagcggcatggtgccgaaccaatacaaccctctgcgggggagtgtggcaccaggccccctgagcacacaggccccctccctgcagcatggcatggtaggcccgctgcacagtagccttgctgccagcgccctgtcccagatgatgagctaccagggcctgcccagcacccggctggccacccagcctcacctggtgcagacccagcaggtgcagccacaaaacttacagatgcagcagcagaacctgcagccagcaaacatccagcagcagcaaagcctgcagccgccaccaccaccaccacagccgcaccttggcgtgagctcagcagccagcggccacctgggccggagcttcctgagtggagagccgagccaggcagacgtgcagccactgggccccagcagcctggcggtgcacactattctgccccaggagagccccgccctgcccacgtcgctgccatcctcgctggtcccacccgtgaccgcagcccagttcctgacgcccccctcgcagcacagctactcctcgcctgtggacaacacccccagccaccagctacaggtgcctgagcaccccttcctcaccccgtcccctgagtcccctgaccagtggtccagctcgtccccgcattccaacgtctccgactggtccgagggcgtctccagccctcccaccagcatgcagtcccagatcgcccgcattccggaggccttcaag

SEQ ID NO: 4398 - DNA, 570 bp, Homo sapiens
  source 1..570: mol_type = genomic DNA
atgccccgcgccttcctggtcaggagtcggcgtccacagccccccaactggggccatctgcctgaccagctccggggagatgcctatatcccagactgcagcagcctgggggggccaccggcacaacagtcgtccagtgtcagggatccgtggacagcgcagcccacacagggcaacctgacctctgctcccaggggccctgggacgctgggctgcccgctctgccctaaggccttccctctgcagcgcatgctgacaaggcacctcaagtgccacagccccgtgcgccgccacctgtgccgctgttgtggcaagggctttcatgacgccttcgatctcaagcgccacatgaggactcacactgggatccggcccttccgctgcagtgcttgcgggaaagcgtttacgcagcgctgctccctggaagctcaccttgctaaggtgcatggacagccggccagctacgcttaccgtgagcgccgcgagaagctgcacgtgtgcgaggactgcggcttcaccagctcccggcccgacacctacgcacagcaccgcgccctgcaccgcgcagcc

SEQ ID NO: 4399 - DNA, 852 bp, Homo sapiens
  source 1..852: mol_type = genomic DNA
atggagccggggatgctgggtccacacaacctcccacaccacgagccaatcagcttcggcatcgatcagatcctgagcggccccgaaaccccagggggcggtctaggcctgggtcgcgggggccagggtcatggggagaatggggcgttctcgggtggataccacggagcctcgggctacggtcccgccggctcacttgccccgctgcccggcagctccggagtgggcccaggcggcgtgatccgcgtccctgcgcaccgcccgctgcctgtgccgccgcccgctgggggggcgcctgcagtgcctgggccctcgggtttgggcggcgccggaggcctagcgggactcaccttcccctggatggacagcggccgccgctttgccaaggaccggctcacggctgcgctctcgcccttctctgggacgcgccgcataggccacccctaccaaaaccggacccctccgaagcggaagaagccgcgcacgtccttctcccgctcacaggtgctggagttggagcggcgcttcctgcgccagaagtacctggcctctgcggagagggcggcgctggccaaggccttgcgcatgaccgacgcacaggtcaaaacgtggttccagaaccgacgcaccaagtggcggcgccagacggcggaggagcgcgaggccgagcggcaccgcgcgggccggctgctcctgcatctgcagcaggacgcgttgccacggccgctgcggccgccgctgcccccggaccctctctgcctgcacaactcgtcgctcttcgcgctgcagaacctgcagccctgggccgaggacaacaaagtggcttcagtgtccgggctcgcctcggtggtg

SEQ ID NO: 4400 - DNA, 615 bp, Homo sapiens
  source 1..615: mol_type = genomic DNA
atgagccttcgagactctagctacagcatggcccccgggccctgtgtggtggcccagctgccctctgaagacatgggccacttgacagacccccagagcagagaccatggcttcctgcgcaccaagatgaaggtgacccttggggacagtcccagtggagacctgttcacctgccgtgtctgccagaaggccttcacctaccagcgcatgctgaaccgccacatgaagtgtcacaacgacgtcaagaggcacctctgcacgtactgcgggaagggcttcaatgacaccttcgacctcaagagacacgtccgaactcacactggcgtgcggccctacaagtgcagcctgtgtgacaaggccttcacgcagcgctgctctctggagtctcacctcaagaagatccatggtgtgcagcagaagtacgcgtacaaggagcggcgggccaagctgtacgtgtgtgaggagtgcggctgcacatctgagagccaggagggccacgtcctgcacctgaaggagcaccaccctgacagcccgctgctgcgcaagacctccaagaaggtggccgtggcactacagaacactgtcacttccctgctgcagggcagcccccacctg

SEQ ID NO: 4401 - DNA, 1368 bp, Homo sapiens
  source 1..1368: mol_type = genomic DNA
atggacacagtggtctttgaagacgtggttgtggatttcacgctggaggagtgggccttgctgaatcctgctcagagaaaactctacagagatgtcatgctggagaccttcaagcacctggcctcagtagataatgaggctcagcttaaagccagtgggtctatttctcagcaggatacttctggagaaaaattatccctcaaacagaaaatagaaaagttcacaagaaagaatatatgggcctcccttttaggaaaaaattgggaagaacatagcgttaaagacaagcacaacaccaaggagagacatttgagcagaaatccaagggtggagagaccatgtaaaagcagtaaaggtaataaacgtggaagaaccttcagaaagactcgaaattgtaatcgtcatctgcgcaagaattgttgtactagtgtaagacggtacgaatgcagtcagtgtggaaaactcttcacccattcctcatccctgataaggcacaaaagagctcactctggacaaaaattatataaatgtaaggaatgtgggaaagccttcagtcgcccttcctacctacagacgcatgagaaaactcacagtggagagaaaccctatgcctgtcaatcttgcgggaagacatttcttcgttcccactctctcactgaacatgtaaggactcacactggagagaaaccctacgaatgtgggcagtgtgggaaaggcttcagttgtcccaaatcctttcgcgcacatgtgatgatgcacgccggagggagaccgtatgagtgcaagcactgtgggaaagccttcaggtgtcagaaatcctttcgagtccatatgatcatgcacgccggagggagaccgtatgagtgcaagcagtgtgggaaagcctactgctgggcaacatcctttcaacgacacgtgagaattcacaacggggagaaaccctataagtgtggaaaatgcgggaaagcattcggttggccctcatccttacacaaacacgcgagaacgcatgctaaaaagaaacctgtgagtgggggcagcgtgggaaagtcttccgcgaggcctcgcccctccacagatgtcaaatcacaaactagagagaaagtctataaatgtgaaacgtgtgggaaaacgtatggttggtcctcatctttacacaaacatgagagaaagcacactggggagaaacctgtaaatgcagccagtgtgggaaaaccttcaggcgggctttgctcttccaaaaatgtaagaacgcagattggacagaagcccagtaaatgcgaaaaatgtgggaaagctttcagttgtcccaaagcctttcaaggtcatgtgagaagtcacacaggaaagaaatcctgtacatctaag

SEQ ID NO: 4402 - DNA, 1269 bp, Homo sapiens
  source 1..1269: mol_type = genomic DNA
atggcggctgtcgtcctgcccccaactgccgcctctcagcgagaaggacacacagagggcggagagctggttaatgagctcctgaaaagctggctaaagggcttggtgacctttgaggatgtggccgtggagttcacccaggaggagtgggcattgctggaccctgcccaaaggacactgtacagggacgtgatgctggagaactgcaggaacctggcctcactggggaaccaagttgataaacctaggctgatctcccagctggagcaagaagataaagtgatgacagaagagagaggaattctctcaggtacctgtccagatgtggagaatccatttaaagccaaagggttaactcctaagctgcatgtttttcgaaaagaacaatctagaaatatgaaaatggagaggaatcatcttggagcaacactcaacgaatgtaatcagtgttttaaagtcttcagcacaaaatcttcccttacacggcacaggaagattcatactggagaaagaccctatggctgcagtgaatgtgggaaatcctacagcagtagatcttaccttgctgttcataagagaatccacaatggggagaaaccctatgaatgcaatgactgtgggaaaaccttcagcagcagatcttaccttactgttcataagagaatccacaatggggagaaaccctacgaatgcagtgactgtgggaaaaccttcagcaattcctcatacctcagaccgcacttgagaattcacactggagaaaaaccgtacaaatgtaaccagtgttttcgtgagttccgcactcagtcaatcttcacaaggcacaagagagttcatacgggggagggtcattatgtatgtaatcagtgtggaaaggctttcggcacgaggtcatctctttcttcgcactatagcattcatacaggggagtacccttacgaatgccacgattgtgggagaaccttcaggaggaggtcgaatctgacacagcacataagaactcatactggagaaaaaccctacacatgtaatgagtgtgggaaatcctttaccaatagcttttctcttacaattcacaggagaatacataatggagagaaatcctatgagtgcagtgattgtggaaaatcctttaatgttctctcatccgttaagaaacacatgagaactcacactggaaaaaaaccctatgaatgtaattattgcgggaaatccttcacaagtaactcctacctttctgtgcatacgagaatgcataataggcaaatg

SEQ ID NO: 4403 - DNA, 1290 bp, Homo sapiens
  source 1..1290: mol_type = genomic DNA
atggcggctgtcgtcctgcccccaactgccgctctgtcttccctgttcccagcctctcagcgagaaggacacacagagggcggagagctggttaatgagctcctgaaaagctggctaaagggcttggtgacctttgaggatgtggccgtggagttcacccaggaggagtgggcattgctggaccctgcccaaaggacactgtacagggacgtgatgctggagaactgcaggaacctggcctcactggggaaccaagttgataaacctaggctgatctcccagctggagcaagaagataaagtgatgacagaagagagaggaattctctcaggtacctgtccagatgtggagaatccatttaaagccaaagggttaactcctaagctgcatgtttttcgaaaagaacaatctagaaatatgaaaatggagaggaatcatcttggagcaacactcaacgaatgtaatcagtgttttaaagtcttcagcacaaaatcttcccttacacggcacaggaagattcatactggagaaagaccctatggctgcagtgaatgtgggaaatcctacagcagtagatcttaccttgctgttcataagagaatccacaatggggagaaaccctatgaatgcaatgactgtgggaaaaccttcagcagcagatcttaccttactgttcataagagaatccacaatggggagaaaccctacgaatgcagtgactgtgggaaaaccttcagcaattcctcatacctcagaccgcacttgagaattcacactggagaaaaaccgtacaaatgtaaccagtgttttcgtgagttccgcactcagtcaatcttcacaaggcacaagagagttcatacgggggagggtcattatgtatgtaatcagtgtggaaaggctttcggcacgaggtcatctctttcttcgcactatagcattcatacaggggagtacccttacgaatgccacgattgtgggagaaccttcaggaggaggtcgaatctgacacagcacataagaactcatactggagaaaaaccctacacatgtaatgagtgtgggaaatcctttaccaatagcttttctcttacaattcacaggagaatacataatggagagaaatcctatgagtgcagtgattgtggaaaatcctttaatgttctctcatccgttaagaaacacatgagaactcacactggaaaaaaaccctatgaatgtaattattgcgggaaatccttcacaagtaactcctacctttctgtgcatacgagaatgcataataggcaaatg

SEQ ID NO: 4404 - DNA, 1881 bp, Homo sapiens
  source 1..1881: mol_type = genomic DNA
atggactcagtggtctttgaggatgtggctgtggacttcaccctggaggagtgggctttgctggattctgctcagagggacctctacagagatgtgatgctggagacctttcagaacctggcctcagtagatgatgaaactcaatttaaggccagtgggtcagtttctcagcaggatatttatggagagaaaatacccaaggaatctaaaatagccacgttcaccagaaatgtttcctgggcctctgttttaggaaaaatttgggacagtcttagcatcgaagatcaaaccacaaaccaggggagaaatctcagaaatcatgggttggagagactctgtgaaagtaatgatcaatgtggagaagccctcagccagattccacatcttaatctgtacaagaaaattccacctggagtaaaacagtatgaatacaacacgtacggaaaagtcttcatgcatcgccgcacatccctcaagagtcccatcacagttcacactggacacaaaccatatcagtgccaggaatgtgggcaggcctacagttgtcgttcacacctaagaatgcatgtgagaacccacaatggagagagaccctatgtgtgtaaattatgtgggaaaacctttcctcgtacttcctccctcaatcggcatgtaaggattcacactgctgagaaaacctacgaatgtaagcaatgtgggaaagcctttattgacttctcaagtcttactagtcatctcagaagtcacaccggagagaagccatataagtgtaaggaatgtgggaaagctttcagttattcctcaacgtttcgaagacacacaataacacacactggcgagaagccatataaatgtaaggaatgtgcggaagcctttagttattcctcaacttttcgaagacatatgatttcacacactggagagaagccacataaatgtaaagaatgtggggaggccttcagttattcttcggcttttcgaagacacatgataacacacactggagagaaaccctacgaatgcaaacaatgtgggaaaaccttcatttatctccagtcctttcgaagacatgaaaggattcacactggagagaaaccctacgaatgcaaacagtgtgggaagaccttcatttatccccagtcctttcgaagacatgaaaggactcatggtggagagaaaccctatgaatgcaaccagtgcgggaaagcattcagtcacccctcctcctttcgaggacacatgagggtgcacactggagagaaaccctatgagtgcaagcaatgtgggaaaactttcaattggcccatatctttacgaaaacatatgagaacacatactagagagaaaccctatgaatgtaagcagtgtgggaaagccttcagcttgtctgcttgctttcgagaacatgtgagaatgcaccctgaagacaaatcctatgaatgcaagctatgtgggaaagctttctattgccacatatccttacaaaaacatatgagaagacataccgcagagaaactctataaatgcaagcagtgtgggaaagctttcagttggcctgaacttttgcaacaacatgtgagaacgcacactgtagagaagccctatgaatgtaaggaatgtgggaaggtcttcaaatggccatcatctttaccaatacatatgagactgcacactggagagaaaccttatcaatgtaagcattgtgggaaagcattcaattgttcctcatccttaaggcgacatgtgagaatacacactacagaaaaacagtataagtgtaatgtaggacatcctcctgcaaatgaattcatgtgcagtgcttcagaaaagtcacaccaggagagagatctgatcaaagttgtaaatatggtgttgccttta

SEQ ID NO: 4405 - DNA, 1884 bp, Homo sapiens
  source 1..1884: mol_type = genomic DNA
atggactcagtggtctttgaggatgtggctgtggacttcaccctggaggagtgggctttgctggattctgctcagagggacctctacagagatgtgatgctggagacctttcagaacctggcctcagtagatgatgaaactcaatttaaggccagtgggtcagtttctcagcaggatatttatggagagaaaatacccaaggaatctaaaatagccacgttcaccagaaatgtttcctgggcctctgttttaggaaaaatttgggacagtcttagcatcgaagatcaaaccacaaaccaggggagaaatctcagtagaaatcatgggttggagagactctgtgaaagtaatgatcaatgtggagaagccctcagccagattccacatcttaatctgtacaagaaaattccacctggagtaaaacagtatgaatacaacacgtacggaaaagtcttcatgcatcgccgcacatccctcaagagtcccatcacagttcacactggacacaaaccatatcagtgccaggaatgtgggcaggcctacagttgtcgttcacacctaagaatgcatgtgagaacccacaatggagagagaccctatgtgtgtaaattatgtgggaaaacctttcctcgtacttcctccctcaatcggcatgtaaggattcacactgctgagaaaacctacgaatgtaagcaatgtgggaaagcctttattgacttctcaagtcttactagtcatctcagaagtcacaccggagagaagccatataagtgtaaggaatgtgggaaagctttcagttattcctcaacgtttcgaagacacacaataacacacactggcgagaagccatataaatgtaaggaatgtgcggaagcctttagttattcctcaacttttcgaagacatatgatttcacacactggagagaagccacataaatgtaaagaatgtggggaggccttcagttattcttcggcttttcgaagacacatgataacacacactggagagaaaccctacgaatgcaaacaatgtgggaaaaccttcatttatctccagtcctttcgaagacatgaaaggattcacactggagagaaaccctacgaatgcaaacagtgtgggaagaccttcatttatccccagtcctttcgaagacatgaaaggactcatggtggagagaaaccctatgaatgcaaccagtgcgggaaagcattcagtcacccctcctcctttcgaggacacatgagggtgcacactggagagaaaccctatgagtgcaagcaatgtgggaaaactttcaattggcccatatctttacgaaaacatatgagaacacatactagagagaaaccctatgaatgtaagcagtgtgggaaagccttcagcttgtctgcttgctttcgagaacatgtgagaatgcaccctgaagacaaatcctatgaatgcaagctatgtgggaaagctttctattgccacatatccttacaaaaacatatgagaagacataccgcagagaaactctataaatgcaagcagtgtgggaaagctttcagttggcctgaacttttgcaacaacatgtgagaacgcacactgtagagaagccctatgaatgtaaggaatgtgggaaggtcttcaaatggccatcatctttaccaatacatatgagactgcacactggagagaaaccttatcaatgtaagcattgtgggaaagcattcaattgttcctcatccttaaggcgacatgtgagaatacacactacagaaaaacagtataagtgtaatgtaggacatcctcctgcaaatgaattcatgtgcagtgcttcagaaaagtcacaccaggagagagatctgatcaaagttgtaaatatggtgttgccttta

SEQ ID NO: 4406 - DNA, 1221 bp, Homo sapiens
  source 1..1221: mol_type = genomic DNA
atggcggcggccgcgctaaggttccccgttcagggcacagtgacttttgaagacgtggctgtgaaatttacccaggaggaatggaatctccttagtgaggctcagagatgcctgtaccgtgatgtgacgctggagaacctggcacttatgtcctccctgggttgttggtgtggagtggaagatgaggcggcaccttctaagcagagtatttatatacaaagagagactcaggtcaggactcctatggcaggtgtgtctcccaagaaggcccacccctgtgagatgtgtggcccgatcttgggagacattttgcatgtggcagatcatcagggaacacatcacaagcagaaactgcacaggtgtgaggcctgggggaataaattgtatgacagtggaaactttcatcagcaccagaatgagcacattggagagaaaccctacagagggagtgttgaggaggcgttgtttgcgaagaggtgtaagttgcatgtgtcaggggagtcatctgtcttcagtgagagtgggaaagactttttgctcaggtcaggattactccagcaagaggccactcacactgggaagtcaaacagcaaaactgagtgtgtgtctctgtttcatgggggaaaaagccattacagctgtggaggatgcatgaaacattttagcaccaaagatatactcagtcagcacgagagactgctccctacagaagaaccttctgtgtggtgtgaatgtgggaaatcctctagcaaatatgacagcttcagtaatcatcaaggagttcacactagagaaaaaccttatacgtgtgggatatgtgggaaattatttaacagtaagtcccacctccttgtacaccagagaattcacactggagagaagccatatgagtgtgaggtttgtcagaaattttttaggcacaagtaccacctcattgcacaccagagagttcacactggagaaaggccatatgaatgcagtgattgtgggaagtcatttacccacagctctacattccgtgttcataagagagttcacactggtcagaagccttatgagtgcagtgaatgtgggaaatcttttgccgaaagctccagtctcactaaacacaggagagttcacactggagaaaagccttacgggtgcagtgaatgtgaaaaaaaatttaggcaaatctcttcacttcgtcatcatcagagagttcacaaaagaaagggctta

SEQ ID NO: 4407 - DNA, 1266 bp, Homo sapiens
  source 1..1266: mol_type = genomic DNA
atggcggagacgaaggacgcagcgcagatgttggtgaccttcaaggatgtggctgtgacctttacccgggaggagtggagacagctggacctggcccagaggaccctgtaccgagaggtgatgctggagacctgtgggcttctggtttcactagggcatcgggttcccaaaccagagttggtccacctgctagagcatgggcaggagctgtggatagtgaagagaggcctctcacatgctacctgtgcaggtgacagagcacaagttcataccagagagccaaccacttacccgccagtcttatctgagcgggcctttctccggggaagcctgactctggaatcttcaacctcaagtgattcgaggttggggagagctagggatgaggaagggcttttggaaatgcagaaaggtaaagtgacaccggagacagacctccacaaggagacccatcttgggaaagtgagccttgaaggtgaaggtttggggacagatgatggtctgcactccagggcattacaagagtggttatcagcagatgttctccatgaatgtgactcacagcaaccagggaaagacgccttgattcatgcagggacaaacccctacaaatgcaagcagtgtgggaaaggttttaacaggaagtggtatctcgttcgacatcagagggttcacactggaatgaaaccctatgaatgcaatgcatgtgggaaagcctttagccagagctcaactctcattcggcactacctcatccacaccggggagaaaccatacaagtgccttgagtgtgggaaggccttcaaacgcaggtcgtacctcatgcagcaccatccaatccacactggagagaaaccctatgagtgtagtcaatgtcgaaaggccttcacccaccggtctacttttattcgccataataggacccacactggagaaaagccctttgagtgcaaagaatgtgagaaagcctttagcaatagagcccacctaattcaacattacatcatccacactggagagaagccctatgattgcatggcatgtggaaaggccttcagatgcagctcagaactcatacagcaccagcggattcacactggggagaagccctatgaatgcacccagtgtgggaaagcctttcaccggagcacgtacctcattcagcactctgtcatccacactggggagatgccctacaagtgtatcgagtgtgggaaggccttcaaacgcaggtcacaccttctgcagcaccaaagggtccataca

SEQ ID NO: 4408 - DNA, 2010 bp, Homo sapiens
  source 1..2010: mol_type = genomic DNA
atgcccgccccggtcggccgccgctccccgcctagtccacggagctcaatggcggcagtcgcgctgagggactcggctcagggtatgacctttgaggatgtggccatttatttctcccaagaagagtgggagctccttgatgagtctcagaggttcctgtactgcgatgtgatgctggagaactttgcacatgtaacatccctgggttattgccatggaatggagaatgaggcgatagcttctgagcagagtgtatctatacaggtcaggacttctaagggcaatacacccacccagaaaactcacctcagtgagattaagatgtgtgtcccagtcttgaaagacattttgcctgcggctgagcaccaaaccacatcccctgtgcaaaagtcatacttgggtagcacaagcatgagaggcttctgcttcagtgctgaccttcaccagcatcaaaagcattacaatgaagaagagccctggaaaaggaaggtggatgaggctacatttgtgaccggctgcagattccatgtgttgaattatttcacctgtggggaggccttcccagcccccacggacctactccaacacgaagccactcccagtggtgaggagccacacagtagcagcagcaagcatatacaggcatttttcaatgcaaaaagttattacaagtggggtgaatacagaaaagcttcaagccacaaacacacacttgttcagcatcagagtgtctgttctgaaggagggctttatgagtgtagcaaatgtgagaaagccttcacttgcaagaacacacttgttcagcaccagcaaattcacactggacaaaagatgtttgagtgtagtgaatgtgaggaatcctttagcaaaaagtgccacctaatcttacacaagataattcacactggagaaaggccttatgaatgcagtgatcgtgagaaagcctttatccataaatctgaattcattcaccaccagagacgtcacactggaggagtgcgtcatgagtgtggtgaatgtaggaaaacctttagctacaaatctaacctcattgaacaccagagagttcacactggagaaaggccttatgaatgtggcgagtgcgggaaatcctttagacaaagctctagcctttttcgacaccagagagttcactctggagaaaggccttatcagtgctgtgagtgtgggaaatcctttagacaaatcttcaatctcattcgacatagaagagttcacactggagaaatgccttatcagtgcagtgattgtgggaaatcttttagctgcaaatcggaactcattcaacaccagagaattcacagtggagaaagaccttatgaatgcagagaatgtgggaaatcctttagacaattctctaacctcattcgacaccgcagcattcacactggtgataggccttatgagtgcagtgaatgtgagaaatcctttagccgcaaatttatcctgattcaacaccaaagagttcacactggagaaagaccttatgaatgcagtgaatgtggaaaatcctttacccgcaaatctgacctcattcaacaccggagaattcatactggcacaagaccttatgagtgcagtgaatgtggcaaatcttttagacagcgctctggcctcattcagcaccggagacttcatactggagaaaggccttatgaatgtagtgaatgtggaaagtcttttagccaaagtgctagcctcattcaacaccagagagttcacactggagaaaggccttatgaatgtagtgaatgtgggaaatcctttagccagagctctagcctcattcaacaccagagaggtcacactggagaaagaccttatgagtgcagtcaatgtgggaaaccctttacccacaaatcagaccttattcagcaccaaagagttcacactggagaaaggccttatgaatgcagtgaatgtgggaaatcctttagccgcaaatctaacctcattcgacatcggagagttcacactgaagaaaggcct

SEQ ID NO: 4409 - DNA, 909 bp, Homo sapiens
  source 1..909: mol_type = genomic DNA
atggccccggctgctgacatgacttctttgccactcggtgtcaaagtggaggactccgccttcggcaagccggcggggggaggcgcgggccaggcccccagcgccgccgcggccacggcagccgccatgggcgcggacgaggagggggccaagcccaaagtgtccccttcgctcctgcccttcagcgtggaggcgctcatggccgaccacaggaagccgggggccaaggagagcgccctggcgccctccgagggcgtgcaggcggcgggtggctcggcgcagccactgggcgtcccgccggggtcgctgggagccccggacgcgccctcttcgccgcggccgctcggccatttctcggtggggggactcctcaagctgccagaagatgcgctcgtcaaagccgagagccccgagaagcccgagaggaccccgtggatgcagagcccccgcttctccccgccgccggccaggcggctgagccccccagcctgcaccctccgcaaacacaagacgaaccgtaagccgcggacgcccttcaccaccgcgcagctgctggcgctggagcgcaagttccgccagaagcagtacctgtccatcgccgagcgcgcggagttctccagctcgctcagcctcactgagacgcaggtgaagatatggttccagaaccgccgcgccaaggcaaagagactacaagaggcagagctggagaagctgaagatggccgccaagcccatgctgccaccggctgccttcggcctctccttccctctcggcggccccgcagctgtagcggccgcggcgggtgcctcgctctacggtgcctctggccccttccagcgcgccgcgctgcctgtggcgcccgtgggactctacacggcccatgtgggctacagcatgtaccacctgaca

SEQ ID NO: 4410 - DNA, 801 bp, Homo sapiens
  source 1..801: mol_type = genomic DNA
atggcttctccgtccaaaggcaatgacttgttttcgcccgacgaggagggcccagcagtggtggccggaccaggcccggggcctgggggcgccgagggggccgcggaggagcgccgcgtcaaggtctccagcctgcccttcagcgtggaggcgctcatgtccgacaagaagccgcccaaggaggcgtccccgctgccggccgaaagcgcctcggccggggccaccctgcggccactgctgctgtcggggcacggcgctcgggaagcgcacagccccgggccgctggtgaagcccttcgagaccgcctcggtcaagtcggaaaattcagaagatggagcggcgtggatgcaggaacccggccgatattcgccgccgccaagacatatgagccctaccacctgcaccctgaggaaacacaagaccaatcggaagccgcgcacgccctttaccacatcccagctcctcgccctggagcgcaagttccgtcagaaacagtacctctccattgcagagcgtgcagagttctccagctctctgaacctcacagagacccaggtcaaaatctggttccagaaccgaagggccaaggcgaaaagactgcaggaggcagaactggaaaagctgaaaatggctgcaaaacctatgctgccctccagcttcagtctccctttccccatcagctcgcccctgcaggcagcgtccatatatggagcatcctacccgttccatagacctgtgcttcccatcccgcctgtgggactctatgccacgccagtgggatatggcatgtaccacctgtcc

SEQ ID NO: 4411 - DNA, 402 bp, Homo sapiens
  source 1..402: mol_type = genomic DNA
atggcttctccgtccaaaggcaatgacttgttttcgcccgacgaggagggcccagcagtggtggccggaccaggcccggggcctgggggcgccgagggggccgcggaggagcgccgcgtcaaggtctccagcctgcccttcagcgtggaggcgctcatgtccgacaagaagccgcccaaggaggcgtccccgctgccggccgaaagcgcctcggccggggccaccctgcggccactgctgctgtcggggcacggcgctcgggaagcgcacagccccgggccgctggtgaagcccttcgagaccgcctcggtcaagtcggaaaattcagaagatggagcggcgtggatgcaggaacccggccgatattcgccgccgccaagtgagtgcgcgccggggcaggag

SEQ ID NO: 4412 - DNA, 3819 bp, Homo sapiens
  source 1..3819: mol_type = genomic DNA
atgaagcggcgtttggatgaccaggagtcaccggtgtatgcagcccagcagcgtcggatccctggcagcacagaggcttttcctcaccagcaccgggtgcttgcccctgcccctcctgtgtatgaagcagtgtctgagaccatgcagtcagctacgggaattcagtactctgtaacacccagctaccaggtttcagccatgccacagagctccggcagtcatgggcccgctatagcagcagttcatagcagccatcatcacccaacagcggtgcagccccacggaggccaggtggtccagagtcatgctcatccagccccaccagttgcaccagtgcagggacagcagcaatttcagaggctgaaggtggaggatgcgctatcttatcttgaccaggtgaagctgcagtttggtagtcagcctcaggtctacaatgatttccttgacatcatgaaggaatttaaatctcagagcatcgacaccccaggagtgattagtcgtgtgtcccagctattcaaaggccaccccgatctgataatgggattcaacaccttcttgccccctggctacaaaattgaggtgcaaaccaatgacatggtgaatgtgacaactcctggccaggttcatcagattcccacccatggcatccagccacagcctcaaccaccaccccaacatccttcccagccttcagcccagtcagccccagctcctgcccagccagctcctcagcccccacctgccaaagtcagcaagccctcccaactgcaagcacatactccggccagtcagcagactcccccacttccaccgtatgcatccccacgttctccgccggtccagcctcacacaccagtgacaatctcgttgggaacggccccatccttgcagaacaatcaacctgtggagtttaatcatgccatcaactatgttaataagatcaagaacagatttcagggccaaccagacatctacaaagcattcctggagattttgcacacatatcagaaagagcagagaaatgccaaggaagctggaggaaactacactccagcattgacagagcaggaggtgtatgcccaggttgctcgtctctttaaaaaccaggaagatttgttgtcagagtttggacaattcctaccagatgccaacagctccgtgcttttaagcaaaacaactgctgagaaggttgattctgtgagaaatgatcatggaggcactgtcaagaagccccaactgaacaacaagccgcagaggcccagccagaatggctgccagatccgcagacatcctacaggaaccacccctccagttaagaagaaacccaaactgctcaatctgaaggattcttctatggcagatgccagcaaacatggtggtggaacagaatcgttattttttgataaggtccgaaaggctcttcggagtgcagaagcctacgaaaatttcctacgctgtcttgttatttttaaccaggaggtgatctctcgtgctgagcttgtgcaactagtctctcctttcctggggaaattccctgagttgtttaattggtttaaaaactttctgggctataaggagtctgtacatctggaaacttatccaaaggagcgagccacagagggcattgctatggagatagattatgcttcttgtaaacgattgggctccagctatcgagccttaccaaagagttaccagcagcccaagtgtacaggacggactcctctctgtaaagaggttttaaatgatacctgggtttccttcccttcgtggtctgaggactctacctttgtgagttccaagaagactcaatatgaagaacatatttatcgttgtgaagatgaacgctttgagcttgatgtagttttagagaccaatctggcaacaatccgggttctggaagcaatacagaagaagctttcccgcttgtctgctgaagaacaagccaaatttcgcttggacaacacccttgggggcacatcagaagtcatccatagaaaagcactccagaggatatatgctgataaagcagctgacatcattgatggtctgagaaagaatccctccattgctgttccaattgtccttaaaaggttgaagatgaaagaggaagaatggcgagaagctcagagaggctttaacaaagtatggcgagaacaaaatgagaaatactacttgaagtctctggaccaccaggggatcaactttaaacagaatgacaccaaggtcctgaggtctaagagcttactcaatgagattgagagtatctatgatgagaggcaagagcaggctacggaggagaatgctggtgtacctgttggcccacacctctcacttgcgtatgaagacaaacaaatactggaagatgctgctgctctgattatccaccatgtgaagaggcagacaggcattcagaaggaggacaaatataagataaaacaaatcatgcatcattttattccagatttgctctttgcccaaagaggtgatctctcagatgtggaggaagaggaagaagaagagatggatgtagatgaagccacaggggcagttaagaagcacaatggtgttgggggcagtccccctaagtccaagttactgtttagtaacacagcagctcaaaaattaagaggaatggatgaagtatacaacctcttctatgtcaacaacaactggtatatttttatgcgactgcaccagattctctgcctgaggctgctacggatttgttcccaagccgaacggcaaattgaagaagaaaaccgagagagagaatgggaacgggaagtgctgggcataaagcgagacaagagtgacagccctgccattcagctacgtctcaaagaacctatggatgttgatgtagaagattattacccagctttcctggacatggtgcggagcctgctggatggcaacatagactcatcacagtatgaagattcactgagagagatgttcaccattcatgcctacattgcctttaccatggacaaactgatccagagcattgtcagacagctgcagcatatcgtgagtgatgagatctgtgtgcaggtgactgacctttacctggcagaaaataataatggggccaccggaggccagctgaacacacagaactcaaggagcctcctggagtcaacgtatcagcggaaagctgagcagctaatgtcagatgagaattgctttaagcttatgtttattcagagccaaggccaggtccagctgactattgagcttctggacacagaagaggagaattcggatgaccctgtggaagcagagcgctggtcagactacgtggagcgatacatgaattcagatactacctcgcctgagcttcgtgaacatctagcacagaaaccagtatttctccccaggaatctacggcggatccggaagtgtcaacgtggtcgagagcagcaggaaaaggaagggaaggaaggaaacagcaagaagaccatggagaatgtggatagtctggataagctggagtgtagattcaagctgaattcctacaagatggtgtatgtgatcaaatcagaggactatatgtatcggaggaccgccctgctccgggctcatcagtcccatgagcgtgtaagcaagcgtctacatcagagattccaggcctgggtagataaatggaccaaggagcatgtgccccgtgaaatggcagcagagaccagcaagtggctcatgggtgaggggctggagggcctggtgccctgtaccaccacctgtgatacagagaccctgcattttgtgagcattaacaagtatcgtgtcaaatacggcacagtattcaaagcccct

SEQ ID NO: 4413 - DNA, 1662 bp, Homo sapiens
  source 1..1662: mol_type = genomic DNA
atgggaccactgacatttagggatgtgaaaatagaattctctctagaggaatggcaatgcctggacactgcgcagcggaatttatatagagatgtgatgttagagaactacagaaacctggtcttccttgttatgtgttctcattttgcccaagatgtttggccagagcacagcataaaagattctttccaaaaagtgatactgagaacatatggaaaatatggacatgagaatttacagctaagaaaagaccataaaagtgtggatgcatgtaaggtgtacaaaggaggttataatggacttaaccagtgtttgacaactactgacagcaagatatttcagtgtgataaatatgtgaaagtctttcataaatttccaaatgtaaatagaaataagataagacatactggaaagaaacctttcaaatgtaaaaaccgtggcaaatcattttgcatgctttcacaattaactcaacataagaaaattcatactagagagtattcttacaaatgtgaagaatgtggtaaagcctttaactggtcctcaacccttactaaacataagataattcatactggagaaaaaccctacaaatgtgaagaatgtggcaaagcttttaaccggtcctcaaatcttactaaacataaaataattcatactggagagaaaccctacaaatgtgaagaatgtggcaaagcttttaaccggtcctcaacccttactaaacataaaagaattcatacagaagagaaaccctacaaatgtgaagaatgtggcaaggcctttaaccagttctcgattcttaataaacataagagaattcatatggaagataaaccctacaaatgtgaagaatgtggcaaagcctttagagtattctcaattcttaaaaaacataagataatccatactggggaaaaaccatacaaatgtgaagaatgtggcaaagcctttaaccagttctcaaaccttactaaacataagataattcatactggagagaaaccctacaaatgtgatgaatgtggcaaagcctttaaccagtcctcaacccttactaaacataaaagaattcatacgggagaaaaaccctacaaatgtgaagaatgtggcaaagcttttaaacagtcctcaacccttactgaacataagataattcatactggagagaaaccctacaaatgtgaaaaatgtggcaaggcctttagctggtcctcagcttttactaaacataagagaaatcatatggaagataaaccctacaaatgtgaagaatgtggcaaagcctttagtgtattctcaacccttactaaacataaaataattcatactagagaaaaaccctacaaatgtgaagaatgtggcaaagcctttaaccagtcctcaatttttactaaacataagataattcacactgaagggaaatcctacaaatgtgaaaaatgtggcaatgcttttaaccagtcctcaaaccttactgcacgtaagataatttatactggagagaaaccctacaaatatgaagaatgtgacaaagcctttaacaagttctcaacccttattacacatcagataatttatactggagagaaaccctgcaaacatgaatgtggcagagcctttaacaaatcctcaaattatactaaagagaaactacaaacc

SEQ ID NO: 4414 - DNA, 1530 bp, Homo sapiens
  source 1..1530: mol_type = genomic DNA
atgtgttctcattttgcccaagatgtttggccagagcacagcataaaagattctttccaaaaagtgatactgagaacatatggaaaatatggacatgagaatttacagctaagaaaagaccataaaagtgtggatgcatgtaaggtgtacaaaggaggttataatggacttaaccagtgtttgacaactactgacagcaagatatttcagtgtgataaatatgtgaaagtctttcataaatttccaaatgtaaatagaaataagataagacatactggaaagaaacctttcaaatgtaaaaaccgtggcaaatcattttgcatgctttcacaattaactcaacataagaaaattcatactagagagtattcttacaaatgtgaagaatgtggtaaagcctttaactggtcctcaacccttactaaacataagataattcatactggagaaaaaccctacaaatgtgaagaatgtggcaaagcttttaaccggtcctcaaatcttactaaacataaaataattcatactggagagaaaccctacaaatgtgaagaatgtggcaaagcttttaaccggtcctcaacccttactaaacataaaagaattcatacagaagagaaaccctacaaatgtgaagaatgtggcaaggcctttaaccagttctcgattcttaataaacataagagaattcatatggaagataaaccctacaaatgtgaagaatgtggcaaagcctttagagtattctcaattcttaaaaaacataagataatccatactggggaaaaaccatacaaatgtgaagaatgtggcaaagcctttaaccagttctcaaaccttactaaacataagataattcatactggagagaaaccctacaaatgtgatgaatgtggcaaagcctttaaccagtcctcaacccttactaaacataaaagaattcatacgggagaaaaaccctacaaatgtgaagaatgtggcaaagcttttaaacagtcctcaacccttactgaacataagataattcatactggagagaaaccctacaaatgtgaaaaatgtggcaaggcctttagctggtcctcagcttttactaaacataagagaaatcatatggaagataaaccctacaaatgtgaagaatgtggcaaagcctttagtgtattctcaacccttactaaacataaaataattcatactagagaaaaaccctacaaatgtgaagaatgtggcaaagcctttaaccagtcctcaatttttactaaacataagataattcacactgaagggaaatcctacaaatgtgaaaaatgtggcaatgcttttaaccagtcctcaaaccttactgcacgtaagataatttatactggagagaaaccctacaaatatgaagaatgtgacaaagcctttaacaagttctcaacccttattacacatcagataatttatactggagagaaaccctgcaaacatgaatgtggcagagcctttaacaaatcctcaaattatactaaagagaaactacaaacc

SEQ ID NO: 4415 - DNA, 1551 bp, Homo sapiens
  source 1..1551: mol_type = genomic DNA
atggtagacaaaaccccagttatgtgttctcattttgcccaagatgtttggccagagcacagcataaaagattctttccaaaaagtgatactgagaacatatggaaaatatggacatgagaatttacagctaagaaaagaccataaaagtgtggatgcatgtaaggtgtacaaaggaggttataatggacttaaccagtgtttgacaactactgacagcaagatatttcagtgtgataaatatgtgaaagtctttcataaatttccaaatgtaaatagaaataagataagacatactggaaagaaacctttcaaatgtaaaaaccgtggcaaatcattttgcatgctttcacaattaactcaacataagaaaattcatactagagagtattcttacaaatgtgaagaatgtggtaaagcctttaactggtcctcaacccttactaaacataagataattcatactggagaaaaaccctacaaatgtgaagaatgtggcaaagcttttaaccggtcctcaaatcttactaaacataaaataattcatactggagagaaaccctacaaatgtgaagaatgtggcaaagcttttaaccggtcctcaacccttactaaacataaaagaattcatacagaagagaaaccctacaaatgtgaagaatgtggcaaggcctttaaccagttctcgattcttaataaacataagagaattcatatggaagataaaccctacaaatgtgaagaatgtggcaaagcctttagagtattctcaattcttaaaaaacataagataatccatactggggaaaaaccatacaaatgtgaagaatgtggcaaagcctttaaccagttctcaaaccttactaaacataagataattcatactggagagaaaccctacaaatgtgatgaatgtggcaaagcctttaaccagtcctcaacccttactaaacataaaagaattcatacgggagaaaaaccctacaaatgtgaagaatgtggcaaagcttttaaacagtcctcaacccttactgaacataagataattcatactggagagaaaccctacaaatgtgaaaaatgtggcaaggcctttagctggtcctcagcttttactaaacataagagaaatcatatggaagataaaccctacaaatgtgaagaatgtggcaaagcctttagtgtattctcaacccttactaaacataaaataattcatactagagaaaaaccctacaaatgtgaagaatgtggcaaagcctttaaccagtcctcaatttttactaaacataagataattcacactgaagggaaatcctacaaatgtgaaaaatgtggcaatgcttttaaccagtcctcaaaccttactgcacgtaagataatttatactggagagaaaccctacaaatatgaagaatgtgacaaagcctttaacaagttctcaacccttattacacatcagataatttatactggagagaaaccctgcaaacatgaatgtggcagagcctttaacaaatcctcaaattatactaaagagaaactacaaacc

SEQ ID NO: 4416 - DNA, 1758 bp, Homo sapiens
  source 1..1758: mol_type = genomic DNA
atgggaccactgacatttagggatgtgaaaatagaattctctctagaggaatggcaatgcctggacactgcgcagcggaatttatatagagatgtgatgttagagaactacagaaacctggtcttccttggtattgctgtctctaagccagacctgatcacctggctggagcaaggaaaagagccctggaatctgaagagacatgagatggtagacaaaaccccagttatgtgttctcattttgcccaagatgtttggccagagcacagcataaaagattctttccaaaaagtgatactgagaacatatggaaaatatggacatgagaatttacagctaagaaaagaccataaaagtgtggatgcatgtaaggtgtacaaaggaggttataatggacttaaccagtgtttgacaactactgacagcaagatatttcagtgtgataaatatgtgaaagtctttcataaatttccaaatgtaaatagaaataagataagacatactggaaagaaacctttcaaatgtaaaaaccgtggcaaatcattttgcatgctttcacaattaactcaacataagaaaattcatactagagagtattcttacaaatgtgaagaatgtggtaaagcctttaactggtcctcaacccttactaaacataagataattcatactggagaaaaaccctacaaatgtgaagaatgtggcaaagcttttaaccggtcctcaaatcttactaaacataaaataattcatactggagagaaaccctacaaatgtgaagaatgtggcaaagcttttaaccggtcctcaacccttactaaacataaaagaattcatacagaagagaaaccctacaaatgtgaagaatgtggcaaggcctttaaccagttctcgattcttaataaacataagagaattcatatggaagataaaccctacaaatgtgaagaatgtggcaaagcctttagagtattctcaattcttaaaaaacataagataatccatactggggaaaaaccatacaaatgtgaagaatgtggcaaagcctttaaccagttctcaaaccttactaaacataagataattcatactggagagaaaccctacaaatgtgatgaatgtggcaaagcctttaaccagtcctcaacccttactaaacataaaagaattcatacgggagaaaaaccctacaaatgtgaagaatgtggcaaagcttttaaacagtcctcaacccttactgaacataagataattcatactggagagaaaccctacaaatgtgaaaaatgtggcaaggcctttagctggtcctcagcttttactaaacataagagaaatcatatggaagataaaccctacaaatgtgaagaatgtggcaaagcctttagtgtattctcaacccttactaaacataaaataattcatactagagaaaaaccctacaaatgtgaagaatgtggcaaagcctttaaccagtcctcaatttttactaaacataagataattcacactgaagggaaatcctacaaatgtgaaaaatgtggcaatgcttttaaccagtcctcaaaccttactgcacgtaagataatttatactggagagaaaccctacaaatatgaagaatgtgacaaagcctttaacaagttctcaacccttattacacatcagataatttatactggagagaaaccctgcaaacatgaatgtggcagagcctttaacaaatcctcaaattatactaaagagaaactacaaacc

SEQ ID NO: 4417 - DNA, 876 bp, Homo sapiens
  source 1..876: mol_type = genomic DNA
atggaagagctcacggcttttgtatccaagtcttttgaccagaaaagcaaggacggtaacggcggaggcggaggcggcggaggtaagaaggattccattacgtaccgggaagttttggagagcggactggcgcgctcccgggagctggggacgtcggattccagcctccaggacatcacggagggcggcggccactgcccggtgcatttgttcaaggaccacgtagacaatgacaaggagaaactgaaagaattcggcaccgcgagagtggcagaagggatttatgaatgcaaagagaagcgcgaggacgtgaagtcggaggacgaggacgggcagaccaagctgaaacagaggcgcagccgcaccaacttcacgctggagcagctgaacgagctcgagcgactcttcgacgagacccattaccccgacgccttcatgcgcgaggagctcagccagcgcctggggctctccgaggcgcgcgtgcaggtttggttccagaaccggagagccaagtgccgcaaacaagagaatcagatgcataaaggcgtcatcttgggcacagccaaccacctagacgcctgccgagtggcaccctacgtcaacatgggagccttacggatgcctttccaacaggtccaggctcagctgcagctggaaggcgtggcccacgcgcacccgcacctgcacccgcacctggcggcgcacgcgccctacctgatgttccccccgccgcccttcgggctgcccatcgcgtcgctggccgagtccgcctcggccgccgccgtggtcgccgccgccgccaaaagcaacagcaagaattccagcatcgccgacctgcggctcaaggcgcggaagcacgcggaggccctggggctc

SEQ ID NO: 4418 - DNA, 675 bp, Homo sapiens
  source 1..675: mol_type = genomic DNA
atggaagagctcacggcttttgtatccaagtcttttgaccagaaaagcaaggacggtaacggcggaggcggaggcggcggaggtaagaaggattccattacgtaccgggaagttttggagagcggactggcgcgctcccgggagctggggacgtcggattccagcctccaggacatcacggagggcggcggccactgcccggtgcatttgttcaaggaccacgtagacaatgacaaggagaaactgaaagaattcggcaccgcgagagtggcagaagggatttatgaatgcaaagagaagcgcgaggacgtgaagtcggaggacgaggacgggcagaccaagctgaaacagaggcgcagccgcaccaacttcacgctggagcagctgaacgagctcgagcgactcttcgacgagacccattaccccgacgccttcatgcgcgaggagctcagccagcgcctggggctctccgaggcgcgcgtgcaggtttggttccagaaccggagagccaagtgccgcaaacaagagaatcagatgcataaaggcgtcatcttgggcacagccaaccacctagacgcctgccgagtggcaccctacgtcaacatgggagccttacggatgcctttccaacagatggagttttgctcttgtcgcccgggctggagtataatggca

SEQ ID NO: 4419 - DNA, 1185 bp, Homo sapiens
  source 1..1185: mol_type = genomic DNA
atggatgaagaacctgaaagaactaagcgatgggaaggaggctatgaaagaacatgggagattcttaaagaagatgaatctggatcacttaaagctacaatagaagacattctattcaaggcaaagagaaaaagagtatttgagcaccatggacaagttcgacttggaatgatgcgccacctttatgtggtagtagatggatcaagaacaatggaagaccaagatttaaagcctaatagactgacgtgtactttaaagttgttggaatactttgtagaggaatattttgatcaaaatcctattagtcagattggaataattgtaactaagagtaaaagagctgaaaaattgactgaactttcaggaaacccaagaaaacatataacgtctttgaagaaagctgtggatatgacctgccatggagagccatctctttataattccctaagcatagctatgcagactctaaaacacatgcctggacatacaagtcgagaagtactaatcatctttagcagccttacaacttgcgatccatctaatatttatgatctaatcaagaccctaaaggcagctaaaattagagtatctgttattggattgtctgcagaagttcgcgtttgcactgtacttgctcgtgaaactggtggcacgtaccatgttattttagatgaaagccattacaaagagttgctcacacatcatgttagtcctcctcctgctagctcaagttctgaatgctcacttattcgtatgggatttcctcagcacaccattgcttctttatctgaccaggatgcaaaaccctctttcagcatggcgcatttggatggcaatactgagccagggcttacattaggaggctatttctgcccacagtgtcgggcaaagtactgtgagctacctgttgagtgtaaaatctgtggtcttactttggtgtctgctccccacttggcacggtcttaccatcatttgtttcctttggatgcttttcaagaaattcccctagaagaatataatggagaaagattttgttatggatgtcagggggaattgaaagaccaacatgtttatgtttgtgctgtgtgccaaaatgttttctgtgtggactgtgatgtttttgttcatgattctctacactgttgccctggctgtattcataagattccagctccttcaggtgtt

SEQ ID NO: 4420 - DNA, 1644 bp, Homo sapiens
  source 1..1644: mol_type = genomic DNA
atggcaacctcatctgaagaagttttgctgattgtaaagaaagtgcgtcaaaagaagcaggatggagctctgtacctcatggcagaaagaattgcttgggcacctgaaggcaaagatagatttacaatcagccatatgtatgcagatattaaatgccagaaaattagtccagaaggaaaagctaaaattcagcttcagctggtcctacatgcaggggacacaactaacttccatttttccaatgaaagcacagcagtgaaagagcgagatgcagtaaaagaccttcttcagcagctgctgcccaaattcaagaggaaagcaaataaagaactggaagagaagaacagaatgctgcaagaagatcctgttttgtttcagctttataaagaccttgttgtgagtcaagtgatcagtgctgaggaattctgggccaatcgtttaaatgtgaatgcaacagatagttcttccacatccaatcataagcaggatgttggcatttctgctgcatttctggctgatgtccggccccaaactgatggctgtaacggtctaagatataatttaacttctgatatcattgagtccatatttaggacctatccagcagtaaaaatgaaatatgcagaaaatgttccccacaacatgacagagaaggaattctggacacgttttttccagtcccattattttcacagggatcggctgaatacagggtcaaaggatctctttgcagaatgtgccaaaatagatgaaaaaggcctaaaaacaatggtttcattaggagtgaaaaacccactactagatttaacagctttggaagataaaccattagatgagggctatggcatttcctctgtgccatctgcttccaattctaaatccataaaagagaatagtaatgctgccatcatcaagagatttaaccatcacagtgccatggtcctggcagctggactcagaaaacaagaagcacaaaatgaacaaactagtgagcccagcaacatggatggaaattccggagatgcagactgctttcagccagcagtcaaaagggcgaaattacaagagtccattgaatatgaagacttggggaaaaataattctgtaaaaacgattgcactaaacctcaagaagtcagataggtattatcatggtccaactccaatccagtcactacagtatgcaacaagtcaggacattattaattcttttcaaagtattagacaagaaatggaagcttatacacccaagttaactcaggttctctcaagtagtgctgccagtagtaccatcacagcactgtcacctggaggggcacttatgcagggaggaacacagcaagccataaaccagatggtgccaaatgatattcaatctgaattgaaacacttatatgtagctgttggagaacttctacgacatttctggtcctgctttcctgttaatacgccattcctagaagaaaaggtagtgaaaatgaaaagtaatttggaacgattccaagttacgaagctctgtccattccaagaaaagattcggagacagtatttaagcacaaatttggtaagtcacatagaagagatgctccagacagcctacaacaagctccacacatggcagtcacggcgtctgatgaagaaaacg

SEQ ID NO: 4421 - DNA, 1860 bp, Homo sapiens
  source 1..1860: mol_type = genomic DNA
atgggaccattgcaatttagagatgtggccatagaattctctctggaggagtggcattgcctggacactgcacagcggaatctatataggaatgtgatgttagagaactacagtaacctggtcttccttggtattgttgtctctaagccagacctgatcgcccatctggagcaaggaaaaaaacctttgactatgaagagacatgagatggtagccaacccctcagttatatgttctcattttgcccaagatctttggccagagcagaacataaaagattctttccaaaaagtgatactgagaagatatgaaaaacgtggacatggaaatttacagttaataaaaaggtgtgaaagtgtagatgagtgtaaggtgcacacaggaggttataatggacttaaccagtgtagtacaactacccagagcaaagtatttcaatgtgataaatatgggaaagtctttcataaattttcaaattcaaatagacataatataagacatactgaaaaaaaacctttcaaatgcatagaatgtggcaaagcttttaaccagttctcaacccttataacacataagaaaattcatactggagagaaaccctacatttgtgaagaatgtggcaaagcctttaagtactcctctgcccttaatacacataagagaattcatactggagagaaaccatacaagtgtgataaatgtgacaaagcctttattgcatcctcaacccttagtaaacatgagatcattcatactggaaagaaaccctacaagtgtgaagaatgtggcaaagcttttaaccaatcctcgacacttactaaacataagaaaattcatactggagagaaaccctacaaatgtgaagaatgtggcaaagcttttaaccaatcctcaacacttactaaacataagaaaattcatactggagagaagccctacgtttgtgaagaatgtggcaaagcctttaagtactcccgtatccttactacacataagagaattcatactggagagaaaccatacaagtgtaataaatgtggcaaagcctttattgcatcctcaacccttagtagacatgagttcattcatatgggaaagaaacattacaaatgtgaagaatgtggcaaagccttcatttggtcctcagtcctaactagacataagagagttcatactggagagaagccctacaaatgtgaagaatgtggcaaagcctttaagtactcctctacccttagttcacataagagaagtcatactggagagaaaccctacaaatgtgaagaatgtggcaaagcctttgttgcatcctcaacccttagtaaacatgagatcattcatactggaaagaaaccctacaagtgtgaagaatgtggcaaagcttttaaccagtcctcatcccttactaaacataagaaaattcatactggagagaaaccctacaaatgtgaagaatgtggcaaagcttttaaccagtcctcttcccttactaaacataagaaaattcatactggagagaaaccctacaaatgtgaagaatgtggcaaagcttttaaccagtcctcaacccttattaaacataagaaaattcatactagagagaaaccctacaaatgtgaagaatgtggcaaagcttttcacctatccacacaccttactacacataagatacttcatactggagagaaaccttatagatgtagagaatgtggcaaagcttttaaccattctgcaaccctttcttcacataagaaaatccattctggagagaaaccatacgagtgtgataaatgtggcaaagcctttatttcaccctcaagccttagtagacatgagataattcatactggggagaaaccc

SEQ ID NO: 4422 - DNA, 1551 bp, Homo sapiens
  source 1..1551: mol_type = genomic DNA
atgatagaaagtgacacctcatccataatgtcaggaattattcgaaactcagggcaaaatcaccacccctctccacaggaatacaggcttctagccaccaccagcgatgatgaccttcccggggacctgcagtcgctgtcgtggctcacggcggtggatgtgcctcggctgcagcagatggcaagtggccgcgtggacctgggtggcccctgcgtgccacatccacacccaggtgccttggctggggtggccgacctgcatgtgggagccactccaagtccccttctccatggcccagcaggcatggccccccgaggcatgccaggtctgggccccataactggccacagagacagcatgagccagttccccgtggggggccagccctcatctggcctgcaggacccgccgcatctgtactcacctgccacccaaccacagttcccgctccccccgggtgcccagcagtgccctcctgtgggcctctatggccccccatttggggtgcggcccccctacccccagccccacgtggctgtgcattcatctcaagaactgcaccccaaacactaccccaagcccatctactcgtacagctgtctgatcgccatggccctgaagaacagcaagacaggcagcctgcctgtgagcgagatctacagcttcatgaaggagcacttcccctacttcaagacggcccccgacgggtggaagaactcggtgcggcacaacctgtctctgaacaagtgcttcgagaaggtggagaacaagatgagcggctcctcccgcaagggctgcctgtgggctctgaacctggcccgcatcgacaagatggaggaggagatgcacaagtggaagaggaaggacctggctgccatccaccggagtatggccaaccctgaggagttggacaagctgatctccgaccggcctgaaagctgccggcgccccggcaaaccgggggaaccagaggcccccgtgctgactcacgccaccacagtggccgtggcgcatggctgcctggctgtctcccagctcccaccccagccactgatgaccctgtccctgcagtcagtccccctgcaccaccaggtccagccccaggcacatcttgctccagactctccagcaccagcccagaccccgccactgcacgccctgccggacctcagccccagcccgctcccccaccccgccatgggaagggctcctgtagacttcatcaacatcagcaccgacatgaacactgaggtggatgccctcgacccgagcatcatggacttcgctctgcaggggaacctgtgggaggagatgaaggatgagggattcagcttggacacactgggcgcctttgcagactccccgcttggctgtgacctgggggcctcaggcctaacccctgcctcgggtggcagcgaccagtccttcccagacttgcaggtgacgggtctctacacagcgtactccactccggacagtgtggctgcatcgggcaccagctcctcctcccagtacctgggtgcacaggggaacaagcctatagccctgctt

SEQ ID NO: 4423 - DNA, 570 bp, Homo sapiens
  source 1..570: mol_type = genomic DNA
atgcccagccctgtggatgcatcctcagcagacggtggcagcgggttgggttcccaccggagaaagcggaccaccttcagcaaagggcagctactggagctggagagggcgtttgcagcatggccctaccccaacatcagcacccatgagcacctggcctgggtcacttgccttcctgaggccaaggtacaggtgtggttccagaagcgctgggccaaaataatcaagaacaggaagtcaggaattctaagccctgggtctgagtgcccccagagctcctgttctcttccagacaccctccagcagccctgggatccccaaatgccaggccaacctccaccctccagcggcacacctcagcgcacctcagtgtgtcgacatagctcctgtccagctcctggcttgagtccacggcagggctgggaaggggctaaagctgtagccccatggggatcagctggggcttcagaggtccacccttctttagagcgagctactccccagacttcactaggcagcctgtctgacctcatctatgccttggccattgtcgtcaatgtggaccactcc

SEQ ID NO: 4424 - DNA, 2307 bp, Homo sapiens
  source 1..2307: mol_type = genomic DNA
atgccagctaattggacctcacctcagaaatcctcagccctggctccagaggatcatggcagctcctatgagggatcagtgtccttcagggatgtggctatcgatttcagcagagaggaatggcggcacctggacccttctcagagaaacctgtaccgggatgtgatgctggagacctacagccacctgctctcagtaggatatcaagttcctgaagcagaggtggtcatgttggagcaaggaaaggaaccatgggcactgcagggtgagaggccacgtcagagctgcccaggagagaaattatgggaccataatcaatgtagaaaaatcctcagttataaacaagtatcctctcaacctcaaaaaatgtatcctggggagaaagcttatgaatgcgccaaatttgaaaagatattcacccagaagtcacagctcaaagtacacctgaaagttcttgcaggagaaaagctctatgtatgcattgaatgtgggaaggcttttgtacagaagccagaatttattatacaccagaaaacccatatgagagagaaaccctttaaatgcaatgaatgtggaaaatccttttttcaagtgtcgtccctcttcaggcatcagagaattcataccggagagaaactctatgaatgcagccagtgtgggaaaggcttctcttataactcagatctcagtatacatgagaaaattcatactggagagagacaccatgaatgcactgactgtggcaaagcattcacacaaaagtccacactcaagatgcatcagaaaatccatacaggcgagagatcctacatctgtattgaatgcggacaggccttcatccagaagacccatttgattgcacaccgaagaattcatactggagaaaaaccatatgagtgcagtaactgtggcaaatccttcatttccaagtcacaacttcaggtacatcaacgtgttcacacaagagtgaagccctatatatgtaccgaatatgggaaggtcttcagcaataattccaacctcgttacacataagaaagttcaaagtagagagaaatcttccatatgtactgagtgtgggaaggcctttacctacaggtcagagttgattattcatcagagaattcacactggagagaaaccttatgaatgcagtgactgtgggaaagccttcactcagaagtcagcactcacagtgcatcagagaattcatacaggagaaaaatcgtatatatgcatgaaatgtggactggccttcattcagaaggcacacttgattgcacatcaaataattcatactggagagaaacctcataaatgtggtcactgtgggaaattgtttacctccaagtcgcaactccatgttcataaacgaattcacacaggagaaaagccctatatgtgcaataaatgtgggaaggcattcaccaaccggtcaaatctcattacacatcagaaaactcatacaggagagaaatcttatatatgttccaaatgtggaaaggccttcacccagaggtcagacttgattacacatcagagaatccatactggggagaagccttatgaatgcaatacttgtggaaaagccttcactcagaagtcacacctcaatatacatcagaaaattcacactggagagagacagtatgaatgccacgaatgtgggaaagccttcaaccagaaatcaatactcattgttcatcagaaaattcatacaggagagaaaccctatgtatgcactgagtgtggaagagctttcatccgcaagtcaaactttattactcatcaaagaattcatactggagagaagccttatgaatgcagtgactgtgggaagtcctttacctccaagtctcagctcctggtgcatcagccagttcacacaggagagaaaccctatgtgtgtgccgagtgcgggaaggcctttagtggcaggtcaaatctcagtaagcaccagaaaactcataccggagaaaagccctacatttgttctgaatgtgggaagacctttcgacagaagtcagagttgattacacatcacagaattcatactggagagaaaccttatgagtgcagtgactgtgggaagtctttcactaaaaaatcacagctccaagtgcatcagcgaattcacactggagagaagccttacgtgtgtgctgagtgtgggaaggcctttactgacaggtccaatttgaataaacatcagacaacacacactggagacaaaccctacaagtgtggcatctgtgggaaaggcttcgttcagaaatcagtgttcagcgtccatcagagcagccacgct

SEQ ID NO: 4425 - DNA, 2142 bp, Homo sapiens
  source 1..2142: mol_type = genomic DNA
atgctggagacctacagccacctgctctcagtaggatatcaagttcctgaagcagaggtggtcatgttggagcaaggaaaggaaccatgggcactgcagggtgagaggccacgtcagagctgcccaggagagaaattatgggaccataatcaatgtagaaaaatcctcagttataaacaagtatcctctcaacctcaaaaaatgtatcctggggagaaagcttatgaatgcgccaaatttgaaaagatattcacccagaagtcacagctcaaagtacacctgaaagttcttgcaggagaaaagctctatgtatgcattgaatgtgggaaggcttttgtacagaagccagaatttattatacaccagaaaacccatatgagagagaaaccctttaaatgcaatgaatgtggaaaatccttttttcaagtgtcgtccctcttcaggcatcagagaattcataccggagagaaactctatgaatgcagccagtgtgggaaaggcttctcttataactcagatctcagtatacatgagaaaattcatactggagagagacaccatgaatgcactgactgtggcaaagcattcacacaaaagtccacactcaagatgcatcagaaaatccatacaggcgagagatcctacatctgtattgaatgcggacaggccttcatccagaagacccatttgattgcacaccgaagaattcatactggagaaaaaccatatgagtgcagtaactgtggcaaatccttcatttccaagtcacaacttcaggtacatcaacgtgttcacacaagagtgaagccctatatatgtaccgaatatgggaaggtcttcagcaataattccaacctcgttacacataagaaagttcaaagtagagagaaatcttccatatgtactgagtgtgggaaggcctttacctacaggtcagagttgattattcatcagagaattcacactggagagaaaccttatgaatgcagtgactgtgggaaagccttcactcagaagtcagcactcacagtgcatcagagaattcatacaggagaaaaatcgtatatatgcatgaaatgtggactggccttcattcagaaggcacacttgattgcacatcaaataattcatactggagagaaacctcataaatgtggtcactgtgggaaattgtttacctccaagtcgcaactccatgttcataaacgaattcacacaggagaaaagccctatatgtgcaataaatgtgggaaggcattcaccaaccggtcaaatctcattacacatcagaaaactcatacaggagagaaatcttatatatgttccaaatgtggaaaggccttcacccagaggtcagacttgattacacatcagagaatccatactggggagaagccttatgaatgcaatacttgtggaaaagccttcactcagaagtcacacctcaatatacatcagaaaattcacactggagagagacagtatgaatgccacgaatgtgggaaagccttcaaccagaaatcaatactcattgttcatcagaaaattcatacaggagagaaaccctatgtatgcactgagtgtggaagagctttcatccgcaagtcaaactttattactcatcaaagaattcatactggagagaagccttatgaatgcagtgactgtgggaagtcctttacctccaagtctcagctcctggtgcatcagccagttcacacaggagagaaaccctatgtgtgtgccgagtgcgggaaggcctttagtggcaggtcaaatctcagtaagcaccagaaaactcataccggagaaaagccctacatttgttctgaatgtgggaagacctttcgacagaagtcagagttgattacacatcacagaattcatactggagagaaaccttatgagtgcagtgactgtgggaagtctttcactaaaaaatcacagctccaagtgcatcagcgaattcacactggagagaagccttacgtgtgtgctgagtgtgggaaggcctttactgacaggtccaatttgaataaacatcagacaacacacactggagacaaaccctacaagtgtggcatctgtgggaaaggcttcgttcagaaatcagtgttcagcgtccatcagagcagccacgct

SEQ ID NO: 4426 - DNA, 1944 bp, Homo sapiens
  source 1..1944: mol_type = genomic DNA
atggtgtcgctacccccgccgcagtctgacgtcacgctgccgggccccaccagactggagggcgagcgccaaggggacctcatgcaggcaccgggcctcccaggctcccctgccccacagagtaagcatgccggcttcagctgctcgtcatttgtgtccgacggccctccagagaggacaccctcactgcccccacacagcccccgcattgcgtcaccagggcccgagcaagtccagggccactgcccagccggccccggccctgggcccttcaggctctcaccctcagacaagtatcctggctttggctttgaggaggccgcagcaagcagccctgggcgattcctcaagggcagccacgcgcccttccacccgtacaagcggcctttccatgaggacgtcttcccagaggccgagaccaccctggccctcaaaggacactcctttaagaccccagggccgctggaggccttcgaggagatcccagtggacgtggcggaggccgaggccttcctgcctggcttctcagcagaggcctggtgtaacgggctcccctaccccagccaggagcatggcccccaagtcctgggttcagaggtcaaagtcaagcccccagttctggagagtggtgctgggatgttctgctaccagcctcccttgcagcatatgtactgctcctcccagccccccttccaccagtactcgccaggtggtggcagctaccccataccctacctgggctcctcacactatcagtaccagcgaatggcaccccaggccagcaccgatgggcaccagcctctcttcccaaaacccatctattcctacagcatcctcatcttcatggcccttaagaacagtaaaactgggagccttcccgtcagcgagatctacaattttatgacggagcactttccttacttcaagacagcacccgatggctggaagaattctgtccggcacaacctatccctcaacaagtgcttcgagaaggtggagaacaaatcaggaagttcctcccgcaagggctgcctgtgggccctcaatccggccaagatcgacaagatgcaagaggagctgcaaaaatggaagaggaaagatcccattgctgtgcgcaaaagcatggccaagccagaagagctggacagcctcattggagacaagagagaaaagctgggctccccactcctgggctgtccgccccctgggctgtccggctcaggccccatccggcccctggcacccccagctggcctctccccaccactgcactcactccacccagctccaggccccattcctggcaagaaccccctgcaggacctacttatggggcacacaccctcctgctatgggcagacatacttgcacctctcaccaggcctggcccctcctggacccccgcagccattgttcccacagccggacgggcaccttgagctgcgggcccagccaggcaccccccaggactcgcctctgcctgcccacaccccacccagccacagtgccaagctactggccgagccttccccagccaggactatgcacgacaccctgctgccagatggagaccttggcactgacctggatgccatcaatccctcactcactgacttcgacttccagggaaacctgtgggaacagttgaaggatgatagcttggccctcgaccccctggtactggtgacctcatccccgacatcatcttcgatgccaccaccccagccaccacctcactgcttcccccctgggccctgtctgacagagacaggcagtggggcaggtgacttggcagccccgggcagtggtggctccggggcactgggtgacctgcacctcaccaccctctactctgcctttatggagctggagcccacgccccccacggcccctgcaggcccctctgtgtacctcagccccagctccaagcccgtggccctggca

SEQ ID NO: 4427 - DNA, 1872 bp, Homo sapiens
  source 1..1872: mol_type = genomic DNA
atggggataggggtgtctttattactgcagttttctctaacacctgggggctaccggagtgtgggccgaagcaggcgctgcagccgcggaagtatccccaggaacatccccaagaggagctggaaaaagcctcatccccagctctgcagtctccaggcagaggaagaaccgatgctggaacgtcgttgcaggggccccctggccatgggcctggcccagccccgactcctttctgggccctcccaggagtcaccccagaccctggggaaggagtcccgcgggctgaggcaacaaggcacgtcagtggcccagtctggtgcccaagccccaggcagggcccatcgctgtgcccactgtcgaaggcacttccctggctgggtggctctgtggcttcacacccgccggtgccaggcccggctgcccttgccctgccctgagtgtggccgtcgctttcgccatgcccccttcttagcactgcaccgccaggtccatgctgctgccaccccagacctgggctttgcctgccacctctgtgggcagagcttccgaggctgggtggccctggttctgcatctgcgggcccattcagctgcaaagcggcccatcgcttgtcccaaatgcgagagacgcttctggcgacgaaagcagcttcgagctcatctgcggcggtgccaccctcccgccccggaggcccggcccttcatatgcggcaactgtggccggagctttgcccagtgggaccagctagttgcccacaagcgggtgcacgtagctgaggccctggaggaggccgcagccaaggctctggggccccggcccaggggccgccccgcggtgaccgccccccggcccggtggagatgccgtcgaccgccccttccagtgtgcctgttgtggcaagcgcttccggcacaagcccaacttgatcgctcaccgccgcgtgcacacgggcgagcggccccaccagtgccccgagtgcgggaagcgctttaccaataagccctatctgacttcgcaccggcgcatccacaccggcgagaagccctacccgtgcaaagagtgcggccgccgcttccggcacaaacccaacctgctgtctcacagcaagattcacaagcgatccgaggggtcggcccaggccgcccccggcccggggagcccccagctgccagccggcccccaggagtccgcggccgagcccaccccggcggtacctctgaaaccggcccaggagccgccgccaggggccccgccagagcacccgcaggacccgatcgaagcccccccctccctctacagctgcgacgactgcggcaggagcttccggctggagcgcttcctgcgggcccaccagcggcagcacaccggggagcggcccttcacctgcgccgagtgcgggaagaacttcggcaagaagacgcacctggtggcgcactcgcgcgtgcactccggcgagcggcccttcgcctgcgaggagtgcggccgccgcttctcccagggcagccatctggcggcgcatcggcgcgaccacgcccccgatcggcccttcgtgtgtcccgactgcggcaaggccttccgccacaaaccctacctggcggcgcaccggcgcatccacaccggcgagaagccctacgtctgccccgactgcggcaaagccttcagccagaagtccaacctggtgtcgcaccggcgcatccacacgggcgagcggccctacgcctgtcccgactgcgaccgcagcttcagccagaagtccaacctcatcacccaccgcaagagccacatccgggacggcgccttctgctgtgccatctgtggccagaccttcgacgacgaggagagactcctggcccaccagaagaagcacgatgtc

SEQ ID NO: 4428 - DNA, 1701 bp, Homo sapiens
  source 1..1701: mol_type = genomic DNA
atgctggaacgtcgttgcaggggccccctggccatgggcctggcccagccccgactcctttctgggccctcccaggagtcaccccagaccctggggaaggagtcccgcgggctgaggcaacaaggcacgtcagtggcccagtctggtgcccaagccccaggcagggcccatcgctgtgcccactgtcgaaggcacttccctggctgggtggctctgtggcttcacacccgccggtgccaggcccggctgcccttgccctgccctgagtgtggccgtcgctttcgccatgcccccttcttagcactgcaccgccaggtccatgctgctgccaccccagacctgggctttgcctgccacctctgtgggcagagcttccgaggctgggtggccctggttctgcatctgcgggcccattcagctgcaaagcggcccatcgcttgtcccaaatgcgagagacgcttctggcgacgaaagcagcttcgagctcatctgcggcggtgccaccctcccgccccggaggcccggcccttcatatgcggcaactgtggccggagctttgcccagtgggaccagctagttgcccacaagcgggtgcacgtagctgaggccctggaggaggccgcagccaaggctctggggccccggcccaggggccgccccgcggtgaccgccccccggcccggtggagatgccgtcgaccgccccttccagtgtgcctgttgtggcaagcgcttccggcacaagcccaacttgatcgctcaccgccgcgtgcacacgggcgagcggccccaccagtgccccgagtgcgggaagcgctttaccaataagccctatctgacttcgcaccggcgcatccacaccggcgagaagccctacccgtgcaaagagtgcggccgccgcttccggcacaaacccaacctgctgtctcacagcaagattcacaagcgatccgaggggtcggcccaggccgcccccggcccggggagcccccagctgccagccggcccccaggagtccgcggccgagcccaccccggcggtacctctgaaaccggcccaggagccgccgccaggggccccgccagagcacccgcaggacccgatcgaagcccccccctccctctacagctgcgacgactgcggcaggagcttccggctggagcgcttcctgcgggcccaccagcggcagcacaccggggagcggcccttcacctgcgccgagtgcgggaagaacttcggcaagaagacgcacctggtggcgcactcgcgcgtgcactccggcgagcggcccttcgcctgcgaggagtgcggccgccgcttctcccagggcagccatctggcggcgcatcggcgcgaccacgcccccgatcggcccttcgtgtgtcccgactgcggcaaggccttccgccacaaaccctacctggcggcgcaccggcgcatccacaccggcgagaagccctacgtctgccccgactgcggcaaagccttcagccagaagtccaacctggtgtcgcaccggcgcatccacacgggcgagcggccctacgcctgtcccgactgcgaccgcagcttcagccagaagtccaacctcatcacccaccgcaagagccacatccgggacggcgccttctgctgtgccatctgtggccagaccttcgacgacgaggagagactcctggcccaccagaagaagcacgatgtc

SEQ ID NO: 4429 - DNA, 1017 bp, Homo sapiens
  source 1..1017: mol_type = genomic DNA
atgctccccagcgcggtcgcagcccacgccggtgcgtactgggacgttgtggcttcctccgcgctcctcaacctccccgctgcgcccggctttggcaacctgggcaagagtttcctgatcgagaatttgctgcgggtcgggggcgccccaacgcccaggctgcagccgcccgcgccccacgacccggcgaccgccctggccaccgcgggcgcgcagctccggcccctgcctgctagcccagttcccctaaagctgtgccccgcagccgaacaagttagccccgccggggcgccctacggaacgcggtgggcttttcaagtgctcagtccctctgcggacagtgcgaggctgccgggccgggctccgggggaccgagactgtaccttccagccttcagcgccagcaccttccaaacctttccttctgagcaccccgccattctactcggcgtgctgcggtgggtcctgtcggcgccctgcatcctccactgcttttccaagagaagagagcatgctgcctctcctgacacaggactctaattccaaagctcggaggggcattttaagaagagctgtcttttctgaggaccagagaaaggctctggagaaaatgtttcagaaacagaaatatatcagcaaaacagaccgaaagaaacttgccatcaacttgggactaaaggaatcacaggtgaaaatttggtttcagaacaggaggatgaaatggcggaattccaaagaaaaggaagtgctttccaacaggtgtatccaagaagtaggtcttcaagaggatcccctctcacggtctgctctgggtttcccttctccatgtccttcaatatgggacgtcccccaacagcactcaagtccaagatggagggagaattctccagaaccttcagaaagactaatccaggagagttcaggggcaccacccccagaagcaaattcactgcaaggtgccttatatttatgttctgaagaagaagctggaagcaagggtgtacttactggggctgtc

SEQ ID NO: 4430 - DNA, 1029 bp, Homo sapiens
  source 1..1029: mol_type = genomic DNA
atgatgttccccggcctcctcgcgccccccgccgggtaccctagcctcctgcggcccacgcccaccttgacgctgccccagtccttgcagtcggcattttccggccactccagcttcctggtggaggatctgatccgcatcagccgaccccccgcctacctgccccgcagcgtgcccaccgccagcatgtcgccgcccaggcagggggcccccacggccctcaccgacacgggggcctcggacctgggctccccgggtcccggcagccgacggggcggctctccgccgactgccttctcccctgccagcgagacgacgtttctgaagtttggagtgaacgccatcctctcctcggggcccagaacagaaacatccccagccttgctccagagcgtccctcccaagaccttcgcctttccctacttcgaagggtcttttcagcctttcatcagatcttcttatttcccagcttcctccagcgtggtgcccatccccgggaccttctcctggccgctggccgcgcgcgggaagcctcggcggggcatgctgcgtcgagcagtcttctccgacgtgcagcggaaggcgctggagaagatgttccagaagcagaagtacatcagcaagcccgaccgcaagaagctggcggccaagctgggcctgaaagactcgcaggtgaaaatctggttccagaaccgacgcatgaaatggcggaactccaaggagcgcgaactcctgtctagcgggggctgtcgcgagcagaccctgcccaccaagctcaatccgcacccggacctcagcgacgtgggccagaagggccctgggaacgaagaggaggaggagggcccgggcagccccagccaccgcctggcctaccacgcgtcctccgacccccagcacctgcgggacccgcggctgccagggccgctgcccccctcgcccgcgcactcgagcagtcccgggaaaccttcggacttctcagattccgaggaggaagaggagggcgaggaacaggaggaaatcaccgtgtcc

SEQ ID NO: 4431 - DNA, 2592 bp, Homo sapiens
  source 1..2592: mol_type = genomic DNA
atgggatcgttgacattttgggatgtgaccatagaattcgctctggaggagtggcaatgcctggacatggctcagcagaatttatataggaatgttatgttagagaactacagaaacctggtcttcctgggtatcgctgtctctaagctagacttgataacttgtctgaagcaagggaaagagccttggaatatgaagagacatgagatggtaactaaacccccagttattagttctcattttacacaagacttttggccagatcagagcataaaagattctttccaagaaataatattgagaacatatgcaagatgtggacataagaatttacgattaagaaaagattgtgaaagtgtcaatgagggtaagatgcacgaagaagcttataataaacttaaccaatgttggacaactacccagggaaaaatatttcagtgtaacaaatatgtgaaagtctttcataaatattcaaattcaaatagatataagattagacacactaaaaagaaaactttcaaatgtatgaaatgtagcaaatcatttttcatgctttcacacttaattcaacataagagaattcatactagagagaatatctacaaatgtgaagaacgtggcaaagcctttaaatggttctcaacccttattaaacataagataattcatactgaagacaaaccctacaaatataagaaatgtggcaaagcttttaacatctcttcaatgttcactaaatgtaagataattcatactggaaagaaaccctgcaaatgtgaagaatgtggcaaagtttttaacaattcctcaacccttatgaaacataagataattcatactgggaagaaaccatataaatgtgaagaatgtggcaaagcttttaagcaatcctcacaccttactagacataaagcaattcatactggagagaaaccctacaaatgcgaagaatgtggcaaagcttttaaccatttctcagcccttagaaaacatcagataattcatactggaaagaaaccctacaaatgtgaagaatgtggcaaagcttttagccagtcctcaacccttagaaaacatgagataattcatactgaagagaaaccctacaaatatgaagaatgcggcaaagcttttagcaatttgtcagcccttagaaaacatgagataattcatactggacagaaaccctacaaatgtgaagaatgtggtaaagcttttaagtggtcctcaaaacttactgtacataaggtaattcatactgcagagaaaccctgcaaatgtgaagaatgtggcaaagcttttaagcgtttctcagcccttagaaaacataagataattcatactggaaagcaaccctacaaatgtgaagaatgcagcaaagcttttagcaatttttcagcccttagaaaacatgagataattcatactggagagaaaccctacaaatgtgaagaatgtggtaaagcttttaagtggtcctcaaaacttactgtacataaggtaattcatatggaagagaaaccttgcaaatgtgaagaatgtggcaaagcttttaagcatttctcagcccttagaaaacataagataattcatactggaaagaaaccctacaaatgtgaagaatgtggcaaagcttttaacaattcctcaacccttatgaaacataagataattcatactgggaagaaaccatacaaatgtgaagaatgtggcaaagcttttaagcaatcttcacatcttactagacataaagcaattcatactggggagaaaccctacaaatgtgaagaatgtggcaaagcttttaaccacttctcagcccttagaaaacatcagataattcatactggaaagaaaccctacaaatgtgaagaatgtggcaaagcttttagccagtcctcaacccttagaaaacatgagataattcatactggagagaaaccctacaaatgtgaagaatgtggtaaagcttttaagtggtcctcacaccttactagacataaagtaattcatactgaagagaaaccctacaaatgtgaagaatgtggcaaggcttttaaccatttctcagcccttaggaaacataagataattcatactggaaagaaaccctacaaatgtgaagaatgtggcaaagcttttagccagtcctcaactcttagaaaacatgagataattcatactggagagaaaccctacaaatgtgaagaatgtggtaaagcttttaagtggtcctcaaaacttactgtacataaggtaattcatactgcagagaaaccctgcaaatgtgaagaatgtggcaaagcttttaagcatttctcagcccttagaaaacataagataattcatactggaaagaaaccctataaatgtgaagaatgtggcaaagcttttaacaattcctcaacccttagaaaacatgagataattcatactggagagaaatcctacaaatgtgaagaatgtggtaaagcttttcagtggtcctcaaaacttactttacataaggtaattcatatggagagaaaccctgcaaatgtgaagaatgtggcaaagcttttaaacatttctcagcccttagaaaacatgaga

SEQ ID NO: 4432 - DNA, 1035 bp, Homo sapiens
  source 1..1035: mol_type = genomic DNA
atgctggccgccaacccaggcaagaccccgatcagccttctgcaggagtatgggaccagaatagggaagacgcctgtgtacgaccttctcaaagccgagggccaagcccaccagcctaatttcaccttccgggtcaccgttggcgacaccagctgcactggtcagggccccagcaagaaggcagccaagcacaaggcagctgaggtggccctcaaacacctcaaaggggggagcatgctggagccggccctggaggacagcagttctttttctcccctagactcttcactgcctgaggacattccggtttttactgctgcagcagctgctaccccagttccatctgtagtcctaaccaggagcccccccatggaactgcagccccctgtctcccctcagcagtctgagtgcaaccccgttggtgctctgcaggagctggtggtgcagaaaggctggcggttgccggagtacacagtgacccaggagtctgggccagcccaccgcaaagaattcaccatgacctgtcgagtggagcgtttcattgagattgggagtggcacttccaaaaaattggcaaagcggaatgcggcggccaaaatgctgcttcgagtgcacacggtgcctctggatgcccgggatggcaatgaggtggagcctgatgatgaccacttctccattggtgtgggctcccgcctggatggtcttcgaaaccggggcccaggttgcacctgggattctctacgaaattcagtaggagagaagatcctgtccctccgcagttgctccctgggctccctgggtgccctgggccctgcctgctgccgtgtcctcagtgagctctctgaggagcaggcctttcacgtcagctacctggatattgaggagctgagcctgagtggactctgccagtgcctggtggaactgtccacccagccggccactgtgtgtcatggctctgcaaccaccagggaggcagcccgtggtgaggctgcccgccgtgccctgcagtacctcaagatcatggcaggcagcaag

SEQ ID NO: 4433 - DNA, 846 bp, Homo sapiens
  source 1..846: mol_type = genomic DNA
atgtcactcctggcgaccctggggctggagctggacagggccctgctcccagctagtgggctgggatggctcgtagactatgggaaactccccccggcccctgcccccctggctccctatgaggtccttgggggagccctggagggcgggcttccagtggggggagagcccctggcaggtgatggcttctctgactggatgactgagcgagttgatttcacagctctcctccctctggagcctcccttaccccccggcaccctcccccaaccttccccaaccccacctgacctggaagctatggcctccctcctcaagaaggagctggaacagatggaagacttcttcctagatgccccgcccctcccaccaccctccccgccgccactaccaccaccaccactaccaccagccccctccctccccctgtccctcccctcctttgacctcccccagccccctgtcttggatactctggacttgctggccatctactgccgcaacgaggccgggcaggaggaagtggggatgccgcctctgcccccgccacagcagccccctcctccttctccacctcaaccttctcgcctggccccctacccacatcctgccaccacccgaggggaccgcaagcaaaagaagagagaccagaacaagtcggcggctctgaggtaccgccagcggaagcgggcagagggtgaggccctggagggcgagtgccaggggctggaggcacggaatcgcgagctgaaggaacgggcagagtccgtggagcgcgagatccagtacgtcaaggacctgctcatcgaggtttacaaggcccggagccagaggacccgtagctgc

SEQ ID NO: 4434 - DNA, 1449 bp, Homo sapiens
  source 1..1449: mol_type = genomic DNA
atgggagacgacagaccgtttgtgtgcaatgccccgggctgtggacagagatttacaaacgaggaccacctggcagttcataaacacaagcatgagatgacattgaaatttggcccagcccgaactgactcagtcatcattgcagatcaaacgcctactccaactagattcctgaagaactgtgaggaggtgggactcttcaatgaactagctagctcctttgaacatgaattcaagaaagctgcagatgaggatgagaaaaaggctgctgctgggccccttgacatgtctctgccttccacaccagacatcaaaatcaaagaagaagagccagtggaggtagactcatccccacctgatagccctgcctctagtccctgttccccaccactgaaggagaaggaggttaccccaaagcctgttctgatctctacccccacacccaccattgtacgtcctggctccctgcctctccacttgggctatgatccacttcatccaacccttccctccccaacctctgtcatcacacaggctccaccatccaacaggcaaatggggtctcccactggctccctccctcttgtcatgcatcttgctaatggacagaccatgcctgtgttgccagggcctccagtacagatgccgtctgttatatcgctggccagacctgtgtccatggtgcccaacattcctggtatccctggcccaccagttaacagtagtggctccatttctccctctggccaccctataccatcagaagccaagatgagactgaaagccaccctaactcaccaagtctcctcaatcaatggtggttgtggaatggtggtgggtactgccagcaccatggtgacagcccgcccagagcagagccagattctcatccagcaccctgatgccccatcccctgcccagccacaggtctcaccagctcagcccacccctagtactggggggcgacggcggcgcacagtagatgaagatccagatgagcgacggcagcgctttctggagcgcaaccgggctgcagcctcccgctgccgccaaaagcgaaagctgtgggtgtcctccctagagaagaaggccgaagaactcacttctcagaacattcagctgagtaatgaagtcacattactacgcaatgaggtggcccagttgaaacagctactgttagctcataaagactgcccagtcactgcactacagaaaaagactcaaggctatttagaaagccccaaggaaagctcagagccaacgggttctccagcccctgtgattcagcacagctcagcaacagcccctagcaatggcctcagtgttcgctctgcagctgaagctgtggccacctcggtcctcactcagatggccagccaaaggacagaactgagcatgccgatacaatcgcatgtaatcatgaccccacagtcccagtctgcgggcaga

SEQ ID NO: 4435 - DNA, 351 bp, Homo sapiens
  source 1..351: mol_type = genomic DNA
atgggagacgacagaccgtttgtgtgcaatgccccgggctgtggacagagatttacaaacgaggaccacctggcagttcataaacacaagcatgagatgacattgaaatttggcccagcccgaactgactcagtcatcattgcagatcaaacgcctactccaactagattcctgaagaactgtgaggaggtgggactcttcaatgaactagctagctcctttgaacatgaattcaagaaagctgcagatgaggatgagaaaaaggcaagaagcaggactgttgccaaaaaactggtggtattcagacctaggctatttttattgtgctttgggataattttcttaattggt

SEQ ID NO: 4436 - DNA, 2010 bp, Homo sapiens
  source 1..2010: mol_type = genomic DNA
atgggggagccggctggggttgccggcaccatggagtcaccttttagcccgggactctttcacaggctggatgaagattgggattctgctctctttgctgaactcggttatttcacagacactgatgagctgcaattggaagcagcaaatgagacgtatgaaaacaattttgataatcttgattttgatttggatttgatgccttgggagtcagacatttgggacatcaacaaccaaatctgtacagttaaagatattaaggcagaacctcagccactttctccagcctcctcaagttattcagtctcgtctcctcggtcagtggactcttattcttcaactcagcatgttcctgaggagttggatttgtcttctagttctcagatgtctcccctttccttatatggtgaaaactctaatagtctctcttcagcggagccactgaaggaagataagcctgtcactggtcctaggaacaagactgaaaatggactgactccaaagaaaaaaattcaggtgaattcaaaaccttcaattcagcccaagcctttattgcttccagcagcacccaagactcaaacaaactccagtgttccagcaaaaaccatcattattcagacagtaccaacgcttatgccattggcaaagcagcaaccaattatcagtttacaacctgcacccactaaaggccagacggttttgctgtctcagcctactgtggtacaacttcaagcacctggagttctgccctctgctcagccagtccttgctgttgctgggggagtcacacagctccctaatcacgtggtgaatgtggtaccagccccttcagcgaatagcccagtgaatggaaaactttccgtgactaaacctgtcctacaaagtaccatgagaaatgtcggttcagatattgctgtgctaaggagacagcaacgtatgataaaaaatcgagaatccgcttgtcagtctcgcaagaagaagaaagaatatatgctagggttagaggcgagattaaaggctgccctctcagaaaacgagcaactgaagaaagaaaatggaacactgaagcggcagctggatgaagttgtgtcagagaaccagaggcttaaagtccctagtccaaagcgaagagttgtctgtgtgatgatagtattggcatttataatactgaactatggacctatgagcatgttggaacaggattccaggagaatgaaccctagtgtgagccctgcaaatcaaaggaggcaccttctaggattttctgctaaagaggcacaggacacatcagatggtattatccagaaaaacagctacagatatgatcattctgtttcaaatgacaaagccctgatggtgctaactgaagaaccattgctttacattcctccacctccttgtcagcccctaattaacacaacagagtctctcaggttaaatcatgaacttcgaggatgggttcatagacatgaagtagaaaggaccaagtcaagaagaatgacaaataatcaacagaaaacccgtattcttcagggtgctctggaacagggctcaaattctcagctgatggctgttcaatacacagaaaccactagtagtatcagcaggaactcagggagtgagctacaagtgtattatgcttcacccagaagttatcaagacttttttgaagccatccgcagaaggggagacacattttatgttgtgtcatttcgaagggatcacctgctgttaccagctaccacccataacaagaccacaagaccaaaaatgtcaattgtgttaccagcaataaacataaatgagaatgtgatcaatgggcaggactacgaagtgatgatgcagattgactgtcaggtgatggacaccaggatcctccatatcaaaagttcgtcagttcctccttacctccgagatcagcagaggaatcaaaccaacaccttctttggctcccctcccgcagccacagaggcaacccacgttgtcagcaccatccctgagtcattacaa

SEQ ID NO: 4437 - DNA, 813 bp, Homo sapiens
  source 1..813: mol_type = genomic DNA
atggaagattcccacaagagtaccacgtcagagacagcacctcaacctggttcagcagttcagggagctcacatttctcatattgctcaacaggtatcatctttatcagaaagtgaggagtcccaggactcatccgacagcataggctcctcacagaaagcccacgggatcctagcacggcgcccatcttacagaaaaattttgaaagacttatcttctgaagatacacggggcagaaaaggagacggagaaaattctggagtttctgctgctgtcacttctatgtctgttccaactcccatctatcagactagcagcggacagtacattgccattgccccaaatggagccttacagttggcaagtccaggcacagatggagtacagggacttcagacattaaccatgacaaattcaggcagtactcagcaaggtacaactattcttcagtatgcacagacctctgatggacagcagatacttgtgcccagcaatcaggtggtcgtacaaactgcatcaggagatatgcaaacatatcagatccgaactacaccttcagctacttctctgccacaaactgtggtgatgacatctcctgtgactctcacctctcagacaactaagacagatgacccccaattgaaaagagaaataaggttaatgaaaaacagagaagctgctcgagaatgtcgcagaaagaagaaagaatatgtgaaatgcctggaaaaccgagttgcagtcctggaaaatcaaaataaaactctaatagaagagttaaaaactttgaaggatctttattccaataaaagtgtt

SEQ ID NO: 4438 - DNA, 318 bp, Homo sapiens
  source 1..318: mol_type = genomic DNA
atgatgcttcaacacccaggccaggtctctgcctcggaagaagagctgaggtttgccatccagaacaagcacctctgccaccggatgtcctctgcgctggaatcagtcactgtcagcgacagacccctcggggtgtccatcacaaaagccgaggtagcccctgaagaagatgaaaggaaaaagaggcgacgagaaagaaataagattgcagctgcaaagtgccgaaacaagaagaaggagaagacggagtgcctgcagaaactcccaaggcccttttgggtccagaagacctgcatatgggctgttgactcatgcaaa

SEQ ID NO: 4439 - DNA, 405 bp, Homo sapiens
  source 1..405: mol_type = genomic DNA
atgatgcttcaacacccaggccaggtctctgcctcggaagtgagtgcttctgccatcgtcccctgcctgtcccctcctgggtcactggtgtttgaggattttgctaacctgacgccctttgtcaaggaagagctgaggtttgccatccagaacaagcacctctgccaccggatgtcctctgcgctggaatcagtcactgtcagcgacagacccctcggggtgtccatcacaaaagccgaggtagcccctgaagaagatgaaaggaaaaagaggcgacgagaaagaaataagattgcagctgcaaagtgccgaaacaagaagaaggagaagacggagtgcctgcagaaactcccaaggcccttttgggtccagaagacctgcatatgggctgttgactcatgcaaa

SEQ ID NO: 4440 - DNA, 372 bp, Homo sapiens
  source 1..372: mol_type = genomic DNA
atgtcctctgcgctggaatcagtcactgtcagcgacagacccctcggggtgtccatcacaaaagccgaggtagcccctgaagaagatgaaaggaaaaagaggcgacgagaaagaaataagattgcagctgcaaagtgccgaaacaagaagaaggagaagacggagtgcctgcagaaagagtcggagaagctggaaagtgtgaatgctgaactgaaggctcagattgaggagctcaagaacgagaagcagcatttgatatacatgctcaaccttcatcggcccacgtgtattgtccgggctcagaatgggaggactccagaagatgagagaaacctctttatccaacagataaaagaaggaacattgcagagc

SEQ ID NO: 4441 - DNA, 543 bp, Homo sapiens
  source 1..543: mol_type = genomic DNA
atgatgcttcaacacccaggccaggtctctgcctcggaagtgagtgcttctgccatcgtcccctgcctgtcccctcctgggtcactggtgtttgaggattttgctaacctgacgccctttgtcaaggaagagctgaggtttgccatccagaacaagcacctctgccaccggatgtcctctgcgctggaatcagtcactgtcagcgacagacccctcggggtgtccatcacaaaagccgaggtagcccctgaagaagatgaaaggaaaaagaggcgacgagaaagaaataagattgcagctgcaaagtgccgaaacaagaagaaggagaagacggagtgcctgcagaaagagtcggagaagctggaaagtgtgaatgctgaactgaaggctcagattgaggagctcaagaacgagaagcagcatttgatatacatgctcaaccttcatcggcccacgtgtattgtccgggctcagaatgggaggactccagaagatgagagaaacctctttatccaacagataaaagaaggaacattgcagagc

SEQ ID NO: 4442 - DNA, 1461 bp, Homo sapiens
  source 1..1461: mol_type = genomic DNA
atgagtgatgacaaaccctttctatgtactgcgcctggatgtggccagcgttttaccaacgaggatcatttggctgtccataaacataaacatgagatgacactgaaatttggtccagcacgtaatgacagtgtcattgtggctgatcagaccccaacaccaacaagattcttgaaaaactgtgaagaagtgggtttgtttaatgagttggcgagtccatttgagaatgaattcaagaaagcttcagaagatgacattaaaaaaatgcctctagatttatcccctcttgcaacacctatcataagaagcaaaattgaggagccttctgttgtagaaacaactcaccaggatagtcctttacctcacccagagtctactaccagtgatgagaaggaagtaccattggcacaaactgcacagcccacatcagctattgttcgtccagcatcattacaggttcccaatgtgctgcttacaagttctgactcaagtgtaattattcagcaggcagtaccttcaccaacctcaagtactgtaatcacccaggcaccatcctctaacaggccaattgtccctgtaccaggcccatttcctcttctgttacatcttcctaatggacaaaccatgcctgttgctattcctgcatcaattacaagttctaatgtgcatgttccagctgcagtcccactcgttcgaccagtcaccatggtgcctagtgttccaggaatcccaggtccttcctctccccaaccagtacagtcagaagcaaaaatgagattaaaagctgctttgacccagcaacatcctccagttaccaatggtgatactgtcaaaggtcatggtagcggattggttaggactcagtcagaggaatctcgaccgcagtcattacaacagccagccacatccactacagaaactccggcttctccagctcacacaactccacagacccaaagtacaagtggtcgtcggagaagagcagctaacgaagatcctgatgaaaaaaggagaaagtttttagagcgaaatagagcagcagcttcaagatgccgacaaaaaaggaaagtctgggttcagtctttagagaagaaagctgaagacttgagttcattaaatggtcagctgcagagtgaagtcaccctgctgagaaatgaagtggcacagctgaaacagcttcttctggctcataaagattgccctgtaaccgccatgcagaagaaatctggctatcatactgctgataaagatgatagttcagaagacatttcagtgccgagtagtccacatacagaagctatacagcatagttcggtcagcacatccaatggagtcagttcaacctccaaggcagaagctgtagccacttcagtcctcacccagatggcggaccagagtacagagcctgctctttcacagatcgttatggctccttcctcccagtcacagccctcaggaagt

SEQ ID NO: 4443 - DNA, 1341 bp, Homo sapiens
  source 1..1341: mol_type = genomic DNA
atgtactgcgcctggatgtggccagatcagaccccaacaccaacaagattcttgaaaaactgtgaagaagtgggtttgtttaatgagttggcgagtccatttgagaatgaattcaagaaagcttcagaagatgacattaaaaaaatgcctctagatttatcccctcttgcaacacctatcataagaagcaaaattgaggagccttctgttgtagaaacaactcaccaggatagtcctttacctcacccagagtctactaccagtgatgagaaggaagtaccattggcacaaactgcacagcccacatcagctattgttcgtccagcatcattacaggttcccaatgtgctgcttacaagttctgactcaagtgtaattattcagcaggcagtaccttcaccaacctcaagtactgtaatcacccaggcaccatcctctaacaggccaattgtccctgtaccaggcccatttcctcttctgttacatcttcctaatggacaaaccatgcctgttgctattcctgcatcaattacaagttctaatgtgcatgttccagctgcagtcccactcgttcgaccagtcaccatggtgcctagtgttccaggaatcccaggtccttcctctccccaaccagtacagtcagaagcaaaaatgagattaaaagctgctttgacccagcaacatcctccagttaccaatggtgatactgtcaaaggtcatggtagcggattggttaggactcagtcagaggaatctcgaccgcagtcattacaacagccagccacatccactacagaaactccggcttctccagctcacacaactccacagacccaaagtacaagtggtcgtcggagaagagcagctaacgaagatcctgatgaaaaaaggagaaagtttttagagcgaaatagagcagcagcttcaagatgccgacaaaaaaggaaagtctgggttcagtctttagagaagaaagctgaagacttgagttcattaaatggtcagctgcagagtgaagtcaccctgctgagaaatgaagtggcacagctgaaacagcttcttctggctcataaagattgccctgtaaccgccatgcagaagaaatctggctatcatactgctgataaagatgatagttcagaagacatttcagtgccgagtagtccacatacagaagctatacagcatagttcggtcagcacatccaatggagtcagttcaacctccaaggcagaagctgtagccacttcagtcctcacccagatggcggaccagagtacagagcctgctctttcacagatcgttatggctccttcctcccagtcacagccctcaggaagt

SEQ ID NO: 4444 - DNA, 3735 bp, Homo sapiens
  source 1..3735: mol_type = genomic DNA
atggcggtgcggaagaaggacggcggccccaacgtgaagtactacgaggccgcggacaccgtgacccagttcgacaacgtgcggctgtggctcggcaagaactacaagaagtatatacaagctgaaccacccaccaacaagtccctgtctagcctggttgtacagttgctacaatttcaggaagaagtttttggcaaacatgtcagcaatgcaccgctcactaaactgccgatcaaatgtttcctagatttcaaagcgggaggctccttgtgccacattcttgcagctgcctacaaattcaagagtgaccagggatggcggcgttacgatttccagaatccatcacgcatggaccgcaatgtggaaatgtttatgaccattgagaagtccttggtgcagaataattgcctgtctcgacctaacatttttctgtgcccagaaattgagcccaaactactagggaaattaaaggacattatcaagagacaccagggaacagtcactgaggataagaacaatgcctcccatgttgtgtatcctgtcccggggaatctagaagaagaggaatgggtacgaccagtcatgaagagggataagcaggttcttctgcactggggctactatcctgacagttacgacacgtggatcccagcgagtgaaattgaggcatctgtggaagatgctccaactcctgagaaacctaggaaggttcatgcaaagtggatcctggacaccgacaccttcaatgaatggatgaatgaggaagactatgaagtaaatgatgacaaaaaccctgtctcccgccgaaagaagatttcagccaagacactgacagatgaggtgaacagcccagattcagatcgacgggacaagaaggggggaaactataagaagaggaagcgctccccctctccttcaccaaccccagaagcaaagaagaaaaatgctaagaaaggtccctcaacaccttacactaagtcaaagcgtggccacagagaagaggagcaagaagacctgacaaaggacatggacgagccctcaccagtccccaatgtagaagaggtgacacttcccaaaacagtcaacacaaagaaagactcagagtcggccccagtcaaaggcggcaccatgaccgacctggatgaacaggaagatgaaagcatggagacgacgggcaaggatgaggatgagaacagtacggggaacaagggagagcagaccaagaatccagacctgcatgaggacaatgtgactgaacagacccaccacatcatcattcccagctacgctgcctggtttgactacaatagtgttcatgccattgagcggagggctctccccgagttcttcaacggcaagaacaagtccaagactccagagatctacctggcctatcgaaactttatgattgacacttaccgactgaacccccaagagtatcttacctctaccgcctgccgccgaaacctagcgggtgatgtctgtgccatcatgagggtccatgccttcctagaacagtggggtcttattaactaccaggtggatgctgagagtcgaccaaccccaatggggcctccgcctacctctcacttccatgtcttggctgacacaccatcagggctggtgcctctgcagcccaagacacctcagggccgccaggttgatgctgataccaaggctgggcgaaagggcaaagagctggatgacctggtgccagagacggctaagggcaagccagagctgcagacctctgcttcccaacaaatgctcaactttcctgacaaaggcaaagagaaaccaacagacatgcaaaactttgggctgcgcacagacatgtacacaaaaaagaatgttccctccaagagcaaggctgcagccagtgccactcgtgagtggacagaacaggaaaccctgcttctcctggaggcactggaaatgtacaaagatgactggaacaaagtgtccgagcatgtgggaagccgcacacaggacgagtgcatcttgcattttcttcgtcttcccattgaagacccatacctggaggactcagaggcctccctaggccccctggcctaccaacccatccccttcagtcagtcgggcaaccctgttatgagcactgttgccttcctggcctctgtcgtcgatccccgagtcgcctctgctgctgcaaagtcagccctagaggagttctccaaaatgaaggaagaggtacccacggccttggtggaggcccatgttcgaaaagtggaagaagcagccaaagtaacaggcaaggcggaccctgccttcggtctggaaagcagtggcattgcaggaaccacctctgatgagcctgagcggattgaggagagcgggaatgacgaggctcgggtggaaggccaggccacagatgagaagaaggagcccaaggaaccccgagaaggagggggtgctatagaggaggaagcaaaagagaaaaccagcgaggctcccaagaaggatgaggagaaagggaaagaaggcgacagtgagaaggagtccgagaagagtgatggagacccaatagtcgatcctgagaaggagaaggagccaaaggaagggcaggaggaagtgctgaaggaagtggtggagtctgagggggaaaggaagacaaaggtggagcgggacattggcgagggcaacctctccaccgctgctgccgccgccctggccgccgccgcagtgaaagctaagcacttggctgctgttgaggaaaggaagatcaaatctttggtggccctgctggtggagacccagatgaaaaagttggagatcaaacttcggcactttgaggagctggagactatcatggaccgggagcgagaagcactggagtatcagaggcagcagctcctggccgacagacaagccttccacatggagcagctgaagtatgcggagatgagggctcggcagcagcacttccaacagatgcaccaacagcagcagcagccaccaccagccctgcccccaggctcccagcctatccccccaacaggggctgctgggccacccgcagtccatggcttggctgtggctccagcctctgtagtccctgctcctgctggcagtggggcccctccaggaagtttgggcccttctgaacagattgggcaggcagggtcaactgcagggccacagcagcagcaaccagctggagccccccagcctggggcagtcccaccaggggttcccccccctggaccccatggcccctcaccgttccccaaccaacaaactcctccctcaatgatgccaggggcagtgccaggcagcgggcacccaggcgtggcgggtaatgctcctttgggtttgccttttggcatgccgcctcctcctcctcctcctgctccatccatcatcccatttggtagtctagctgactccatcagtattaacctccccgctcctcctaacctgcatgggcatcaccaccatctcccgttcgccccgggcactctccccccacctaacctgcctgtgtccatggcgaaccctctacatcctaacctgccggcgaccaccaccatgccatcttccttgcctctcgggccggggctcggatccgccgcagcccaaagccctgccattgtggcagctgttcagggcaacctcctgcccagtgccagcccactgccagacccaggcacccccctgcctccagaccccacagccccgagcccaggcacggtcacccctgtgccacctccacag

SEQ ID NO: 4445 - DNA, 3456 bp, Homo sapiens
  source 1..3456: mol_type = genomic DNA
atggcggtgcggaagaaggacggcggccccaacgtgaagtactacgaggccgcggacaccgtgacccagttcgacaacgtgcggctgtggctcggcaagaactacaagaagtatatacaagctgaaccacccaccaacaagtccctgtctagcctggttgtacagttgctacaatttcaggaagaagtttttggcaaacatgtcagcaatgcaccgctcactaaactgccgatcaaatgtttcctagatttcaaagcgggaggctccttgtgccacattcttgcagctgcctacaaattcaagagtgaccagggatggcggcgttacgatttccagaatccatcacgcatggaccgcaatgtggaaatgtttatgaccattgagaagtccttggtgcagaataattgcctgtctcgacctaacatttttctgtgcccagaaattgagcccaaactactagggaaattaaaggacattatcaagagacaccagggaacagtcactgaggataagaacaatgcctcccatgttgtgtatcctgtcccggggaatctagaagaagaggaatgggtacgaccagtcatgaagagggataagcaggttcttctgcactggggctactatcctgacagttacgacacgtggatcccagcgagtgaaattgaggcatctgtggaagatgctccaactcctgagaaacctaggaaggttcatgcaaagtggatcctggacaccgacaccttcaatgaatggatgaatgaggaagactatgaagtaaatgatgacaaaaaccctgtctcccgccgaaagaagatttcagccaagacactgacagatgaggtgaacagcccagattcagatcgacgggacaagaaggggggaaactataagaagaggaagcgctccccctctccttcaccaaccccagaagcaaagaagaaaaatgctaagaaaggtccctcaacaccttacactaagtcaaagcgtggccacagagaagaggagcaagaagacctgacaaaggacatggacgagccctcaccagtccccaatgtagaagaggtgacacttcccaaaacagtcaacacaaagaaagactcagagtcggccccagtcaaaggcggcaccatgaccgacctggatgaacaggaagatgaaagcatggagacgacgggcaaggatgaggatgagaacagtacggggaacaagggagagcagaccaagaatccagacctgcatgaggacaatgtgactgaacagacccaccacatcatcattcccagctacgctgcctggtttgactacaatagtgttcatgccattgagcggagggctctccccgagttcttcaacggcaagaacaagtccaagactccagagatctacctggcctatcgaaactttatgattgacacttaccgactgaacccccaagagtatcttacctctaccgcctgccgccgaaacctagcgggtgatgtctgtgccatcatgagggtccatgccttcctagaacagtggggtcttattaactaccaggtggatgctgagagtcgaccaaccccaatggggcctccgcctacctctcacttccatgtcttggctgacacaccatcagggctggtgcctctgcagcccaagacacctcagggccgccaggttgatgctgataccaaggctgggcgaaagggcaaagagctggatgacctggtgccagagacggctaagggcaagccagagctgcagacctctgcttcccaacaaatgctcaactttcctgacaaaggcaaagagaaaccaacagacatgcaaaactttgggctgcgcacagacatgtacacaaaaaagaatgttccctccaagagcaaggctgcagccagtgccactcgtgagtggacagaacaggaaaccctgcttctcctggaggcactggaaatgtacaaagatgactggaacaaagtgtccgagcatgtgggaagccgcacacaggacgagtgcatcttgcattttcttcgtcttcccattgaagacccatacctggaggactcagaggcctccctaggccccctggcctaccaacccatccccttcagtcagtcgggcaaccctgttatgagcactgttgccttcctggcctctgtcgtcgatccccgagtcgcctctgctgctgcaaagtcagccctagaggagttctccaaaatgaaggaagaggtacccacggccttggtggaggcccatgttcgaaaagtggaagaagcagccaaagtaacaggcaaggcggaccctgccttcggtctggaaagcagtggcattgcaggaaccacctctgatgagcctgagcggattgaggagagcgggaatgacgaggctcgggtggaaggccaggccacagatgagaagaaggagcccaaggaaccccgagaaggagggggtgctatagaggaggaagcaaaagagaaaaccagcgaggctcccaagaaggatgaggagaaagggaaagaaggcgacagtgagaaggagtccgagaagagtgatggagacccaatagtcgatcctgagaaggagaaggagccaaaggaagggcaggaggaagtgctgaaggaagtggtggagtctgagggggaaaggaagacaaaggtggagcgggacattggcgagggcaacctctccaccgctgctgccgccgccctggccgccgccgcagtgaaagctaagcacttggctgctgttgaggaaaggaagatcaaatctttggtggccctgctggtggagacccagatgaaaaagttggagatcaaacttcggcactttgaggagctggagactatcatggaccgggagcgagaagcactggagtatcagaggcagcagctcctggccgacagacaagccttccacatggagcagctgaagtatgcggagatgagggctcggcagcagcacttccaacagatgcaccaacagcagcagcagccaccaccagccctgcccccaggctcccagcctatccccccaacaggggctgctgggccacccgcagtccatggcttggctgtggctccagcctctgtagtccctgctcctgctggcagtggggcccctccaggaagtttgggcccttctgaacagattgggcaggcagggtcaactgcagggccacagcagcagcaaccagctggagccccccagcctggggcagtcccaccaggggttcccccccctggaccccatggcccctcaccgttccccaaccaacaaactcctccctcaatgatgccaggggcagtgccaggcagcgggcacccaggcgtggcggcccaaagccctgccattgtggcagctgttcagggcaacctcctgcccagtgccagcccactgccagacccaggcacccccctgcctccagaccccacagccccgagcccaggcacggtcacccctgtgccacctccacag

SEQ ID NO: 4446 - DNA, 3390 bp, Homo sapiens
  source 1..3390: mol_type = genomic DNA
atggcggtgcggaagaaggacggcggccccaacgtgaagtactacgaggccgcggacaccgtgacccagttcgacaacgtgcggctgtggctcggcaagaactacaagaagtatatacaagctgaaccacccaccaacaagtccctgtctagcctggttgtacagttgctacaatttcaggaagaagtttttggcaaacatgtcagcaatgcaccgctcactaaactgccgatcaaatgtttcctagatttcaaagcgggaggctccttgtgccacattcttgcagctgcctacaaattcaagagtgaccagggatggcggcgttacgatttccagaatccatcacgcatggaccgcaatgtggaaatgtttatgaccattgagaagtccttggtgcagaataattgcctgtctcgacctaacatttttctgtgcccagaaattgagcccaaactactagggaaattaaaggacattatcaagagacaccagggaacagtcactgaggataagaacaatgcctcccatgttgtgtatcctgtcccggggaatctagaagaagaggaatgggtacgaccagtcatgaagagggataagcaggttcttctgcactggggctactatcctgacagttacgacacgtggatcccagcgagtgaaattgaggcatctgtggaagatgctccaactcctgagaaacctaggaaggttcatgcaaagtggatcctggacaccgacaccttcaatgaatggatgaatgaggaagactatgaagtaaatgatgacaaaaaccctgtctcccgccgaaagaagatttcagccaagacactgacagatgaggtgaacagcccagattcagatcgacgggacaagaaggggggaaactataagaagaggaagcgctccccctctccttcaccaaccccagaagcaaagaagaaaaatgctaagaaaggtccctcaacaccttacactaagtcaaagcgtggccacagagaagaggagcaagaagacctgacaaaggacatggacgagccctcaccagtccccaatgtagaagaggtgacacttcccaaaacagtcaacacaaagaaagactcagagtcggccccagtcaaaggcggcaccatgaccgacctggatgaacaggaagatgaaagcatggagacgacgggcaaggatgaggatgagaacagtacggggaacaagggagagcagaccaagaatccagacctgcatgaggacaatgtgactgaacagacccaccacatcatcattcccagctacgctgcctggtttgactacaatagtgttcatgccattgagcggagggctctccccgagttcttcaacggcaagaacaagtccaagactccagagatctacctggcctatcgaaactttatgattgacacttaccgactgaacccccaagagtatcttacctctaccgcctgccgccgaaacctagcgggtgatgtctgtgccatcatgagggtccatgccttcctagaacagtggggtcttattaactaccaggtggatgctgagagtcgaccaaccccaatggggcctccgcctacctctcacttccatgtcttggctgacacaccatcagggctggtgcctctgcagcccaagacacctcagggccgccaggttgatgctgataccaaggctgggcgaaagggcaaagagctggatgacctggtgccagagacggctaagggcaagccagagctgcagacctctgcttcccaacaaatgctcaactttcctgacaaaggcaaagagaaaccaacagacatgcaaaactttgggctgcgcacagacatgtacacaaaaaagaatgttccctccaagagcaaggctgcagccagtgccactcgtgagtggacagaacaggaaaccctgcttctcctggaggcactggaaatgtacaaagatgactggaacaaagtgtccgagcatgtgggaagccgcacacaggacgagtgcatcttgcattttcttcgtcttcccattgaagacccatacctggaggactcagaggcctccctaggccccctggcctaccaacccatccccttcagtcagtcgggcaaccctgttatgagcactgttgccttcctggcctctgtcgtcgatccccgagtcgcctctgctgctgcaaagtcagccctagaggagttctccaaaatgaaggaagaggtacccacggccttggtggaggcccatgttcgaaaagtggaagaagcagccaaagtaacaggcaaggcggaccctgccttcggtctggaaagcagtggcattgcaggaaccacctctgatgagcctgagcggattgaggagagcgggaatgacgaggctcgggtggaaggccaggccacagatgagaagaaggagcccaaggaaccccgagaaggagggggtgctatagaggaggaagcaaaagagaaaaccagcgaggctcccaagaaggatgaggagaaagggaaagaaggcgacagtgagaaggagtccgagaagagtgatggagacccaatagtcgatcctgagaaggagaaggagccaaaggaagggcaggaggaagtgctgaaggaagtggtggagtctgagggggaaaggaagacaaaggtggagcgggacattggcgagggcaacctctccaccgctgctgccgccgccctggccgccgccgcagtgaaagctaagcacttggctgctgttgaggaaaggaagatcaaatctttggtggccctgctggtggagacccagatgaaaaagttggagatcaaacttcggcactttgaggagctggagactatcatggaccgggagcgagaagcactggagtatcagaggcagcagctcctggccgacagacaagccttccacatggagcagctgaagtatgcggagatgagggctcggcagcagcacttccaacagatgcaccaacagcagcagcagccaccaccagccctgcccccaggctcccagcctatccccccaacaggggctgctgggccacccgcagtccatggcttggctgtggctccagcctctgtagtccctgctcctgctggcagtggggcccctccaggaagtttgggcccttctgaacagattgggcaggcagggtcaactgcagggccacagcagcagcaaccagctggagccccccagcctggggcagtcccaccaggggttcccccccctggaccccatggcccctcaccgttccccaaccaacaaactcctccctcaatgatgccaggggcagtgccaggcagcgggcacccaggcgtggcggacccaggcacccccctgcctccagaccccacagccccgagcccaggcacggtcacccctgtgccacctccacag

SEQ ID NO: 4447 - DNA, 3642 bp, Homo sapiens
  source 1..3642: mol_type = genomic DNA
atggcggtgcggaagaaggacggcggccccaacgtgaagtactacgaggccgcggacaccgtgacccagttcgacaacgtgcggctgtggctcggcaagaactacaagaagtatatacaagctgaaccacccaccaacaagtccctgtctagcctggttgtacagttgctacaatttcaggaagaagtttttggcaaacatgtcagcaatgcaccgctcactaaactgccgatcaaatgtttcctagatttcaaagcgggaggctccttgtgccacattcttgcagctgcctacaaattcaagagtgaccagggatggcggcgttacgatttccagaatccatcacgcatggaccgcaatgtggaaatgtttatgaccattgagaagtccttggtgcagaataattgcctgtctcgacctaacatttttctgtgcccagaaattgagcccaaactactagggaaattaaaggacattatcaagagacaccagggaacagtcactgaggataagaacaatgcctcccatgttgtgtatcctgtcccggggaatctagaagaagaggaatgggtacgaccagtcatgaagagggataagcaggttcttctgcactggggctactatcctgacagttacgacacgtggatcccagcgagtgaaattgaggcatctgtggaagatgctccaactcctgagaaacctaggaaggttcatgcaaagtggatcctggacaccgacaccttcaatgaatggatgaatgaggaagactatgaagtaaatgatgacaaaaaccctgtctcccgccgaaagaagatttcagccaagacactgacagatgaggtgaacagcccagattcagatcgacgggacaagaaggggggaaactataagaagaggaagcgctccccctctccttcaccaaccccagaagcaaagaagaaaaatgctaagaaaggtccctcaacaccttacactaagtcaaagcgtggccacagagaagaggagcaagaagacctgacaaaggacatggacgagccctcaccagtccccaatgtagaagaggtgacacttcccaaaacagtcaacacaaagaaagactcagagtcggccccagtcaaaggcggcaccatgaccgacctggatgaacaggaagatgaaagcatggagacgacgggcaaggatgaggatgagaacagtacggggaacaagggagagcagaccaagaatccagacctgcatgaggacaatgtgactgaacagacccaccacatcatcattcccagctacgctgcctggtttgactacaatagtgttcatgccattgagcggagggctctccccgagttcttcaacggcaagaacaagtccaagactccagagatctacctggcctatcgaaactttatgattgacacttaccgactgaacccccaagagtatcttacctctaccgcctgccgccgaaacctagcgggtgatgtctgtgccatcatgagggtccatgccttcctagaacagtggggtcttattaactaccaggtggatgctgagagtcgaccaaccccaatggggcctccgcctacctctcacttccatgtcttggctgacacaccatcagggctggtgcctctgcagcccaagacacctcagcagacctctgcttcccaacaaatgctcaactttcctgacaaaggcaaagagaaaccaacagacatgcaaaactttgggctgcgcacagacatgtacacaaaaaagaatgttccctccaagagcaaggctgcagccagtgccactcgtgagtggacagaacaggaaaccctgcttctcctggaggcactggaaatgtacaaagatgactggaacaaagtgtccgagcatgtgggaagccgcacacaggacgagtgcatcttgcattttcttcgtcttcccattgaagacccatacctggaggactcagaggcctccctaggccccctggcctaccaacccatccccttcagtcagtcgggcaaccctgttatgagcactgttgccttcctggcctctgtcgtcgatccccgagtcgcctctgctgctgcaaagtcagccctagaggagttctccaaaatgaaggaagaggtacccacggccttggtggaggcccatgttcgaaaagtggaagaagcagccaaagtaacaggcaaggcggaccctgccttcggtctggaaagcagtggcattgcaggaaccacctctgatgagcctgagcggattgaggagagcgggaatgacgaggctcgggtggaaggccaggccacagatgagaagaaggagcccaaggaaccccgagaaggagggggtgctatagaggaggaagcaaaagagaaaaccagcgaggctcccaagaaggatgaggagaaagggaaagaaggcgacagtgagaaggagtccgagaagagtgatggagacccaatagtcgatcctgagaaggagaaggagccaaaggaagggcaggaggaagtgctgaaggaagtggtggagtctgagggggaaaggaagacaaaggtggagcgggacattggcgagggcaacctctccaccgctgctgccgccgccctggccgccgccgcagtgaaagctaagcacttggctgctgttgaggaaaggaagatcaaatctttggtggccctgctggtggagacccagatgaaaaagttggagatcaaacttcggcactttgaggagctggagactatcatggaccgggagcgagaagcactggagtatcagaggcagcagctcctggccgacagacaagccttccacatggagcagctgaagtatgcggagatgagggctcggcagcagcacttccaacagatgcaccaacagcagcagcagccaccaccagccctgcccccaggctcccagcctatccccccaacaggggctgctgggccacccgcagtccatggcttggctgtggctccagcctctgtagtccctgctcctgctggcagtggggcccctccaggaagtttgggcccttctgaacagattgggcaggcagggtcaactgcagggccacagcagcagcaaccagctggagccccccagcctggggcagtcccaccaggggttcccccccctggaccccatggcccctcaccgttccccaaccaacaaactcctccctcaatgatgccaggggcagtgccaggcagcgggcacccaggcgtggcgggtaatgctcctttgggtttgccttttggcatgccgcctcctcctcctcctcctgctccatccatcatcccatttggtagtctagctgactccatcagtattaacctccccgctcctcctaacctgcatgggcatcaccaccatctcccgttcgccccgggcactctccccccacctaacctgcctgtgtccatggcgaaccctctacatcctaacctgccggcgaccaccaccatgccatcttccttgcctctcgggccggggctcggatccgccgcagcccaaagccctgccattgtggcagctgttcagggcaacctcctgcccagtgccagcccactgccagacccaggcacccccctgcctccagaccccacagccccgagcccaggcacggtcacccctgtgccacctccacag

SEQ ID NO: 4448 - DNA, 3315 bp, Homo sapiens
  source 1..3315: mol_type = genomic DNA
atggccgcagcggcgggcggcggcgggccggggacagcggtaggcgccacgggctcggggattgcggcggcagccgcaggcctagctgtttatcgacggaaggatgggggcccggccaccaagttttgggagagcccggagacggtgtcccagctggattcggtgcgggtctggctgggcaagcactacaagaagtatgttcatgcggatgctcctaccaataaaacactggctgggctggtggtgcagcttcttcagttccaggaagatgcctttgggaagcatgtcaccaacccggccttcaccaaactccctgcaaagtgtttcatggatttcaaagctggaggcgccttatgtcacattcttggggctgcttacaagtataaaaatgaacagggatggcggaggtttgacctacagaacccatctcgaatggatcgtaatgtggaaatgtttatgaacattgaaaaaacattggtgcagaacaattgtttgaccagacccaacatctacctcattccagacattgatctgaagttggctaacaaattgaaagatatcatcaaacgacatcagggaacatttacggatgagaagtcaaaagcttcccaccacatttacccatattcttcctcacaagacgatgaagaatggttgagaccggtgatgagaaaagagaagcaagtgttagtgcattggggcttttacccagacagctatgatacttgggtccatagtaatgatgttgatgctgaaattgaagatccaccaattccagaaaaaccatggaaggttcatgtgaaatggattttggacactgatattttcaatgaatggatgaatgaggaggattatgaggtggatgaaaataggaagcctgtgagttttcgtcagcggatttcaaccaagaatgaagagccagtcagaagtccagaaagaagagatagaaaagcatcagctaatgctcgaaagaggaaacattcgccttcgcctccccctccgacaccaacagaatcacggaagaagagtgggaagaaaggccaagctagcctttatgggaagcgcagaagtcagaaagaggaagatgagcaagaagatctaaccaaggatatggaagacccaacacctgtacccaatatagaagaagtagtacttcccaaaaatgtgaacctaaagaaagatagtgaaaatacacctgttaaaggaggaactgtagcggatctagatgagcaggatgaagaaacagtcacagcaggaggaaaggaagatgaagatcctgccaaaggtgatcagagtcgatcagttgaccttggggaagataatgtgacagagcagaccaatcacattattattcctagttatgcatcatggtttgattataactgtattcatgtgattgaacggcgtgctcttcctgagttcttcaatggaaaaaacaaatccaagactccagaaatatacttggcatatcgaaattttatgattgacacgtatcgtctaaacccccaagagtatttaactagcactgcttgtcggaggaacttgactggagatgtgtgtgctgtgatgagggtccatgcctttttagagcagtggggactcgttaattaccaagttgacccggaaagtagacccatggcaatgggacctcctcctactcctcattttaatgtattagctgataccccctctgggcttgtgcctctgcatcttcgatcacctcaggttcctgctgctcaacagatgctaaattttcctgagaaaaacaaggaaaaaccagttgatttgcagaactttggtctccgtactgacatttactccaagaaaacattagcaaagagtaaaggtgctagtgctggaagagaatggactgaacaggagacccttctactcctggaggccctggagatgtacaaggatgattggaacaaagtgtcggaacatgttggaagtcgtactcaggatgaatgcatcctccactttttgagacttcccattgaggacccataccttgagaattcagatgcttcccttgggcctttggcctaccagcctgtccccttcagtcagtcaggaaatccagttatgagtactgttgcttttttggcatctgtggtggaccctcgcgtggcatctgctgcagcaaaagcggctttggaggagttttctcgggtccgggaggaggtaccactggaattggttgaagctcatgtcaagaaagtacaagaagcagcacgagcctctgggaaagtggatcccacctacggtctggagagcagctgcattgcaggcacagggcccgatgagccagagaagcttgaaggagctgaagaggaaaaaatggaagccgaccctgatggtcagcagcctgaaaaggcagaaaataaagtggaaaatgaaacggatgaaggtgataaagcacaagatggagaaaatgaaaaaaatagtgaaaaggaacaggatagtgaagtgagtgaggataccaaatcagaagaaaaggagactgaagagaacaaagaactcactgatacatgtaaagaaagagaaagtgatactgggaagaagaaagtagaacatgaaatttccgaaggaaatgttgccacagccgcagcagctgctcttgcctcagcggctaccaaagccaagcacctggctgcagtggaagaaagaaagatcaagtccctggtagctctcttggttgagacacaaatgaagaaactagagatcaaacttcgacattttgaagagctggaaactatcatggacagagagaaagaagctctagaacaacagaggcagcagttgcttactgaacgccaaaacttccacatggaacagctgaagtatgctgaattacgagcacgacagcaaatggaacagcagcagcatggccagaaccctcaacaggcacaccagcactcaggaggacctggcctggccccacttggagcagcagggcaccctggcatgatgcctcatcaacagccccctccctaccctctgatgcaccaccagatgccaccacctcatccaccccagccaggtcagataccaggcccaggttccatgatgcccgggcagcacatgccaggccgcatgattcccactgttgcagccaacatccacccctctgggagtggccctacccctcctggcatgccaccaatgccaggaaacatcttaggaccccgggtacccctgacagcacctaacggcatgtatccccctccaccacagcagcagccaccgccaccaccacctgcagatggggtccctccgcctcctgctcctggcccgccagcctcagctgctcct

SEQ ID NO: 4449 - DNA, 984 bp, Homo sapiens
  source 1..984: mol_type = genomic DNA
atggcgtcccggtgctccgagccctacccggaggtctccagaatccctaccgtcaggggatgcaacggctccctgtctggtgccctctcctgctgcgaggactcggcccggggctcgggcccgcccaaggcccctacggtggccgagggtcccagctcctgccttcggcggaacgtgatcagcgagagggagcgcaggaagcggatgtcgttgagctgtgagcgtctgcgggccctgctgccccagttcgatggccggcgggaggacatggcctcggtcctggagatgtctgtgcagttcctgcggcttgccagcgccctggggcccagtcaggagcagcacgctattcttgcttcctccaaggaaatgtggcactcgttgcaggaggatgttttacagttgacgttgtcgagtcagattcaagcaggtgtgccagaccctgggacgggagcgtccagcgggactcgaaccccagatgtgaaggcgtttctggaaagtccttggtccctggatccagcgtcggccagcccagagcccgtgccgcacatccttgcgtcctccaggcagtgggaccccgcgagctgcacgtccctgggcacggacaagtgtgaggcactgttggggctgtgccaggtgcggggtgggctgccccctttctcagaaccttccagcctggtgccgtggcccccaggccggagtcttcctaaggctgtgaggccacccctgtcctggcctccgttctcgcagcagcagaccttgcccgtgatgagcggggaggcccttggctggctgggccaggctgggcccctggccatgggggctgcacctctgggggagccagccaaggaggaccccatgctggcgcaggaggccgggtctgcgttggggtctgatgtggacgatgggacgtccttcctgctgactgctggtcccagctcgtggccgggtgagtggggccctgggttcagggctggtccccccgcg

SEQ ID NO: 4450 - DNA, 1161 bp, Homo sapiens
  source 1..1161: mol_type = genomic DNA
atggcgtcccggtgctccgagccctacccggaggtctccagaatccctaccgtcaggggatgcaacggctccctgtctggtgccctctcctgctgcgaggactcggcccggggctcgggcccgcccaaggcccctacggtggccgagggtcccagctcctgccttcggcggaacgtgatcagcgagagggagcgcaggaagcggatgtcgttgagctgtgagcgtctgcgggccctgctgccccagttcgatggccggcgggaggacatggcctcggtcctggagatgtctgtgcagttcctgcggcttgccagcgccctggggcccagtcaggagcagcacgctattcttgcttcctccaaggaaatgtggcactcgttgcaggaggatgttttacagttgacgttgtcgagtcagattcaagcaggtgtgccagaccctgggacgggagcgtccagcgggactcgaaccccagatgtgaaggcgtttctggaaagtccttggtccctggatccagcgtcggccagcccagagcccgtgccgcacatccttgcgtcctccaggcagtgggaccccgcgagctgcacgtccctgggcacggacaagtgtgaggcactgttggggctgtgccaggtgcggggtgggctgccccctttctcagaaccttccagcctggtgccgtggcccccaggccggagtcttcctaaggctgtgaggccacccctgtcctggcctccgttctcgcagcagcagaccttgcccgtgatgagcggggaggcccttggctggctgggccaggctgggcccctggccatgggggctgcacctctgggggagccagccaaggaggaccccatgctggcgcaggaggccgggtctgcgttggggtctgatgtggacgatgggacgtccttcctgctgactgctggtcccagctcgtggccggggtctctggagggtcgaggaggcagtggccctgcatgggccccagctgagagcagtccactggatgttggagagccaggcttcctaggggaccctgagcttggctcccaggagctccaggacagccctctggagccgtggggcctggatgtggactgtgcaggcctggccctgaaggacgaggtggagagcatcttccctgacttctttgcctgc

SEQ ID NO: 4451 - DNA, 1362 bp, Homo sapiens
  source 1..1362: mol_type = genomic DNA
atggagttggcgactcgctaccagatccctaaagaagtggctgacatctttaacgcccccagtgatgatgaagagtttgttggcttccgagatgatgttcccatggaaaccctctcgtcagaggagagctgcgatagttttgactcactagagtcagggaaacagcaggatgtgcgctttcattccaaatacttcacagaagagctaagaagaatttttatagaggacactgactcagagactgaggattttgcaggatttacgcagagtgatctgaatggaaagactaacccagaagtaatggtcgtggagtcagatttgagtgatgatggcaaagcatctttggtgagcgaggaagaggaagatgaagaagaagataaggctacccctagaagaagcaggtctagaagaagtagtattggtcttcgagtagcctttcagttccccaccaagaagctggccaacaaaccagataaaaacagttcttccgagcagttgttttctagcgcacgcttacagaatgagaaaaaaacaattcttgaaagaaagaaagactgtagacaggtgatacaaagggaagattctacctctgagtctgaggatgactctcgggatgagagccaggagagttcagatgctttgctgaaaaggaccatgaacatcaaggagaacaaagccatgcttgcccagttattggcggaattgaactcgatgccagatttcttcccagtacgaaccccaacctcagcttctaggaagaagacagtgaggcgggccttctcggagggacagatcacgcggcgtatgaacccaacccggagtgcgcggcctcctgagaagtttgctctagagaacttcactgtctcagccgctaaatttgcggaagagttttacagcttccgaagaaggaagacaattggggggaaatgccgggagtacagacgacgtcaccgtatatcttcttttcggccagtggaggatatcaccgaagaggacttagaaaatgttgccataactgttcgagataaaatctatgataaagttctgggtaacacgtgccatcagtgtcgacaaaagaccatcgacaccaagacagtgtgtcggaaccagggttgctgtggtgtgcgaggacagttctgtggaccatgcctgcggaaccgctatggggaggatgtcagatcggcattgctggacccggattgggtgtgtcccccctgtcgtgggatctgcaattgcagctactgtcggaagcgtgacggccgctgtgccacaggaatcctcattcatctggccaagttttatggttatgacaatgttaaggaatatctggagagcttacaaaaggagctggtagaagacaat

SEQ ID NO: 4452 - DNA, 1260 bp, Homo sapiens
  source 1..1260: mol_type = genomic DNA
atggaaaccctctcgtcagaggagagctgcgatagttttgactcactagagtcagggaaacagcaggatgtgcgctttcattccaaatacttcacagaagagctaagaagaatttttatagaggacactgactcagagactgaggattttgcaggatttacgcagagtgatctgaatggaaagactaacccagaagtaatggtcgtggagtcagatttgagtgatgatggcaaagcatctttggtgagcgaggaagaggaagatgaagaagaagataaggctacccctagaagaagcaggtctagaagaagtagtattggtcttcgagtagcctttcagttccccaccaagaagctggccaacaaaccagataaaaacagttcttccgagcagttgttttctagcgcacgcttacagaatgagaaaaaaacaattcttgaaagaaagaaagactgtagacaggtgatacaaagggaagattctacctctgagtctgaggatgactctcgggatgagagccaggagagttcagatgctttgctgaaaaggaccatgaacatcaaggagaacaaagccatgcttgcccagttattggcggaattgaactcgatgccagatttcttcccagtacgaaccccaacctcagcttctaggaagaagacagtgaggcgggccttctcggagggacagatcacgcggcgtatgaacccaacccggagtgcgcggcctcctgagaagtttgctctagagaacttcactgtctcagccgctaaatttgcggaagagttttacagcttccgaagaaggaagacaattggggggaaatgccgggagtacagacgacgtcaccgtatatcttcttttcggccagtggaggatatcaccgaagaggacttagaaaatgttgccataactgttcgagataaaatctatgataaagttctgggtaacacgtgccatcagtgtcgacaaaagaccatcgacaccaagacagtgtgtcggaaccagggttgctgtggtgtgcgaggacagttctgtggaccatgcctgcggaaccgctatggggaggatgtcagatcggcattgctggacccggattgggtgtgtcccccctgtcgtgggatctgcaattgcagctactgtcggaagcgtgacggccgctgtgccacaggaatcctcattcatctggccaagttttatggttatgacaatgttaaggaatatctggagagcttacaaaaggagctggtagaagacaat

SEQ ID NO: 4453 - DNA, 1224 bp, Homo sapiens
  source 1..1224: mol_type = genomic DNA
atggagttggcgactcgctaccagatccctaaagaagtggctgacatctttaacgcccccagtgatgatgaagagtttgttggcttccgagatgatgttcccatggaaaccctctcgtcagaggagagctgcgatagttttgactcactagagtcagggaaacaggtcgtggagtcagatttgagtgatgatggcaaagcatctttggtgagcgaggaagaggaagatgaagaagaagataaggctacccctagaagaagcaggtctagaagaagtagtattggtcttcgagtagcctttcagttccccaccaagaagctggccaacaaaccagataaaaacagttcttccgagcagttgttttctagcgcacgcttacagaatgagaaaaaaacaattcttgaaagaaagaaagactgtagacaggtgatacaaagggaagattctacctctgagtctgaggatgactctcgggatgagagccaggagagttcagatgctttgctgaaaaggaccatgaacatcaaggagaacaaagccatgcttgcccagttattggcggaattgaactcgatgccagatttcttcccagtacgaaccccaacctcagcttctaggaagaagacagtgaggcgggccttctcggagggacagatcacgcggcgtatgaacccaacccggagtgcgcggcctcctgagaagtttgctctagagaacttcactgtctcagccgctaaatttgcggaagagttttacagcttccgaagaaggaagacaattggggggaaatgccgggagtacagacgacgtcaccgtatatcttcttttcggccagtggaggatatcaccgaagaggacttagaaaatgttgccataactgttcgagataaaatctatgataaagttctgggtaacacgtgccatcagtgtcgacaaaagaccatcgacaccaagacagtgtgtcggaaccagggttgctgtggtgtgcgaggacagttctgtggaccatgcctgcggaaccgctatggggaggatgtcagatcggcattgctggacccggattgggtgtgtcccccctgtcgtgggatctgcaattgcagctactgtcggaagcgtgacggccgctgtgccacaggaatcctcattcatctggccaagttttatggttatgacaatgttaaggaatatctggagagcttacaaaaggagctggtagaagacaat

SEQ ID NO: 4454 - DNA, 1218 bp, Homo sapiens
  source 1..1218: mol_type = genomic DNA
atggttcactgtgccggctgcaaaaggcccatcctggaccgctttctcttgaacgtgctggacagggcctggcacgtcaagtgcgtccagtgctgtgaatgtaaatgcaacctgaccgagaagtgcttctccagggaaggcaaactctactgcaagaacgacttcttccggtgtttcggtaccaaatgcgcaggctgcgctcagggcatctcccctagcgacctggtgcggagagcgcggagcaaagtgtttcacctgaactgcttcacctgcatgatgtgtaacaagcagctctccactggcgaggaactctacatcatcgacgagaataagttcgtctgcaaagaggattacctaagtaacagcagtgttgccaaagagaacagccttcactcggccaccacgggcagtgaccccagtttgtctccggattcccaagacccgtcgcaggacgacgccaaggactcggagagcgccaacgtgtcggacaaggaagcgggtagcaacgagaatgacgaccagaacctgggcgccaagcggcggggaccgcgcaccaccatcaaagccaagcagctggagacgctgaaggccgccttcgctgctacacccaagcccacccgccacatccgcgagcagctggcgcaggagaccggcctcaacatgcgcgtcattcaggtctggttccagaaccggcgctccaaggagcggaggatgaagcagctgagcgccctgggcgcccggcgccacgccttcttccgcagtccgcgccggatgcggccgctggtggaccgcctggagccgggcgagctcatccccaatggtcccttctccttctacggagattaccagagcgagtactacgggcccgggggcaactacgacttcttcccgcaaggccccccgtcctcgcaggcccagacaccagtggacctacccttcgtgccgtcatctgggccgtccgggacgcccctgggtggcctggagcacccgctgccgggccaccacccgtcgagcgaggcgcagcggtttaccgacatcctggcgcacccacccggggactcgcccagccccgagcccagcctgcccgggcctctgcactccatgtcggccgaggtcttcggacccagcccgcccttctcgtcgctgtcggtcaacggtggggcgagctacggaaaccacctgtcccacccccccgaaatgaacgaggcggccgtgtgg

SEQ ID NO: 4455 - DNA, 1218 bp, Homo sapiens
  source 1..1218: mol_type = genomic DNA
atgctgttccacagtctgtcgggccccgaggtgcacggggtcatcgacgagatggaccgcagggccaagagcgaggctcccgccatcagctccgccatcgaccgcggcgacaccgagacgaccatgccgtccatcagcagtgaccgcgccgcgctgtgcgccggctgcgggggcaagatctcggaccgctactacctgctggcggtggacaagcagtggcacatgcgctgcctcaagtgctgcgagtgcaagctcaacctggagtcggagctcacctgtttcagcaaggacggtagcatctactgcaaggaagactactacaggcgcttctctgtgcagcgctgcgcccgctgccacctgggcatctcggcctcggagatggtgatgcgcgctcgggacttggtttatcacctcaactgcttcacgtgcaccacgtgtaacaagatgctgaccacgggcgaccacttcggcatgaaggacagcctggtctactgccgcttgcacttcgaggcgctgctgcagggcgagtaccccgcacacttcaaccatgccgacgtggcagcggcggccgctgcagccgcggcggccaagagcgcggggctgggcgcagcaggggccaaccctctgggtcttccctactacaatggcgtgggcactgtgcagaaggggcggccgaggaaacgtaagagcccgggccccggtgcggatctggcggcctacaacgctgcgctaagctgcaacgaaaacgacgcagagcacctggaccgtgaccagccatacccgagcagccagaagaccaagcgcatgcgcacgtccttcaagcaccaccagcttcggaccatgaagtcttactttgccattaaccacaaccccgacgccaaggacttgaagcagctcgcgcaaaagacgggcctcaccaagcgggtcctccaggtctggttccagaacgcccgagccaagttcaggcgcaacctcttacggcaggaaaacacgggcgtggacaagtcgacagacgcggcgctgcagacagggacgccatcgggcccggcctcggagctctccaacgcctcgctcagcccctccagcacgcccaccaccctgacagacttgactagccccaccctgccaactgtgacgtccgtcttaacttctgtgcctggcaacctggagggccatgagcctcacagcccctcacaaacgactcttaccaaccttttc

SEQ ID NO: 4456 - DNA, 1206 bp, Homo sapiens
  source 1..1206: mol_type = genomic DNA
atggaggcgcgcggggagctgggcccggcccgggagtcggcgggaggcgacctgctgctagcactgctggcgcggagggcggacctgcgccgagagatcccgctgtgcgctggctgtgaccagcacatcctggaccgcttcatcctcaaggctctggaccgccactggcacagcaagtgtctcaagtgcagcgactgccacacgccactggccgagcgctgcttcagccgaggggagagcgtttactgcaaggacgactttttcaagcgcttcgggaccaagtgcgccgcgtgccagctgggcatcccgcccacgcaggtggtgcgccgcgcccaggacttcgtgtaccacctgcactgctttgcctgcgtcgtgtgcaagcggcagctggccacgggcgacgagttctacctcatggaggacagccggctcgtgtgcaaggcggactacgaaaccgccaagcagcgagaggccgaggccacggccaagcggccgcgcacgaccatcaccgccaagcagctggagacgctgaagagcgcttacaacacctcgcccaagccggcgcgccacgtgcgcgagcagctctcgtccgagacgggcctggacatgcgcgtggtgcaggtttggttccagaaccgccgggccaaggagaagaggctgaagaaggacgccggccggcagcgctgggggcagtatttccgcaacatgaagcgctcccgcggcggctccaagtcggacaaggacagcgttcaggaggggcaggacagcgacgctgaggtctccttccccgatgagccttccttggcggaaatgggcccggccaatggcctctacgggagcttgggggaacccacccaggccttgggccggccctcgggagccctgggcaacttctccctggagcatggaggcctggcaggcccagagcagtaccgagagctgcgtcccggcagcccctacggtgtccccccatcccccgccgccccgcagagcctccctggcccccagcccctcctctccagcctggtgtacccagacaccagcttgggccttgtgccctcgggagcccccggcgggcccccacccatgagggtgctggcagggaacggacccagttctgacctatccacggggagcagcgggggttaccccgacttccctgccagccccgcctcctggctggatgaggtagaccacgctcagttc

SEQ ID NO: 4457 - DNA, 1191 bp, Homo sapiens
  source 1..1191: mol_type = genomic DNA
atgctgctggaaacggggctcgagcgcgaccgagcgaggcccggggccgccgccgtctgcaccttgggcgggactcgggagatcccgctgtgcgctggctgtgaccagcacatcctggaccgcttcatcctcaaggctctggaccgccactggcacagcaagtgtctcaagtgcagcgactgccacacgccactggccgagcgctgcttcagccgaggggagagcgtttactgcaaggacgactttttcaagcgcttcgggaccaagtgcgccgcgtgccagctgggcatcccgcccacgcaggtggtgcgccgcgcccaggacttcgtgtaccacctgcactgctttgcctgcgtcgtgtgcaagcggcagctggccacgggcgacgagttctacctcatggaggacagccggctcgtgtgcaaggcggactacgaaaccgccaagcagcgagaggccgaggccacggccaagcggccgcgcacgaccatcaccgccaagcagctggagacgctgaagagcgcttacaacacctcgcccaagccggcgcgccacgtgcgcgagcagctctcgtccgagacgggcctggacatgcgcgtggtgcaggtttggttccagaaccgccgggccaaggagaagaggctgaagaaggacgccggccggcagcgctgggggcagtatttccgcaacatgaagcgctcccgcggcggctccaagtcggacaaggacagcgttcaggaggggcaggacagcgacgctgaggtctccttccccgatgagccttccttggcggaaatgggcccggccaatggcctctacgggagcttgggggaacccacccaggccttgggccggccctcgggagccctgggcaacttctccctggagcatggaggcctggcaggcccagagcagtaccgagagctgcgtcccggcagcccctacggtgtccccccatcccccgccgccccgcagagcctccctggcccccagcccctcctctccagcctggtgtacccagacaccagcttgggccttgtgccctcgggagcccccggcgggcccccacccatgagggtgctggcagggaacggacccagttctgacctatccacggggagcagcgggggttaccccgacttccctgccagccccgcctcctggctggatgaggtagaccacgctcagttc

SEQ ID NO: 4458 - DNA, 1158 bp, Homo sapiens
  source 1..1158: mol_type = genomic DNA
atgacgcttaacatgaaggagacccgatggggtgccccagctccagagatcccgctgtgcgctggctgtgaccagcacatcctggaccgcttcatcctcaaggctctggaccgccactggcacagcaagtgtctcaagtgcagcgactgccacacgccactggccgagcgctgcttcagccgaggggagagcgtttactgcaaggacgactttttcaagcgcttcgggaccaagtgcgccgcgtgccagctgggcatcccgcccacgcaggtggtgcgccgcgcccaggacttcgtgtaccacctgcactgctttgcctgcgtcgtgtgcaagcggcagctggccacgggcgacgagttctacctcatggaggacagccggctcgtgtgcaaggcggactacgaaaccgccaagcagcgagaggccgaggccacggccaagcggccgcgcacgaccatcaccgccaagcagctggagacgctgaagagcgcttacaacacctcgcccaagccggcgcgccacgtgcgcgagcagctctcgtccgagacgggcctggacatgcgcgtggtgcaggtttggttccagaaccgccgggccaaggagaagaggctgaagaaggacgccggccggcagcgctgggggcagtatttccgcaacatgaagcgctcccgcggcggctccaagtcggacaaggacagcgttcaggaggggcaggacagcgacgctgaggtctccttccccgatgagccttccttggcggaaatgggcccggccaatggcctctacgggagcttgggggaacccacccaggccttgggccggccctcgggagccctgggcaacttctccctggagcatggaggcctggcaggcccagagcagtaccgagagctgcgtcccggcagcccctacggtgtccccccatcccccgccgccccgcagagcctccctggcccccagcccctcctctccagcctggtgtacccagacaccagcttgggccttgtgccctcgggagcccccggcgggcccccacccatgagggtgctggcagggaacggacccagttctgacctatccacggggagcagcgggggttaccccgacttccctgccagccccgcctcctggctggatgaggtagaccacgctcagttc

SEQ ID NO: 4459 - DNA, 1206 bp, Homo sapiens
  source 1..1206: mol_type = genomic DNA
atgatggtgcactgcgccggttgcgagcggcccatcctcgaccgctttctgctgaacgtgctggaccgcgcgtggcacatcaaatgtgttcagtgctgcgagtgcaaaaccaacctctcggagaagtgcttctcgcgcgagggcaagctctactgcaaaaatgactttttcaggcgctttggcacgaaatgcgccggctgcgcgcaaggcatctcgcccagcgacctggtgcgcaaggcccggagcaaagtctttcacctcaactgtttcacctgcatggtgtgtaacaagcagctgtccaccggcgaggagctctacgtcatcgacgagaacaagttcgtgtgcaaagacgactacctgagctcatccagcctcaaggagggcagcctcaactcagtgtcatcctgtacggaccgcagtttgtccccggacctccaggacgcactgcaggacgaccccaaagagacggacaactcgacctcgtcggacaaggagacggccaacaacgagaacgaggagcagaactcgggcaccaagcggcgcggcccccgcaccaccatcaaggccaagcagctggagacgctcaaggctgccttcgccgccacgcccaagcccacgcgccacatccgcgagcagctggcgcaggagaccggcctcaacatgcgcgtcatccaggtgtggtttcagaaccgacggtccaaagaacgccggatgaaacagctgagcgccctaggcgcccggaggcacgccttcttccggagtccgcggcgcatgcgtccgctgggcggccgcttggacgagtctgagatgttggggtccaccccgtacacctactacggagactaccaaggcgactactacgcgccgggaagcaactacgacttcttcgcgcacggcccgccttcgcaggcgcagtccccggccgactccagcttcctggcggcctctggccccggctcgacgccgctgggagcgctggaaccgccgctcgccggcccgcacgccgcggacaaccccaggttcaccgacatgatctcgcacccggacacaccgagccccgagccaggcctgccgggcacgctgcaccccatgcccggcgaggtattcagcggcgggcccagcccgcccttcccaatgagcggcaccagcggctacagcggacccctgtcgcatcccaaccccgagctcaacgaagccgccgtgtgg

SEQ ID NO: 4460 - DNA, 1176 bp, Homo sapiens
  source 1..1176: mol_type = genomic DNA
atgtactggaagcatgagaacgccgccccggcgttgcccgagggctgccggctgccggccgagggcggccccgccaccgaccaggtgatggcccagccagggtccggctgcaaagcgaccacccgctgtcttgaagggaccgcgccgcccgccatggctcagtctgacgccgaggccctggcaggagctctggacaaggacgagggtcaggcctccccatgtacgcccagcacgccatctgtctgctcaccgccctctgccgcctcctccgtgccgtctgcaggcaagaacatctgctccagctgcggcctcgagatcctggaccgatatctgctcaaggtcaacaacctcatctggcacgtgcggtgcctcgagtgctccgtgtgtcgcacgtcgctgaggcagcagaacagctgctacatcaagaacaaggagatcttctgcaagatggactacttcagccgattcgggaccaagtgtgcccggtgcggccgacagatctacgccagcgactgggtgcggagagctcgcggcaacgcctaccacctggcctgcttcgcctgcttctcgtgcaagcgccagctgtccactggtgaggagttcggcctggtcgaggagaaggtgctctgccgcatccactacgacaccatgattgagaacctcaagagggccgccgagaacgggaacggcctcacgttggagggggcagtgccctcggaacaggacagtcaacccaagccggccaagcgcgcgcggacgtccttcaccgcggaacagctgcaggttatgcaggcgcagttcgcgcaggacaacaaccccgacgctcagacgctgcagaagctggcggacatgacgggcctcagccggagagtcatccaggtgtggtttcaaaactgccgggcgcgtcataaaaagcacacgccgcaacacccagtgccgccctcgggggcgcccccgtcccgccttccctccgccctgtccgacgacatccactacaccccgttcagcagccccgagcgggcgcgcatggtcaccctgcacggctacattgagagtcaggtacagtgcgggcaggtgcactgccggctgccttacaccgcaccccccgtccacctcaaagccgatatggatgggccgctctccaaccggggtgagaaggtcatcctttttcagtac

SEQ ID NO: 4461 - DNA, 1098 bp, Homo sapiens
  source 1..1098: mol_type = genomic DNA
atgcgccgggggttgtgccggcgcagcgctgagaatcccgacgcggggccggtgatggcccagccagggtccggctgcaaagcgaccacccgctgtcttgaagggaccgcgccgcccgccatggctcagtctgacgccgaggccctggcaggagctctggacaaggacgagggtcaggcctccccatgtacgcccagcacgccatctgtctgctcaccgccctctgccgcctcctccgtgccgtctgcaggcaagaacatctgctccagctgcggcctcgagatcctggaccgatatctgctcaaggtcaacaacctcatctggcacgtgcggtgcctcgagtgctccgtgtgtcgcacgtcgctgaggcagcagaacagctgctacatcaagaacaaggagatcttctgcaagatggactacttcagccgattcgggaccaagtgtgcccggtgcggccgacagatctacgccagcgactgggtgcggagagctcgcggcaacgcctaccacctggcctgcttcgcctgcttctcgtgcaagcgccagctgtccactggtgaggagttcggcctggtcgaggagaaggtgctctgccgcatccactacgacaccatgattgagaacctcaagagggccgccgagaacgggaacggcctcacgttggagggggcagtgccctcggaacaggacagtcaacccaagccggccaagcgcgcgcggacgtccttcaccgcggaacagctgcaggttatgcaggcgcagttcgcgcaggacaacaaccccgacgctcagacgctgcagaagctggcggacatgacgggcctcagccggagagtcatccaggtgtggtttcaaaactgccgggcgcgtcataaaaagcacacgccgcaacacccagtgccgccctcgggggcgcccccgtcccgccttccctccgccctgtccgacgacatccactacaccccgttcagcagccccgagcgggcgcgcatggtcaccctgcacggctacattgagagtcatcctttttcagtactaacgctgccggcacttccgcatctgcccgtgggcgccccacagctgcccctcagccgc

SEQ ID NO: 4462 - DNA, 1131 bp, Homo sapiens
  source 1..1131: mol_type = genomic DNA
atgtactggaagcatgagaacgccgccccggcgttgcccgagggctgccggctgccggccgagggcggccccgccaccgaccaggtgatggcccagccagggtccggctgcaaagcgaccacccgctgtcttgaagggaccgcgccgcccgccatggctcagtctgacgccgaggccctggcaggagctctggacaaggacgagggtcaggcctccccatgtacgcccagcacgccatctgtctgctcaccgccctctgccgcctcctccgtgccgtctgcaggcaagaacatctgctccagctgcggcctcgagatcctggaccgatatctgctcaaggtcaacaacctcatctggcacgtgcggtgcctcgagtgctccgtgtgtcgcacgtcgctgaggcagcagaacagctgctacatcaagaacaaggagatcttctgcaagatggactacttcagccgattcgggaccaagtgtgcccggtgcggccgacagatctacgccagcgactgggtgcggagagctcgcggcaacgcctaccacctggcctgcttcgcctgcttctcgtgcaagcgccagctgtccactggtgaggagttcggcctggtcgaggagaaggtgctctgccgcatccactacgacaccatgattgagaacctcaagagggccgccgagaacgggaacggcctcacgttggagggggcagtgccctcggaacaggacagtcaacccaagccggccaagcgcgcgcggacgtccttcaccgcggaacagctgcaggttatgcaggcgcagttcgcgcaggacaacaaccccgacgctcagacgctgcagaagctggcggacatgacgggcctcagccggagagtcatccaggtgtggtttcaaaactgccgggcgcgtcataaaaagcacacgccgcaacacccagtgccgccctcgggggcgcccccgtcccgccttccctccgccctgtccgacgacatccactacaccccgttcagcagccccgagcgggcgcgcatggtcaccctgcacggctacattgagagtcatcctttttcagtactaacgctgccggcacttccgcatctgcccgtgggcgccccacagctgcccctcagccgc

SEQ ID NO: 4463 - DNA, 528 bp, Homo sapiens
  source 1..528: mol_type = genomic DNA
atgattgagaacctcaagagggccgccgagaacgggaacggcctcacgttggagggggcagtgccctcggaacaggacagtcaacccaagccggccaagcgcgcgcggacgtccttcaccgcggaacagctgcaggttatgcaggcgcagttcgcgcaggacaacaaccccgacgctcagacgctgcagaagctggcggacatgacgggcctcagccggagagtcatccaggtgtggtttcaaaactgccgggcgcgtcataaaaagcacacgccgcaacacccagtgccgccctcgggggcgcccccgtcccgccttccctccgccctgtccgacgacatccactacaccccgttcagcagccccgagcgggcgcgcatggtcaccctgcacggctacattgagagtcaggtacagtgcgggcaggtgcactgccggctgccttacaccgcaccccccgtccacctcaaagccgatatggatgggccgctctccaaccggggtgagaaggtcatcctttttcagtac

SEQ ID NO: 4464 - DNA, 1038 bp, Homo sapiens
  source 1..1038: mol_type = genomic DNA
atgtcagaggagtgcgggcggactacagccctggcggccgggaggactcgcaaaggcgccggggaagagggactggtgagccccgagggagcgggggacgaggactcgtgctcctcctcggccccgctgtccccgtcgtcctcgccccggtccatggcctcgggctccggctgccctcctggcaagtgtgtgtgcaacagttgcggcctggagatcgtggacaaataccttctcaaggtgaatgacctatgctggcatgtccggtgtctctcctgcagtgtttgcagaacctccctaggaaggcacaccagctgttatattaaagacaaagacattttctgcaaacttgattatttcagaaggtatggaactcgctgctctcgatgtgggagacacatccattctactgactgggtccggagagccaaggggaatgtctatcacttggcatgctttgcctgcttttcctgcaaaaggcaactttccacaggagaggagtttgctttggtggaagagaaagtcctctgcagagtacattatgactgcatgctggataatttaaaaagagaagtagaaaatgggaatgggattagtgtggaaggtgccctcctcacagagcaagatgttaaccatccaaaaccagcaaaaagagctcggaccagctttacagcagatcagcttcaggttatgcaagcacaatttgctcaggacaacaacccagatgcacagacactccagaaattggcagaaaggacaggcttgagcagacgtgtgatacaggtgtggtttcagaattgtagagcacgccacaagaaacacgtcagtcctaatcactcatcctccaccccagtcacagcagtcccaccctccaggctgtctccacccatgttagaagaaatggcttattctgcctacgtgccccaagatggaacgatgttaactgcgctgcatagttatatggatgctcattcaccaacaactcttggactccagcccttgttaccccattcaatgacacaactgccaataagtcatacc

SEQ ID NO: 4465 - DNA, 1068 bp, Homo sapiens
  source 1..1068: mol_type = genomic DNA
atgcagattctgagcaggtgtcaggggctcatgtcagaggagtgcgggcggactacagccctggcggccgggaggactcgcaaaggcgccggggaagagggactggtgagccccgagggagcgggggacgaggactcgtgctcctcctcggccccgctgtccccgtcgtcctcgccccggtccatggcctcgggctccggctgccctcctggcaagtgtgtgtgcaacagttgcggcctggagatcgtggacaaataccttctcaaggtgaatgacctatgctggcatgtccggtgtctctcctgcagtgtttgcagaacctccctaggaaggcacaccagctgttatattaaagacaaagacattttctgcaaacttgattatttcagaaggtatggaactcgctgctctcgatgtgggagacacatccattctactgactgggtccggagagccaaggggaatgtctatcacttggcatgctttgcctgcttttcctgcaaaaggcaactttccacaggagaggagtttgctttggtggaagagaaagtcctctgcagagtacattatgactgcatgctggataatttaaaaagagaagtagaaaatgggaatgggattagtgtggaaggtgccctcctcacagagcaagatgttaaccatccaaaaccagcaaaaagagctcggaccagctttacagcagatcagcttcaggttatgcaagcacaatttgctcaggacaacaacccagatgcacagacactccagaaattggcagaaaggacaggcttgagcagacgtgtgatacaggtgtggtttcagaattgtagagcacgccacaagaaacacgtcagtcctaatcactcatcctccaccccagtcacagcagtcccaccctccaggctgtctccacccatgttagaagaaatggcttattctgcctacgtgccccaagatggaacgatgttaactgcgctgcatagttatatggatgctcattcaccaacaactcttggactccagcccttgttaccccattcaatgacacaactgccaataagtcatacc

SEQ ID NO: 4466 - DNA, 1008 bp, Homo sapiens
  source 1..1008: mol_type = genomic DNA
atgcagacgctccaaacgccctctccacttcggatgaagccagcatctagtagggtctccggccctcaagaagccatgctctttcacgggatctccggaggccacatccaaggcatcatggaggagatggagcgcagatccaagactgaggcccgtctggccaaaggcgcccagctcaacggccgcgacgcgggcatgcccccgctcagcccggagaagcccgccctgtgcgccggctgcgggggcaagatctcggacaggtactatctgctggctgtggacaaacagtggcatctgagatgcctgaagtgctgtgaatgtaagctggccctcgagtccgagctcacctgctttgccaaggacggtagcatttactgcaaggaggattactacagaaggttctctgtgcagagatgtgcccgctgccaccttggcatttccgcctcggagatggtcatgcgcgcccgagactctgtctaccacctgagctgcttcacctgctccacttgcaacaagactctgaccacgggcgaccatttcggcatgaaggacagcctggtgtactgccgcgcccacttcgagaccctcttgcaaggagagtatccaccgcagctgagctacacggagctggcggccaagagcggcggcctggccctgccttacttcaacggtacgggcaccgtgcagaaagggcggccccggaagcggaagagcccagcgctgggagtggacatcgtcaattacaactcaggttgtaatgagaatgaggcagaccacttggaccgggaccagcagccttatccaccctcgcagaagaccaagcgcatgcgaacctctttcaagcatcaccagctccggaccatgaaatcctactttgccatcaaccacaacccggatgccaaggacctcaagcagcttgcccagaaaacaggtctgaccaaaagagttttgcagggagaacaaatcttggggcattacagccaaacatcccgacgtttgaaaattccc

SEQ ID NO: 4467 - DNA, 1164 bp, Homo sapiens
  source 1..1164: mol_type = genomic DNA
atgctgaacggtaccactctagaggcagccatgctctttcacgggatctccggaggccacatccaaggcatcatggaggagatggagcgcagatccaagactgaggcccgtctggccaaaggcgcccagctcaacggccgcgacgcgggcatgcccccgctcagcccggagaagcccgccctgtgcgccggctgcgggggcaagatctcggacaggtactatctgctggctgtggacaaacagtggcatctgagatgcctgaagtgctgtgaatgtaagctggccctcgagtccgagctcacctgctttgccaaggacggtagcatttactgcaaggaggattactacagaaggttctctgtgcagagatgtgcccgctgccaccttggcatttccgcctcggagatggtcatgcgcgcccgagactctgtctaccacctgagctgcttcacctgctccacttgcaacaagactctgaccacgggcgaccatttcggcatgaaggacagcctggtgtactgccgcgcccacttcgagaccctcttgcaaggagagtatccaccgcagctgagctacacggagctggcggccaagagcggcggcctggccctgccttacttcaacggtacgggcaccgtgcagaaagggcggccccggaagcggaagagcccagcgctgggagtggacatcgtcaattacaactcaggttgtaatgagaatgaggcagaccacttggaccgggaccagcagccttatccaccctcgcagaagaccaagcgcatgcgaacctctttcaagcatcaccagctccggaccatgaaatcctactttgccatcaaccacaacccggatgccaaggacctcaagcagcttgcccagaaaacaggtctgaccaaaagagttttgcaggtttggttccaaaacgcacgagccaaattcagaaggaaccttttgcggcaggagaatgggggtgttgataaagctgacggcacgtcgcttccggccccgccctcagcagacagcggagctctcactccacccggcactgcgaccactttaacagacctgaccaatcccactatcactgtagtgacatccgtgacctctaacatggacagccacgaatccggaagcccctcacaaactaccttaacaaaccttttc

SEQ ID NO: 4468 - DNA, 2307 bp, Homo sapiens
  source 1..2307: mol_type = genomic DNA
atgccagctagttggacctcaccccagaaatcctcagccctggctccagaggatcatggcagctcctatgagggatcagtgtccttcagggatgtggctatcgatttcagcagagaggaatggcggcacctggacctttctcagagaaacctgtaccgggatgtgatgctggagacctacagccacctgctctcagtagggtatcaagttcctaaaccagaggtggtcatgttggagcaaggaaaggaaccatgggcactgcagggtgagaggccacgtcacagctgcccaggagagaaattatgggaccataatcaacatagaaaaatcatcggttataaaccagcttcctctcaagatcaaaaaatttattctggggaaaaatcctatgagtgtgctgaatttggaaagagcttcacctggaagtcacagttcaaggtacatctgaaagttcctacaggagaaaaactctatgtatgtattgaatgtgggagggcttttgtacagaagccagaattcatcacacatcagaaaacccatatgagagagaagccctataagtgcaatgaatgtggaaaatccttttttcaagtatcgtctcttttcaggcatcacagaattcataccggagaaaaactatatgaatgtagtgaatgtgggaaaggtttcccttataactcagatctcagtatacatgagaaaattcatactggagagagacaccatgaatgcactgactgtggcaaagcgttcacacaaaagtccacactcaagattcatcagaaaatccatacaggcgagagatcctacatctgtattgaatgcgggcaggccttcatccagaaaacacaattgattgcacaccgaagaattcatagtggagaaaaaccatatgaatgcaataactgtggcaaatccttcatttccaagtcacaacttcaggtacatcaacgtgttcacacaagagtgaagccctatatatgtaccgaatatgggaaggtcttcagcaataattccaacctcattacacatgagaagattcaaagtagagagaaatcttccatatgtactgagtgtgggaaggcctttacctacaggtcagagttgattattcatcagagaattcacactggagagaaaccttatgaatgcagtgactgtgggagagccttcactcagaagtcagcactcacagtgcatcagagaattcatacaggagaaaaatcgtatatatgcatgaaatgtggactggccttcatccggaaggcacacttgattacacatcaaataattcatactggagagaaaccttataaatgtggtcactgtgggaaattgtttacttccaagtcacaactccatgttcataaacgaattcacacaggagaaaagccctatgtatgcaataaatgtgggaaggcattcaccaaccggtcaaatctcattacacatcagaaaactcatacaggagagaaatcttatatatgttccaaatgtggaaaggccttcacccagaggtcagacttgattacacatcagagaatccatactggggagaagccttatgaatgcaatacttgtggaaaagcctttactcagaagtcaaatcttaatatacatcagaaaattcacactggagagagacagtatgaatgccacgaatgtgggaaagccttcaaccagaaatcaatactcattgttcatcagaaaattcatacaggagagaaaccctatgtatgcactgagtgtggaagagctttcatccgcaagtcaaactttattactcatcaaagaattcatactggagagaagccttatgaatgcagtgactgtgggaagtcctttacctccaagtctcagctcctggtgcatcagccagttcacacaggagagaaaccctatgtgtgtgccgagtgtgggaaagcctttagtggcaggtcaaatctcagtaagcaccagaaaactcataccggagaaaagccctacatttgttctgaatgtgggaagacctttcgacagaagtcagagttgattacacatcacagaattcatactggagagaaaccttatgagtgcagtgactgtgggaagtctttcactaaaaaatcacagctccaagtgcatcagcgaattcacactggagagaagccttacgtgtgtgctgagtgtgggaaggcctttagcaacaggtccaatttgaataaacatcagacaacacacactggagacaaaccctacaagtgtggcatctgtgggaaaggcttcgttcagaaatcagtgttcagtgttcatcagagcagccacgct

SEQ ID NO: 4469 - DNA, 1590 bp, Homo sapiens
  source 1..1590: mol_type = genomic DNA
atgggtagcaacagtgggcaggctggccgccacatctataaatccctagctgatgatggcccctttgactctgtggagccgcctaaaagacccaccagcagactcatcatgcacagcatggccatgttcggaagagagttctgctacgcggtggaggcagcgtatgtgaccccagtcctgctcagcgtaggtctgcccagcagcctgtacagcattgtgtggttcctcagccccatcctgggattcctgctgcagcccgtggtcggatcggccagcgaccactgccggtccaggtggggccgccggagaccctacatcctcaccctgggagtcatgatgctcgtgggcatggctctgtacctcaatggggctactgttgtagcagctttgattgctaacccaaggaggaagctggtttgggccataagtgtcaccatgataggtgtcgttctctttgattttgctgccgacttcattgatgggcccatcaaagcctacttatttgatgtctgctcccatcaggacaaggagaagggcctccactaccatgccctcttcacaggttttggaggtgccctgggttaccttttgggtgctatagactgggcccatctggagctgggaagactgttgggtacagaattccaggtcatgttcttcttctctgcattggtgctcactttgtgttttactgttcatctgtgcagtatctctgaagccccacttacagaggttgcaaagggcattcccccacagcaaacccctcaggaccctccattgtcatcagatggaatgtacgagtatggttctatcgagaaagttaaaaatggttacgtaaatccagagctggcaatgcagggagcaaaaaacaaaaatcatgctgaacagactcgcagggcaatgacattaaagtcactgctgagagcactggtgaacatgcctcctcactaccgctacctttgcatcagccacctcattggatggacagccttcctgtccaacatgctgttcttcacagatttcatgggccagattgtgtaccgcggggatccctatagtgcacacaactccacagagtttctcatctacgaaagaggagtcgaggttggatgttggggcttgtgcatcaactccgtgttttcctcactttattcttactttcagaaagttttggtatcctacattggattaaagggtctttacttcacgggatatttgctgtttggcctggggacgggatttattgggctcttcccgaatgtctactccaccctggtcctgtgcagcctgtttggtgtaatgtccagcaccctgtacactgtgccctttaacctcattactgagtaccaccgcgaggaagaaaaggagaggcagcaggccccaggaggggacccagacaacagcgtgagagggaagggcatggactgcgccaccctcacatgcatggtgcagctggctcagatcctggtcggaggtggcctgggctttctggtcaacacagccgggaccgttgtcgtcgtggtgatcacagcgtctgcggtggcactgataggctgttgctttgtcgctctctttgttagatatgtggat

SEQ ID NO: 4470 - DNA, 729 bp, Homo sapiens
  source 1..729: mol_type = genomic DNA
atgggtagcaacagtgggcaggctggccgccacatctataaatccctagctgatgatggcccctttgactctgtggagccgcctaaaagacccaccagcagactcatcatgcacagcatggccatgttcggaagagagttctgctacgcggtggaggcagcgtatgtgaccccagtcctgctcagcgtaggtctgcccagcagcctgtacagcattgtgtggttcctcagccccatcctgggattcctgctgcagcccgtggtcggatcggccagcgaccactgccggtccaggtggggccgccggagaccctacatcctcaccctgggagtcatgatgctcgtgggcatggctctgtacctcaatggggctactgttgtagcagctttgattgctaacccaaggaggaagctggtttgggccataagtgtcaccatgataggtgtcgttctctttgattttgctgccgacttcattgatgggcccatcaaagcctacttatttgatgtctgctcccatcaggacaaggagaagggcctccactaccatgccctcttcacagactcgcagggcaatgacattaaagtcactgctgagagcactggtgaacatgcctcctcactaccgctacctttgcatcagccacctcattggatggacagccttcctgtccaacatgctgttcttcacagatttcatgggccagattgtgtaccgcggggatcccta

SEQ ID NO: 4471 - DNA, 2016 bp, Homo sapiens
  source 1..2016: mol_type = genomic DNA
atggagagtagaaaactgatttctgctacagacattcagtactctggcagtctgctgaactccttgaatgagcaacgtggccatggactcttctgtgatgttaccgttattgtggaagaccgaaaattccgggctcacaagaatattctttcagcttctagtacctacttccatcagctcttctctgttgctgggcaagttgttgaactgagctttataagagcagagatctttgcagaaattctcaattatatctatagttctaaaattgttcgtgttagatcagatttgcttgatgagttaattaaatcagggcagttattaggagtgaaatttatagcagagcttggtgtcccattgtcacaggttaaaagcatctcaggtacagcgcaggatggtaatactgagcctttacctcctgattctggtgacaagaaccttgtaatacagaaatcaaaagatgaagcccaagataatggggctactataatgcctattataacagagtctttttcattatctgccgaagattatgaaatgaaaaagatcattgttaccgattctgatgatgatgatgatgatgtcattttttgctccgagattctgcccacaaaggagactttgccgagtaataacacagtggcacaggtccaatctaacccaggccctgttgctatttcagatgttgcacctagtgctagcaataactcgccccctttaacaaatatcacacctactcagaaacttcctactcctgtgaatcaggcaactttgagccaaacacaaggaagtgaaaaattgttggtatcttcagctccaacacatctgactcccaatattattttgttaaatcagacaccactttctacaccaccaaatgtcagttcttcacttccaaatcatatgccctcttcaatcaatttacttgtgcagaatcagcagacaccaaacagtgctattttaacaggaaacaaggccaatgaagaggaggaggaggaaataatagatgatgatgatgacactattagctccagtcctgactcggccgtcagtaatacatctttggtcccacaggctgatacctcccaaaataccagttttgatggatcattaatacagaagatgcagattcctacacttcttcaagaaccactttccaattccttaaaaatttcagatataattactagaaatactaatgatccaggcgtaggatcaaaacatctaatggagggtcagaagatcattactttagatacagctactgaaattgaaggcttatcgactggttgcaaggtttatgcaaatatcggtgaagatacttatgatatagtgatccctgtcaaagatgaccctgatgaaggggaggccagacttgagaatgaaataccaaaaacgtctggcagcgagatggcaaacaaacgtatgaaagtaaaacatgatgatcactatgagttaatagtagatggaagggtctattatatctgtattgtatgcaaaaggtcatatgtctgtctgacaagcttgcggagacattttaacattcattcttgggagaagaagtatccgtgccgttactgtgagaaggtatttcctcttgcagaatatcgcacaaagcatgaaattcatcacacaggggagcgaaggtatcagtgtttggcctgtggcaaatctttcatcaactatcagtttatgtcttcacatataaagtcagttcatagtcaagatccttctggggactcaaagctttatcgtttacatccatgcaggtctttacaaatcagacaatatgcatatctttccgatagatcaagcactattcctgcaatgaaggatgatggtattgggtataaggttgacactggaaaagaacctccagtagggaccactacatctactcagaacaagccaatgacctgggaagatatttttattcagcaggaaaatgattcaatttttaaacaaaatgtaacagatggcagtactgagtttgaatttataataccagagtcttac

SEQ ID NO: 4472 - DNA, 1551 bp, Homo sapiens
  source 1..1551: mol_type = genomic DNA
atggcggccctaggccctagcagccagaatgtcactgaatacgtcgttcgagttcctaagaatacaaccaaaaaatataacatcatggcttttaatgcagccgacaaagtcaactttgctacgtggaatcaggctcggctggagcgggacttgagcaacaagaaaatctaccaagaggaggagatgcccgaatcgggcgcgggcagtgagttcaaccgcaagcttcgggaggaggctcggaggaagaagtacggcatcgtcctcaaggagttccggcccgaggaccagccctggctgctccgggtcaacggcaaatcaggcaggaagttcaagggcatcaagaagggaggcgtaacagagaacacgtcctactacatcttcacccagtgccccgacggggccttcgaggccttccccgtgcacaactggtacaatttcacaccgctggcccggcatcgcacgctcactgccgaggaggccgaggaggagtgggagaggaggaacaaggtgctgaaccacttcagcatcatgcagcagcggcggctcaaggatcaggaccaggacgaggatgaggaggagaaggagaaacgtggccgcaggaaggcgagcgagctgcgcatccacgacctggaggacgacctggagatgtcgtccgatgccagtgatgccagtggtgaggaggggggcagagtccccaaggccaagaagaaggcgccgctggccaagggcggcaggaaaaagaagaagaagaagggttcagacgacgaggccttcgaggacagcgatgatggggacttcgagggccaagaggtggactacatgtcagacggctccagtagctcccaagaagagcctgagagcaaggccaaggcgccgcagcaggaggaggggcccaagggtgtcgatgagcagagcgacagtagtgaggagagtgaggaggagaagccgcctgaggaggacaaggaggaggaggaggagaagaaggcacccaccccgcaggagaagaagcgcaggaaagacagcagcgaggagtcggacagctcagaggagagcgacattgacagcgaggcctcctcagccctcttcatggcgaagaagaagacgccacccaagagagagcggaagccgtcgggagggagctcaaggggcaacagccgcccaggcacgcccagcgcagagggtggcagcacctcctccaccctgcgggcggctgccagcaaactcgagcaagggaagcgggtgagcgagatgcctgcagccaagcggttgcggctggacacgggaccccagagcctgtctgggaagtcgacaccccagccaccatcaggcaagacaacacccaacagcggcgacgtgcaggtgactgaggatgccgtgcgccgctacctgacacggaagcccatgaccactaaggacctgctgaaaaagttccagaccaagaagacagggctgagcagcgagcagacagtgaacgtgttggcccagatcctcaagcgactcaaccccgagcgcaagatgatcaacgacaaaatgcacttctccctcaaggag

SEQ ID NO: 4473 - DNA, 747 bp, Homo sapiens
  source 1..747: mol_type = genomic DNA
atggccgagcgcggggaactcgacttgaccggcgccaaacagaacacaggagtgtggctagtcaaggttcctaaatatttgtcacagcaatgggctaaagcctctggaagaggtgaagttgggaaactgcggattgccaagactcaaggaaggactgaggtgtcatttactttgaatgaggatcttgcaaatattcatgatattggtggaaaaccagcttcagtcagtgctcctagagaacatccatttgtcttgcaaagtgttggaggacagacattaacagtatttactgagagctcatcagataagctgtcattggaaggaatagtggtacaaagagctgaatgccgaccagctgccagtgaaaactacatgcgattaaaaagattgcaaatagaagagtcttccaaaccagtgaggctatcacaacagctggacaaagttgtaacaaccaattacaaacctgttgctaatcatcaatacaatatcgaatatgaaaggaaaaagaaagaagacggaaagcgagctcgagctgataaacaacatgttttagacatgctattttcagcctttgagaaacatcaatactataatcttaaggacttggtggacatcacaaagcaacctgtggtgtacctgaaggaaatcttaaaagaaattggtgttcagaatgtaaaagggatccacaaaaacacatgggagctgaagccagagtacagacactatcaaggagaagaaaagagtgac

SEQ ID NO: 4474 - DNA, 609 bp, Homo sapiens
  source 1..609: mol_type = genomic DNA
atggcacatgtttcttcagaaactcaagatgtttcccccaaagatgaattaactgcttcagaagcctccactaggtctccattgtgtgaacacaccttccctggggactcagacttacggtcaatgattgaagaacatgcttttcaggttttgtcacaaggatccttgttagaaagtccaagttacacagtttgtgtctctgagccagataaagatgatgattttctttctctgaactttcccaggaaactttggaaaatagtggaaagtgaccaattcaagtctatttcatgggatgagaatggaacttgcatagtgattaatgaagaactcttcaagaaagaaattttggaaacaaaggctccttacagaatatttcaaactgatgctatcaaaagttttgttcgacagctcaacctttatggatttagtaaaattcaacagaattttcaaagatctgcctttctagccacctttctgtcagaagagaaagaatcgtctgtcttaagcaagatacgcttcaccaaaatgaaactttccagatcttcaacttatgaaaacaggtatttatgttgcaacttacatttaaaagatgagtcgaattactca

SEQ ID NO: 4475 - DNA, 1203 bp, Homo sapiens
  source 1..1203: mol_type = genomic DNA
atggcacatgtttcttcagaaactcaagatgtttcccccaaagatgaattaactgcttcagaagcctccactaggtctccattgtgtgaacacaccttccctggggactcagacttacggtcaatgattgaagaacatgcttttcaggttttgtcacaaggatccttgttagaaagtccaagttacacagtttgtgtctctgagccagataaagatgatgattttctttctctgaactttcccaggaaactttggaaaatagtggaaagtgaccaattcaagtctatttcatgggatgagaatggaacttgcatagtgattaatgaagaactcttcaagaaagaaattttggaaacaaaggctccttacagaatatttcaaactgatgctatcaaaagttttgttcgacagctcaacctttatggatttagtaaaattcaacagaattttcaaagatctgcctttctagccacctttctgtcagaagagaaagaatcgtctgtcttaagcaagttaaagttctattataatccaaatttcaagcgtggctatccccaacttttagtaagagtgaagagaagaattggtgttaaaaatgcttcacctatatctactttattcaacgaagatttcaacaagaagcattttagagcaggggctaacatggagaatcataattctgccttagctgctgaagctagtgaagaaagtttattttcagcctctaaaaatttaaatatgcctctaacaagggaatcttctgtcagacagataattgcaaattcatctgtccccattagaagtggtttccctcctccttcaccttcaacctcagttggaccatcagaacaaattgcaacagatcaacatgctattttaaatcagttgaccactattcatatgcactctcatagtacctacatgcaagcaaggggccacattgtgaattttattacaaccacaacttctcaataccacatcatatctcccttacaaaatggttattttgggctgacagtggaaccatctgctgttcccacacgatatcctctggtatcagtcaatgaggctccatatcgtaacatgctaccagcaggcaacccgtggttgcaaatgcctacgatcgctgatagatcagctgcccctcattccaggctagctcttcaaccatcaccactggacaaatatcaccctaattacaac

SEQ ID NO: 4476 - DNA, 1530 bp, Homo sapiens
  source 1..1530: mol_type = genomic DNA
atgttgcctttggagaaggcgtttgcctcccccaggagctccccagccccgccggatctgcccacgccggggtcagcagccggagtccagcaggaagaacccgagaccatccctgagaggacccctgctgacctggagttctcccgcctgcgtttccgggaatttgtctaccaggaggctgccgggccccaccagaccctggcccggctgcatgagctgtgccgccagtggctgatgcctgaggcgcgctccaaggagcagatgctggagctgctggtgctggagcagttcctgggcatcctgcctgataaggtccggccctgggtggtggcacagtaccctgagagctgcaagaaggcagcctccctggtggagggcctcgctgatgtcctggaagagccagggatgctgctgggctcccctgcgggctcatcctcaattcttagcgatggagtgtacgagaggcacatggaccctctgctgctaccaggcgagctcgcgagccccagccaggcccttggagctggggagatcccggcaccttctgagacaccctggctttctccggaccccctgtttctggaacagaggagggtcagagaagcaaagaccgaagaggacggccctgccaacaccgagcagaagctgaagtcctttccagaggaccctcagcacctgggggagtggggccacctggaccctgccgaggagaacctgaagagctaccggaagctgctcctgtgggggtatcagctttcccagcctgacgctgcctccaggctggacactgaggaactccggttggtggaaagagatccacaaggaagcagcctcccagaaggcgggaggcggcaggagagcgctgggtgcgcctgcgaggaggccgcccccgcgggggtgctgcctgagctgcctacggaggcgccccctggggacgcccttgccgatcccccgtcgggcaccactgaggaggaggaagagcagcctgggaaggccccggacccgcaggacccccaggacgcggagtccgactctgccaccggatcgcagaggcagtccgtcatccagcagcctgccccggacaggggcacggcgaaactgggaaccaagaggccgcaccccgaggatggggacgggcagagcctcgagggcgtctctagctccggcgacagcgcagggctggaggccgggcagggccctggggctgacgagccgggcttgtcccgcgggaagccctatgcctgcggcgagtgcggggaggccttcgcgtggctctcgcacctgatggagcaccacagcagccatggcggccggaagcgctacgcctgtcagggctgctggaagaccttccacttcagcctggccctagccgagcaccagaagacccacgagaaggagaaaagctacgcgctggggggcgcccggggcccccaaccgtccacccgcgaagcccaggcgggggctagggcgggcggtcccccagagagcgtggagggcgaggctccccccgcacccccagaggcgcagagg

SEQ ID NO: 4477 - DNA, 1122 bp, Homo sapiens
  source 1..1122: mol_type = genomic DNA
atgctgctgggctcccctgcgggctcatcctcaattcttagcgatggagtgtacgagaggcacatggaccctctgctgctaccaggcgagctcgcgagccccagccaggcccttggagctggggagatcccggcaccttctgagacaccctggctttctccggaccccctgtttctggaacagaggagggtcagagaagcaaagaccgaagaggacggccctgccaacaccgagcagaagctgaagtcctttccagaggaccctcagcacctgggggagtggggccacctggaccctgccgaggagaacctgaagagctaccggaagctgctcctgtgggggtatcagctttcccagcctgacgctgcctccaggctggacactgaggaactccggttggtggaaagagatccacaaggaagcagcctcccaggcgggaggcggcaggagagcgctgggtgcgcctgcgaggaggccgcccccgcgggggtgctgcctgagctgcctacggaggcgccccctggggacgcccttgccgatcccccgtcgggcaccactgaggaggaggaagagcagcctgggaaggccccggacccgcaggacccccaggacgcggagtccgactctgccaccggatcgcagaggcagtccgtcatccagcagcctgccccggacaggggcacggcgaaactgggaaccaagaggccgcaccccgaggatggggacgggcagagcctcgagggcgtctctagctccggcgacagcgcagggctggaggccgggcagggccctggggctgacgagccgggcttgtcccgcgggaagccctatgcctgcggcgagtgcggggaggccttcgcgtggctctcgcacctgatggagcaccacagcagccatggcggccggaagcgctacgcctgtcagggctgctggaagaccttccacttcagcctggccctagccgagcaccagaagacccacgagaaggagaaaagctacgcgctggggggcgcccggggcccccaaccgtccacccgcgaagcccaggcgggggctagggcgggcggtcccccagagagcgtggagggcgaggctccccccgcacccccagaggcgcagagg

SEQ ID NO: 4478 - DNA, 1698 bp, Homo sapiens
  source 1..1698: mol_type = genomic DNA
atgcggagagtcggagggcgagctgacgaggacgctacggcggcgggaagtctgtgggttctggcaccacctgagcccactgggcatctggtcatccctggcacctctcctttggagccaccttgtccctggctagacagtcacattttccagtgccgttttggaaagatgttgcctttggagaaggcgtttgcctcccccaggagctccccagccccgccggatctgcccacgccggggtcagcagccggagtccagcaggaagaacccgagaccatccctgagaggacccctgctgacctggagttctcccgcctgcgtttccgggaatttgtctaccaggaggctgccgggccccaccagaccctggcccggctgcatgagctgtgccgccagtggctgatgcctgaggcgcgctccaaggagcagatgctggagctgctggtgctggagcagttcctgggcatcctgcctgataaggtccggccctgggtggtggcacagtaccctgagagctgcaagaaggcagcctccctggtggagggcctcgctgatgtcctggaagagccagggatgctgctgggctcccctgcgggctcatcctcaattcttagcgatggagtgtacgagaggcacatggaccctctgctgctaccaggcgagctcgcgagccccagccaggcccttggagctggggagatcccggcaccttctgagacaccctggctttctccggaccccctgtttctggaacagaggagggtcagagaagcaaagaccgaagaggacggccctgccaacaccgagcagaagctgaagtcctttccagaggaccctcagcacctgggggagtggggccacctggaccctgccgaggagaacctgaagagctaccggaagctgctcctgtgggggtatcagctttcccagcctgacgctgcctccaggctggacactgaggaactccggttggtggaaagagatccacaaggaagcagcctcccagaaggcgggaggcggcaggagagcgctgggtgcgcctgcgaggaggccgcccccgcgggggtgctgcctgagctgcctacggaggcgccccctggggacgcccttgccgatcccccgtcgggcaccactgaggaggaggaagagcagcctgggaaggccccggacccgcaggacccccaggacgcggagtccgactctgccaccggatcgcagaggcagtccgtcatccagcagcctgccccggacaggggcacggcgaaactgggaaccaagaggccgcaccccgaggatggggacgggcagagcctcgagggcgtctctagctccggcgacagcgcagggctggaggccgggcagggccctggggctgacgagccgggcttgtcccgcgggaagccctatgcctgcggcgagtgcggggaggccttcgcgtggctctcgcacctgatggagcaccacagcagccatggcggccggaagcgctacgcctgtcagggctgctggaagaccttccacttcagcctggccctagccgagcaccagaagacccacgagaaggagaaaagctacgcgctggggggcgcccggggcccccaaccgtccacccgcgaagcccaggcgggggctagggcgggcggtcccccagagagcgtggagggcgaggctccccccgcacccccagaggcgcagagg

SEQ ID NO: 4479 - DNA, 609 bp, Homo sapiens; identical to SEQ ID NO: 4474
  source 1..609: mol_type = genomic DNA

SEQ ID NO: 4480 - DNA, 1203 bp, Homo sapiens; identical to SEQ ID NO: 4475
  source 1..1203: mol_type = genomic DNA

SEQ ID NO: 4481 - DNA, 2340 bp, Homo sapiens
  source 1..2340: mol_type = genomic DNA
atgcttggagaatcagtcccagctgccgtggagcaggagcagctgggggaagtcaagctggaggaggaggaggctgtcagcccagaggaccccaggcgaccagagtccaggctgaggcccgaggtggctcaccagctgttcagatgcttccagtatcaggaggacatggggccacgggcgtccctgagccggctccgggagctctgcggccactggctgcggccggctctgcacaccaagaaacagatcctggagctgctggtgctggagcagttcctgagtgtgctgcctccgcacctcctgggccgcctgcaggggcagccgctcagggatggggaggaggtggtgctgctgctcgagggcatccaccgggagcccagccacgcggggccgctggattttagttgtaatgctggcaagagttgtccccgtgcagacgtcaccttggaggaaaaggggtgtgcttcccaggtccccagccacagccccaagaaggaattgcctgcggaagagccttcagtgctgggcccatcggatgagcctccccgaccccagccaagggctgcccagcctgctgagccgggacagtggaggcttcccccaagttcaaagcagccgctgagcccggggccccagaagacattccaggccctgcaagaaagcagtccccagggcccctcaccatggccagaggagagttcccgagatcaggagctggcggctgtgctggagtgcctgacctttgaggatgtgccagagaataaggcgtggcctgcacaccccctgggattcggaagcagaaccccagacaaggaggaatttaaacaagaagagcccaaaggggctgcctggcccactcccatcttagcagagtcccaggcagatagtcctggggtgccgggagagccttgcgcccagtcgctcggacggggcgctgcggctagcggccctggtgaagatgggtcccttcttggcagcagtgaaattttggaggtcaaagtggctgagggcgtccccgagcccaatccggagttgcagttcatctgcgcggactgcggggtgagcttcccgcagctgtctcgcctgaaggcgcaccagctgcgctcgcacccggctgggcgctccttcctgtgcctttgctgcgggaagagcttcggccgcagctccattctcaagctgcacatgcgcactcacacggacgagcggccgcacgcctgccacctgtgcggccaccgcttccgccagagctcgcacctgagcaagcacctgctgacccactcctccgaacccgccttcctgtgcgcagagtgcggccgcggcttccagcgccgcgccagccttgtgcagcacctgctggcgcacgcccaggaccagaagccgccctgcgctcctgagagtaaggccgaagcgccgccactgaccgatgtcctgtgctcccactgcggccagagcttccagcgccgctccagcctcaagcgccacctgcggatccacgccagggacaaggaccgccggtcctccgaaggctccggcagccgccgccgggactccgaccggaggcccttcgtgtgcagcgactgcggcaaggccttccggcgcagcgagcacctggtggcccaccggagggtgcacacgggcgagcggcccttctcctgccaggcttgcggccgcagcttcacgcagagctcgcagctggtcagccaccaacgggtgcacacgggcgagaagccctacgcctgtccgcagtgcgggaagcgctttgtgcgccgggccagccttgcccgccacctgctgacccacggtggccctcggccccaccactgcacccagtgcgggaagagtttcggccagacccaggatctggcccgccaccagcgcagccacacgggcgagaagccctgccgctgcagcgagtgcggtgagggcttcagccagagcgcccacctggcgcgccaccagcgcatccacacaggggagaagccccacgcctgcgacacctgcggccaccgtttccgcaatagctccaacctggcccgccatcgccgcagccacacgggcgagcggccctacagctgtcagacgtgcggtcgcagcttccggcgcaacgcgcatctgcggcggcacctggctacccatgcggagcccgggcaggagcaggccgagcccccgcaggagtgcgtggagtgcgggaagagcttcagccgcagctgcaatctgctgcgacacctgctggtgcacacgggcgccaggccctactcctgcacgcagtgtggccgcagcttcagccgcaactcccacctgctgcgccacctgcgcacccacgcccgcgagacgctgtac

SEQ ID NO: 4482 - DNA, 1158 bp, Homo sapiens
  source 1..1158: mol_type = genomic DNA
atgcgcactcacacggacgagcggccgcacgcctgccacctgtgcggccaccgcttccgccagagctcgcacctgagcaagcacctgctgacccactcctccgaacccgccttcctgtgcgcagagtgcggccgcggcttccagcgccgcgccagccttgtgcagcacctgctggcgcacgcccaggaccagaagccgccctgcgctcctgagagtaaggccgaagcgccgccactgaccgatgtcctgtgctcccactgcggccagagcttccagcgccgctccagcctcaagcgccacctgcggatccacgccagggacaaggaccgccggtcctccgaaggctccggcagccgccgccgggactccgaccggaggcccttcgtgtgcagcgactgcggcaaggccttccggcgcagcgagcacctggtggcccaccggagggtgcacacgggcgagcggcccttctcctgccaggcttgcggccgcagcttcacgcagagctcgcagctggtcagccaccaacgggtgcacacgggcgagaagccctacgcctgtccgcagtgcgggaagcgctttgtgcgccgggccagccttgcccgccacctgctgacccacggtggccctcggccccaccactgcacccagtgcgggaagagtttcggccagacccaggatctggcccgccaccagcgcagccacacgggcgagaagccctgccgctgcagcgagtgcggtgagggcttcagccagagcgcccacctggcgcgccaccagcgcatccacacaggggagaagccccacgcctgcgacacctgcggccaccgtttccgcaatagctccaacctggcccgccatcgccgcagccacacgggcgagcggccctacagctgtcagacgtgcggtcgcagcttccggcgcaacgcgcatctgcggcggcacctggctacccatgcggagcccgggcaggagcaggccgagcccccgcaggagtgcgtggagtgcgggaagagcttcagccgcagctgcaatctgctgcgacacctgctggtgcacacgggcgccaggccctactcctgcacgcagtgtggccgcagcttcagccgcaactcccacctgctgcgccacctgcgcacccacgcccgcgagacgctgtac

SEQ ID NO: 4483 - DNA, 1929 bp, Homo sapiens
  source 1..1929: mol_type = genomic DNA
atgcttccagtatcaggaggacatggggccacgggcgtccctgagccggctccgggagctctgcggccactggctgcggccggctctgcacaccaagaaacagatcctggagctgctggtgctggagcagttcctgagtgtgctgcctccgcacctcctgggccgcctgcaggggcagccgctcagggatggggaggaggtggtgctgctgctcgagggcatccaccgggagcccagccacgcggggccgctggtccccagggcccctcaccatggccagaggagagttcccgagatcaggagctggcggctgtgctggagtgcctgacctttgaggatgtgccagagaataaggcgtggcctgcacaccccctgggattcggaagcagaaccccagacaaggaggaatttaaacaagaagagcccaaaggggctgcctggcccactcccatcttagcagagtcccaggcagatagtcctggggtgccgggagagccttgcgcccagtcgctcggacggggcgctgcggctagcggccctggtgaagatgggtcccttcttggcagcagtgaaattttggaggtcaaagtggctgagggcgtccccgagcccaatccggagttgcagttcatctgcgcggactgcggggtgagcttcccgcagctgtctcgcctgaaggcgcaccagctgcgctcgcacccggctgggcgctccttcctgtgcctttgctgcgggaagagcttcggccgcagctccattctcaagctgcacatgcgcactcacacggacgagcggccgcacgcctgccacctgtgcggccaccgcttccgccagagctcgcacctgagcaagcacctgctgacccactcctccgaacccgccttcctgtgcgcagagtgcggccgcggcttccagcgccgcgccagccttgtgcagcacctgctggcgcacgcccaggaccagaagccgccctgcgctcctgagagtaaggccgaagcgccgccactgaccgatgtcctgtgctcccactgcggccagagcttccagcgccgctccagcctcaagcgccacctgcggatccacgccagggacaaggaccgccggtcctccgaaggctccggcagccgccgccgggactccgaccggaggcccttcgtgtgcagcgactgcggcaaggccttccggcgcagcgagcacctggtggcccaccggagggtgcacacgggcgagcggcccttctcctgccaggcttgcggccgcagcttcacgcagagctcgcagctggtcagccaccaacgggtgcacacgggcgagaagccctacgcctgtccgcagtgcgggaagcgctttgtgcgccgggccagccttgcccgccacctgctgacccacggtggccctcggccccaccactgcacccagtgcgggaagagtttcggccagacccaggatctggcccgccaccagcgcagccacacgggcgagaagccctgccgctgcagcgagtgcggtgagggcttcagccagagcgcccacctggcgcgccaccagcgcatccacacaggggagaagccccacgcctgcgacacctgcggccaccgtttccgcaatagctccaacctggcccgccatcgccgcagccacacgggcgagcggccctacagctgtcagacgtgcggtcgcagcttccggcgcaacgcgcatctgcggcggcacctggctacccatgcggagcccgggcaggagcaggccgagcccccgcaggagtgcgtggagtgcgggaagagcttcagccgcagctgcaatctgctgcgacacctgctggtgcacacgggcgccaggccctactcctgcacgcagtgtggccgcagcttcagccgcaactcccacctgctgcgccacctgcgcacccacgcccgcgagacgctgtac

SEQ ID NO: 4484 - DNA, 1833 bp, Homo sapiens
  source 1..1833: mol_type = genomic DNA
atggcatctacttgggctatccaggcccacatggaccaggatgaacctttggaagtaaagatagaggaagagaaatataccaccagacaggattgggacctgcgtaaaaacaacacccatagcagagaggtcttccgtcagtacttcagacagttctgctaccaggagacatctggtccccgtgaggctttgagccgactccgagaactttgccatcagtggctgaggccagagacccacaccaaagaacagattctggagctgctggtgctggagcagttcctgaccatcctacctgaggagctccaggcctgggtgcaggagcagcatccagagagtggggaggaggtggtgactgtgctggaggatttagagagagaactggatgaaccaggagagcaggtctcagtccacactggggaacaggaaatgttcttgcaggagacggtacgtctacgaaaagaaggagaacccagtatgtccctccagtccatgaaagcccagccaaagtatgaatctccagaacttgaatcccaacaggagcaagttttagatgttgagactggaaatgagtatgggaatttaaagcaagaagtttctgaagaaatggaaccacatgggaagacatccagtaaatttgaaaatgatatgtccaagtctgctaggtgtggagaaactcgtgaacctgaagaaataacagaagagccctctgcttgctccagagaagataaacaacctacctgtgatgaaaatggagtaagcctgactgagaactctgaccatactgaacatcagagaatctgtccaggagaagaatcttacggatgtgatgactgtggaaaagcttttagtcagcactcacacctcatagaacatcagaggatccatactggagatagaccctacaaatgcgaagaatgtggaaaagctttccgtgggagaactgtgcttattcgacacaaaataatacacactggagagaaaccgtataagtgtaatgaatgtggcaaagcctttggccggtggtcagctcttaaccaacatcagagacttcacacaggagaaaaacactatcactgtaatgactgtggcaaagcctttagtcagaaagcaggcctctttcaccatatcaagatccacacaagagacaaaccttatcagtgcactcagtgtaataaaagttttagtcggcgttccatacttactcagcatcaaggagttcataccggcgccaagccgtatgagtgcaacgagtgtggaaaagcctttgtttataactcatcccttgtttcccatcaggaaatccaccacaaagaaaaatgctatcagtgtaaggaatgtgggaaatccttcagtcagagtggccttattcagcatcagagaattcacactggggaaaaaccctacaaatgtgacgtatgtgaaaaagcctttattcaaaggacaagtcttacagaacatcagcgaattcacactggagaaagaccctataaatgtgataagtgtgggaaggcgtttactcaaagatcagtcctcacggaacatcagagaatccacactggagagaggccctacaagtgtgatgagtgtgggaatgccttccgaggaatcaccagcctcattcagcatcagagaatccacactggggagaagccctaccaatgtgatgagtgtggaaaagccttcagacagaggtcagatcttagtaaacaccagagaatccataatagacgtggtacctatgtatgtaaagagtgtgggaaatcattcaggcagaactcagctcttactcaacatcagactatccacaaaggagaaaaatctgtttctgtg

SEQ ID NO: 4485 - DNA, 1695 bp, Homo sapiens
  source 1..1695: mol_type = genomic DNA
atggcatctacttgggctatccaggcccacatggaccaggatgaacctttggaagtaaagatagaggaagagaaatataccaccagacaggattgggacctgcgtaaaaacaacacccatagcagagaggtcttccgtcagtacttcagacagttctgctaccaggagacatctggtccccgtgaggctttgagccgactccgagaactttgccatcagtggctgaggccagagacccacaccaaagaacagattctggagctgctggtgctggagcagttcctgaccatcctacctgaggagctccaggcctgggtgcaggagcagcatccagagagtggggaggaggtggtgactgtgctggaggatttagagagagaactggatgaaccaggagagcaggtctcagtccacactggggaacaggaaatgttcttgcaggagacggtacgtctacgaaaagaaggagaacccagtatgtccctccagtccatgaaagcccagccaaagtatgaatctccagaacttgaatcccaacaggagcaagttttagatgttgagactggaaatgagtatgggaatttaaagcaagaagtttctgaagaaatggaaccacatgggaagacatccagtaaatttgaaaatgatatgtccaagtctgctaggtgtggagaaactcgtgaacctgaagaaataacagaagagccctctgcttgctccagagaagataaacaacctacctgtgatgaaaatggagtaagcctgactgagaactctgaccatactgaacatcagagaatctgtccaggagaagaatcttacggatgtgatgactgtggaaaagcttttagtcagcactcacacctcatagaacatcagaggatccatactggagatagaccctacaaatgcgaagaatgtggaaaagctttccgtgggagaactgtgcttattcgacacaaaataatacacactggagagaaaccgtataagtgtaatgaatgtggcaaagcctttggccggtggtcagctcttaaccaacatcagagacttcacacaggagaaaaacactatcactgtaatgactgtggcaaagcctttagtcagaaagcaggcctctttcaccatatcaagatccacacaagagacaaaccttatcagtgcactcagtgtaataaaagttttagtcggcgttccatacttactcagcatcaaggagttcataccggcgccaagccgtatgagtgcaacgagtgtggaaaagcctttgtttataactcatcccttgtttcccatcaggaaatccaccacaaagaaaaatgctatcagtgtaaggaatgtgggaaatccttcagtcagagtggccttattcagcatcagagaattcacactggggaaaaaccctacaaatgtgacgtatgtgaaaaagcctttattcaaaggacaagtcttacagaacatcagcgaattcacactggagaaagaccctataaatgtgataagtgtgggaaggcgtttactcaaagatcagtcctcacggaacatcagagaatccacactggagagaggccctacaagtgtgatgagtgtgggaatgccttccgaggaatcaccagcctcattcagcatcagagaatccacactggggagaagccctaccaatgtgatgagtgtggaaaagccttcagacagagg

SEQ ID NO: 4486 - DNA, 972 bp, Homo sapiens
  source 1..972: mol_type = genomic DNA
atgagcagcgaggccgagacccagcagccgcccgccgccccccccgccgcccccgccctcagcgccgccgacaccaagcccggcactacgggcagcggcgcagggagcggtggcccgggcggcctcacatcggcggcgcctgccggcggggacaagaaggtcatcgcaacgaaggttttgggaacagtaaaatggttcaatgtaaggaacggatatggtttcatcaacaggaatgacaccaaggaagatgtatttgtacaccagactgccataaagaagaataaccccaggaagtaccttcgcagtgtaggagatggagagactgtggagtttgatgttgttgaaggagaaaagggtgcggaggcagcaaatgttacaggtcctggtggtgttccagttcaaggcagtaaatatgcagcagaccgtaaccattatagacgctatccacgtcgtaggggtcctccacgcaattaccagcaaaattaccagaatagtgagagtggggaaaagaacgagggatcggagagtgctcccgaaggccaggcccaacaacgccggccctaccgcaggcgaaggttcccaccttactacatgcggagaccctatgggcgtcgaccacagtattccaaccctcctgtgcagggagaagtgatggagggtgctgacaaccagggtgcaggagaacaaggtagaccagtgaggcagaatatgtatcggggatatagaccacgattccgcaggggccctcctcgccaaagacagcctagagaggacggcaatgaagaagataaagaaaatcaaggagatgagacccaaggtcagcagccacctcaacgtcggtaccgccgcaacttcaattaccgacgcagacgcccagaaaaccctaaaccacaagatggcaaagagacaaaagcagccgatccaccagctgagaattcgtccgctcccgaggctgagcagggcggggctgag

SEQ ID NO: 4487 - DNA, 909 bp, Homo sapiens
  source 1..909: mol_type = genomic DNA
atgagtgaggcgggcgaggccaccaccaccaccaccaccaccctcccgcaggctccgacggaggcggccgccgcggctccccaggaccccgcgcccaagagcccggtgggcagcggtgcgccccaggccgcggccccggcgcccgccgcccacgtcgcaggaaaccccggtggggacgcggcccccgcagccacgggcaccgcggccgccgcctctttagccaccgccgccggcagcgaagacgcggagaaaaaagttctcgccaccaaagtccttggcactgtcaaatggttcaacgtcagaaatggatatggatttataaatcgaaatgacaccaaagaagatgtatttgtacatcagactgccatcaagaagaataacccacggaaatatctgcgcagtgtaggagatggagaaactgtagagtttgatgtggttgaaggagagaagggtgcagaagctgccaatgtgactggcccggatggagttcctgtggaagggagtcgttacgctgcagatcggcgccgttacagacgtggctactatggaaggcgccgtggccctccccggaatgctggtgagattggagagatgaaggatggagtcccagagggagcacaacttcagggaccggttcatcgaaatccaacttaccgcccaaggtaccgtagcaggggacctcctcgcccacgacctgccccagcagttggagaggctgaagataaagaaaatcagcaagccaccagtggtccaaaccagccgtctgttcgccgtggataccggcgtccctacaattaccggcgtcgcccgcgtcctcctaacgctccttcacaagatggcaaagaggccaaggcaggtgaagcaccaactgagaaccctgctccacccacccagcagagcagtgctgag

SEQ ID NO: 4488 - DNA, 1116 bp, Homo sapiens
  source 1..1116: mol_type = genomic DNA
atgagtgaggcgggcgaggccaccaccaccaccaccaccaccctcccgcaggctccgacggaggcggccgccgcggctccccaggaccccgcgcccaagagcccggtgggcagcggtgcgccccaggccgcggccccggcgcccgccgcccacgtcgcaggaaaccccggtggggacgcggcccccgcagccacgggcaccgcggccgccgcctctttagccaccgccgccggcagcgaagacgcggagaaaaaagttctcgccaccaaagtccttggcactgtcaaatggttcaacgtcagaaatggatatggatttataaatcgaaatgacaccaaagaagatgtatttgtacatcagactgccatcaagaagaataacccacggaaatatctgcgcagtgtaggagatggagaaactgtagagtttgatgtggttgaaggagagaagggtgcagaagctgccaatgtgactggcccggatggagttcctgtggaagggagtcgttacgctgcagatcggcgccgttacagacgtggctactatggaaggcgccgtggccctccccggaattacgctggggaggaggaggaggaagggagcggcagcagtgaaggatttgacccccctgccactgataggcagttctctggggcccggaatcagctgcgccgcccccagtatcgccctcagtaccggcagcggcggttcccgccttaccacgtgggacagacctttgaccgtcgctcacgggtcttaccccatcccaacagaatacaggctggtgagattggagagatgaaggatggagtcccagagggagcacaacttcagggaccggttcatcgaaatccaacttaccgcccaaggtaccgtagcaggggacctcctcgcccacgacctgccccagcagttggagaggctgaagataaagaaaatcagcaagccaccagtggtccaaaccagccgtctgttcgccgtggataccggcgtccctacaattaccggcgtcgcccgcgtcctcctaacgctccttcacaagatggcaaagaggccaaggcaggtgaagcaccaactgagaaccctgctccacccacccagcagagcagtgctgag

SEQ ID NO: 4489 - DNA, 1116 bp, Homo sapiens
  source 1..1116: mol_type = genomic DNA
atgaatggcccatgtcaaagtcttaggaaagcggaggggcttttggagggttgcacttcggccgtcaccgtcttcaggaaactccctttggattccaaggctcaaagtcagaaaatgagatacaagacatccttggtgatgaggaaacgattacggctttaccgaaacactcttaaagagtcaagtagcagctctggacaccatggcccccagctcaccgccgcctccagcccctcggtgttcccgggcctccacgaggagcctccccaggcctcccccagccgtcctttgaatggactcctgcgtctggggctccctggagacatgtacgcgcggccggagcccttcccgccagggcctgcggcccgcagcgacgccctggcagctgccgcagccctgcatggctacgggggcatgaacctgacggtgaacctcgctgcgccccacggtcctggcgctttcttccgctacatgcgccagcccatcaaacaggagctcatctgcaagtggctggcggccgacggcaccgcgaccccgagcctctgctccaaaactttcagcaccatgcacgagctggtcacgcacgtcaccgtggagcacgtcggcggcccggaacaggccaaccacatttgcttctgggaggagtgtccgcgccagggaaagcccttcaaagccaaatacaaacttgtaaatcacatccgcgtgcacacgggcgagaagcccttcccttgtcctttcccggggtgtgggaaggtctttgctagatcagaaaatctcaaaatacacaaacgaactcacacaggcgagaagcccttcagatgcgagttcgagggctgcgagcggcgcttcgccaacagcagcgaccgtaagaagcattcgcacgtgcacactagcgacaagccatacacgtgcaaggtgcggggctgcgacaagtgctacacgcaccccagctcgctgcgtaagcacatgaaggtgcacgggcgctcgccgccgcccagctctggctacgattcggctacaccgtctgccctcgtgtcgccctcgtcggactgcggccacaagtcccaggtggcctcctcggcggcggtggcggcgcgtaccgccgacttgagcgaa

SEQ ID NO: 4490 - DNA, 1002 bp, Homo sapiens
  source 1..1002: mol_type = genomic DNA
atgagatacaagacatccttggtgatgaggaaacgattacggctttaccgaaacactcttaaagagtcaagtagcagctctggacaccatggcccccagctcaccgccgcctccagcccctcggtgttcccgggcctccacgaggagcctccccaggcctcccccagccgtcctttgaatggactcctgcgtctggggctccctggagacatgtacgcgcggccggagcccttcccgccagggcctgcggcccgcagcgacgccctggcagctgccgcagccctgcatggctacgggggcatgaacctgacggtgaacctcgctgcgccccacggtcctggcgctttcttccgctacatgcgccagcccatcaaacaggagctcatctgcaagtggctggcggccgacggcaccgcgaccccgagcctctgctccaaaactttcagcaccatgcacgagctggtcacgcacgtcaccgtggagcacgtcggcggcccggaacaggccaaccacatttgcttctgggaggagtgtccgcgccagggaaagcccttcaaagccaaatacaaacttgtaaatcacatccgcgtgcacacgggcgagaagcccttcccttgtcctttcccggggtgtgggaaggtctttgctagatcagaaaatctcaaaatacacaaacgaactcacacaggcgagaagcccttcagatgcgagttcgagggctgcgagcggcgcttcgccaacagcagcgaccgtaagaagcattcgcacgtgcacactagcgacaagccatacacgtgcaaggtgcggggctgcgacaagtgctacacgcaccccagctcgctgcgtaagcacatgaaggtgcacgggcgctcgccgccgcccagctctggctacgattcggctacaccgtctgccctcgtgtcgccctcgtcggactgcggccacaagtcccaggtggcctcctcggcggcggtggcggcgcgtaccgccgacttgagcgaa

SEQ ID NO: 4491 - DNA, 1152 bp, Homo sapiens
  source 1..1152: mol_type = genomic DNA
atgccgcccttctgtaggaatgcaaagttaggcctcctttctttcctgatttgtgctggaaggagcttattacctttggggaagaatgccttttggttagaaagaattgaaaataataataccctctgggaaaaggctcaaagtcagaaaatgagatacaagacatccttggtgatgaggaaacgattacggctttaccgaaacactcttaaagagtcaagtagcagctctggacaccatggcccccagctcaccgccgcctccagcccctcggtgttcccgggcctccacgaggagcctccccaggcctcccccagccgtcctttgaatggactcctgcgtctggggctccctggagacatgtacgcgcggccggagcccttcccgccagggcctgcggcccgcagcgacgccctggcagctgccgcagccctgcatggctacgggggcatgaacctgacggtgaacctcgctgcgccccacggtcctggcgctttcttccgctacatgcgccagcccatcaaacaggagctcatctgcaagtggctggcggccgacggcaccgcgaccccgagcctctgctccaaaactttcagcaccatgcacgagctggtcacgcacgtcaccgtggagcacgtcggcggcccggaacaggccaaccacatttgcttctgggaggagtgtccgcgccagggaaagcccttcaaagccaaatacaaacttgtaaatcacatccgcgtgcacacgggcgagaagcccttcccttgtcctttcccggggtgtgggaaggtctttgctagatcagaaaatctcaaaatacacaaacgaactcacacaggcgagaagcccttcagatgcgagttcgagggctgcgagcggcgcttcgccaacagcagcgaccgtaagaagcattcgcacgtgcacactagcgacaagccatacacgtgcaaggtgcggggctgcgacaagtgctacacgcaccccagctcgctgcgtaagcacatgaaggtgcacgggcgctcgccgccgcccagctctggctacgattcggctacaccgtctgccctcgtgtcgccctcgtcggactgcggccacaagtcccaggtggcctcctcggcggcggtggcggcgcgtaccgccgacttgagcgaa

SEQ ID NO: 4492 - DNA, 384 bp, Homo sapiens
  source 1..384: mol_type = genomic DNA
atgagatacaagacatccttggtgatgaggaaacgattacggctttaccgaaacactcttaaagagtcaagcgagaagcccttcagatgcgagttcgagggctgcgagcggcgcttcgccaacagcagcgaccgtaagaagcattcgcacgtgcacactagcgacaagccatacacgtgcaaggtgcggggctgcgacaagtgctacacgcaccccagctcgctgcgtaagcacatgaaggtgcacgggcgctcgccgccgcccagctctggctacgattcggctacaccgtctgccctcgtgtcgccctcgtcggactgcggccacaagtcccaggtggcctcctcggcggcggtggcggcgcgtaccgccgacttgagcgaa

SEQ ID NO: 4493 - DNA, 1989 bp, Homo sapiens
  source 1..1989: mol_type = genomic DNA
atgtttttgaaggcgggcagagggaataaagtccccccagtgagggtctatgggcctgattgtgtagttctgatggagccccctttgagcaagaggaacccgccagcgctgagattagcggatttggcaacggctcaggtccagccgcttcagaatatgacaggcttcccggcgctggccggcccgcccgcccactcccaactccgggccgccgtcgcgcacctccgcctgcgggacctgggcgctgaccccggcgtggccaccactccgctcggacccgagcacatggcccaggcgagcacgctgggcctcagccctccctcccaggcgttcccggcacacccggaggctccggcagccgccgcccgtgctgcagccttggtcgcgcaccccggcgcgggcagctacccctgcggcgggggcagcagtggcgcgcagccctccgcgcccccgcccccagcccctcctcttcctcccaccccttcaccccctccccctcccccgcctcctcctcctcctgccctctcgggctacaccaccaccaacagtggcggcggcggcagcagcggcaaaggccacagcagggacttcgtcctccggagggacctttccgccacggcccccgcggcggccatgcacggggccccgctcggaggggagcagcggtccggcaccggctccccccagcacccggccccgcctccccactcggccggcatgttcatctccgccagcggcacctacgcgggcccggacggcagcggcggcccggcgctcttccccgcgctgcacgacacgccgggggccccaggcggccacccgcacccgctcaacggccagatgcgcctggggctggcggcggcagcggcagccgcggcggctgagctgtacggccgcgccgaaccgcccttcgcgccgcgctctggggacgcgcactacggggcggttgcggccgcagcggcggccgccctgcacggctacggagccgtgaacttaaacctgaacctggcggctgcggcggccgcagcagcggccgggcccgggccccacctgcagcaccacgcgccgcccccggcgccgccgccgccgccggcgcccgcgcagcacccgcaccagcaccacccccacctcccaggggcggctggggccttcctgcgctacatgcggcagccaatcaagcaggagctcatctgcaagtggatcgaccccgacgagctggccgggctgccgccgccgccgccgccgccgccgccgccgccgccaccgcccccggccggcggcgccaagccctgctccaaaactttcggcaccatgcacgagctggtgaatcacgtcacggtggagcacgtgggaggccccgagcagagcagccacgtctgcttctgggaggactgtccgcgcgagggcaagcccttcaaggccaaatacaagctcatcaaccacatccgcgtgcacaccggcgagaagccctttccctgccctttccccggctgcggcaaggtcttcgcgcgctccgagaacctcaagatccacaagcgtactcatacaggggaaaagcctttcaaatgtgaatttgatggctgtgacaggaagtttgccaatagcagtgatcggaagaaacattcccatgtccacaccagtgacaagccctactactgcaagattcgaggctgtgacaaatcctacactcacccaagctccctgaggaagcacatgaagattcactgcaagtccccgccaccttctccaggaccccttggttactcatcagtggggactccagtgggcgcccccttgtcccctgtgctggacccagccaggagtcactccagcactctgtcccctcaggtgaccaacctcaatgagtggtacgtttgccaggccagtggggcccccagccacctccacaccccttccagcaacggaaccacctctgagactgaagatgaggaaatttacgggaaccctgaagttgtgcggacgatacat

SEQ ID NO: 4494 - DNA, 903 bp, Homo sapiens
  source 1..903: mol_type = genomic DNA
atgaccggccgggactcgctttccgacgggcgcactagcagcagggcgctggtgcctggcggttcccctaggggctcgcgcccccggggcttcgccatcacggacctgctgggcttggaggccgagctgccggcgcccgctggcccaggacagggatctggctgcgagggtccggcagtcgcgccgtgcccgggcccggggcttgacggctccagcctggcgcgtggggccctaccgctgggactcggcctcctctgtggcttcggcacgcagccgccggcggccgctcgagcaccctgcctgctcctagcggacgtgccgttcctgccgcccaggggccccgagcccgctgccccgctggctcccagccgtccgccgcctgcgctcggccgccagaagcgcagcgacagcgtctccacgtccgatgaggacagccagtctgaagacaggaatgacctaaaggcatcccccaccttgggcaagaggaagaagcggcggcacaggacagttttcactgctcaccagctggaagagttggagaaggcattcagcgaggcccactaccctgatgtgtatgcccgagaaatgctggctgtgaaaactgagctccccgaagaccggatacaggtctggtttcaaaaccgcagggccaaatggcgcaagcgggagaagcgctggggcggcagcagcgtgatggccgagtacgggctgtacggggccatggtgcgccactgcatcccgctgccagactccgtgctcaactccgccgagggcggcctgctgggctcctgcgcgccctggctcctggtgcaaacttctgctcctggaggctcccgttcactggactttgcaggagacacacaggctccccagaccccgtggtggtgcctgatgaccttcagc

SEQ ID NO: 4495 - DNA, 840 bp, Homo sapiens
  source 1..840: mol_type = genomic DNA
atgaccggccgggactcgctttccgacgggcgcactagcagcagggcgctggtgcctggcggttcccctaggggctcgcgcccccggggcttcgccatcacggacctgctgggcttggaggccgagctgccggcgcccgctggcccaggacagggatctggctgcgagggtccggcagtcgcgccgtgcccgggcccggggcttgacggctccagcctggcgcgtggggccctaccgctgggactcggcctcctctgtggcttcggcacgcagccgccggcggccgctcgagcaccctgcctgctcctagcggacgtgccgttcctgccgcccaggggccccgagcccgctgccccgctggctcccagccgtccgccgcctgcgctcggccgccagaagcgcagcgacagcgtctccacgtccgatgaggacagccagtctgaagacaggaatgacctaaaggcatcccccaccttgggcaagaggaagaagcggcggcacaggacagttttcactgctcaccagctggaagagttggagaaggcattcagcgaggcccactaccctgatgtgtatgcccgagaaatgctggctgtgaaaactgagctccccgaagaccggatacaggtctggtttcaaaaccgcagggccaaatggcgcaagcgggagaagcgctggggcggcagcagcgtgatggccgagtacgggctgtacggggccatggtgcgccactgcatcccgctgccagactccgtgctcaactccgccgagggcggcctgctgggctcctgcgcgccctggctcctggagggtgagacattgggctgcagagaaatgaag

SEQ ID NO: 4496 - DNA, 717 bp, Homo sapiens
  source 1..717: mol_type = genomic DNA
atgaccggccgggactcgctttccgacgggcgcactagcagcagggcgctggtgcctggcggttcccctaggggctcgcgcccccggggcttcgccatcacggacctgctgggcttggaggccgagctgccggcgcccgctggcccaggacagggatctggctgcgagggtccggcagtcgcgccgtgcccgggcccggggcttgacggctccagcctggcgcgtggggccctaccgctgggactcggcctcctctgtggcttcggcacgcagccgccggcggccgctcgagcaccctgcctgctcctagcggacgtgccgttcctgccgcccaggggccccgagcccgctgccccgctggctcccagccgtccgccgcctgcgctcggccgccagaagcgcagcgacagcgtctccacgtccgatgaggacagccagtctgaagacaggaatgacctaaaggcatcccccaccttgggcaagaggaagaagcggcggcacaggacagttttcactgctcaccagctggaagagttggagaaggcattcagcgaggcccactaccctgatgtgtatgcccgagaaatgctggctgtgaaaactgagctccccgaagaccggatacaggtgtctggggtcccttttctccgctccaaagataccacagagaacgtgtcattcccacattcagtgagccaatcagcagtcccttctcta

SEQ ID NO: 4497 - DNA, 654 bp, Homo sapiens
  source 1..654: mol_type = genomic DNA
atgaccggccgggactcgctttccgacgggcgcactagcagcagggcgctggtgcctggcggttcccctaggggctcgcgcccccggggcttcgccatcacggacctgctgggcttggaggccgagctgccggcgcccgctggcccaggacagggatctggctgcgagggtccggcagtcgcgccgtgcccgggcccggggcttgacggctccagcctggcgcgtggggccctaccgctgggactcggcctcctctgtggcttcggcacgcagccgccggcggccgctcgagcaccctgcctgctcctagcggacgtgccgttcctgccgcccaggggccccgagcccgctgccccgctggctcccagccgtccgccgcctgcgctcggccgccagaagcgcagcgacagcgtctccacgtccgatgaggacagccagtctgaagacaggaatgacctaaaggcatcccccaccttgggcaagaggaagaagcggcggcacaggacagttttcactgctcaccagctggaagagttggagaaggcattcagcgaggcccactaccctgatgtgtatgcccgagaaatgctggctgtgaaaactgagctccccgaagaccggatacagagggtgagacattgggctgcagagaaa

SEQ ID NO: 4498 - DNA, 708 bp, Homo sapiens
  source 1..708: mol_type = genomic DNA
atgaccggccgggactcgctttccgacgggcgcactagcagcagggcgctggtgcctggcggttcccctaggggctcgcgcccccggggcttcgccatcacggacctgctgggcttggaggccgagctgccggcgcccgctggcccaggacagggatctggctgcgagggtccggcagtcgcgccgtgcccgggcccggggcttgacggctccagcctggcgcgtggggccctaccgctgggactcggcctcctctgtggcttcggcacgcagccgccggcggccgctcgagcaccctgcctgctcctagcggacgtgccgttcctgccgcccaggggccccgagcccgctgccccgctggctcccagccgtccgccgcctgcgctcggccgccagaagcgcagcgacagcgtctccacgtccgatgaggacagccagtctgaagacaggaatgacctaaaggcatcccccaccttgggcaagaggaagaagcggcggcacaggacagttttcactgctcaccagctggaagagttggagaaggcattcagcgaggcccactaccctgatgtgtatgcccgagaaatgctggctgtgaaaactgagctccccgaagaccggatacagtgcaaacttctgctcctggaggctcccgttcactggactttgcaggagacacacaggctccccagaccccgtggtggtgcc

SEQ ID NO: 4499 - DNA, 1371 bp, Homo sapiens
  source 1..1371: mol_type = genomic DNA
atgacgatgctcctggacggaggcccgcagttccctgggctgggagtgggcagcttcggcgcgccgcgccaccacgagatgcccaaccgtgagccggcaggcatggggctgaatcccttcggggactcaacccacgccgccgccgccgccgccgccgccgctgccttcaagctgagccctgccgcggcgcacgatctatcttcaggccagagctcggctttcacgccgcagggttcgggctacgccaacgccctgggccaccatcaccaccaccatcaccatcatcaccacaccagccaggtgcccagctacggtggcgctgcctctgccgccttcaactcaacgcgcgagtttctgttccgccagcgcagctccgggctcagtgaggcggcctcgggtggcgggcagcacgggctcttcgccggctcggcgagcagcctgcatgctccagctggcatccccgagccccctagctacttgctgtttcccgggctgcatgagcagggcgctgggcacccgtcgcccacagggcacgtggacaacaaccaggtccacctggggctgcgtggggagctgttcggccgtgctgacccataccgcccagtggccagcccgcgcacggacccctacgcggccggcgctcagtttcctaactacagccccatgaacatgaacatgggagtgaacgtggcggcccaccacgggcccggcgccttcttccgttatatgcggcagcctatcaagcaggagctgtcgtgcaagtggatcgacgaggctcagctgagccggcccaagaagagctgcgaccggaccttcagcaccatgcatgagctggtgacacatgtcaccatggagcatgtggggggcccggagcagaacaaccacgtctgctactgggaggagtgcccccgggagggcaagtctttcaaggcgaagtacaaactggtcaaccacatccgagtgcacacgggcgagaagcccttcccatgccccttcccgggctgcgggaagatctttgcccgttctgagaacctcaagatccacaagaggacccacacaggtgagaaacctttcaaatgtgaatttgaaggctgtgacagacgctttgccaacagcagcgaccgtaagaagcacatgcatgtgcatacctcggacaagccctatatctgcaaagtgtgcgacaagtcctacacgcacccgagctccctgcgcaaacacatgaagtgttgtcctgcttggtatccgggacagtctctaattcctgacgaagaacttgatactgacgttggtatgcagcagccagccctccataacactacctatcctaaatgcagggttaatgccgaacctactgtgcaagaaatgatttac

SEQ ID NO: 4500 - DNA, 1275 bp, Homo sapiens
  source 1..1275: mol_type = genomic DNA
atgggatcaaaaatgaatctcattgaacattcccatttacctaccacagatgaattttctttttctgaaaatttatttggtgttttaacagaacaagtggcaggtcctctgggacagaacctggaagtggaaccatactcgcaatacagcaatgttcagtttccccaagttcaaccacagatttcctcgtcatcctattattccaacctgggtttctacccccagcagcctgaagagtggtactctcctggaatatatgaactcaggcgtatgccagctgagactctctaccagggagaaactgaggtagcagagatgcctgtaacaaagaagccccgcatgggcgcgtcagcagggaggatcaaaggggatgagctgtgtgttgtttgtggagacagagcctctggataccactataatgcactgacctgtgaggggtgtaaaggcttgttaactgaaattcagtgtaaatctaagcgactgagaaaaaatgtgaagcagcatgcagatcagaccgtgaatgaagacagtgaaggtcgtgacttgcgacaagtgacctcgacaacaaagtcatgcagggagaaaactgaactcaccccagatcaacagactcttctacattttattatggattcatataacaaacagaggatgcctcaggaaataacaaataaaattttaaaagaagaattcagtgcagaagaaaattttctcattttgacggaaatggcaaccaatcatgtacaggttcttgtagaattcacaaaaaagctaccaggatttcagactttggaccatgaagaccagattgctttgctgaaagggtctgcggttgaagctatgttccttcgttcagctgagattttcaataagaaacttccgtctgggcattctgacctattggaagaaagaattcgaaatagtggtatctctgatgaatatataacacctatgtttagtttttataaaagtattggggaactgaaaatgactcaagaggagtatgctctgcttacagcaattgttatcctgtctccagatagacaatacataaaggatagagaggcagtagagaagcttcaggagccacttcttgatgtgctacaaaagttgtgtaagattcaccagcctgaaaatcctcaacactttgcctgtctcctgggtcgcctgactgaattacggacattcaatcatcaccacgctgagatgctgatgtcatggagagtaaacgaccacaagtttaccccacttctctgtgaaatctgggacgtgcag

SEQ ID NO: 4501 - DNA, 1458 bp, Homo sapiens
  source 1..1458: mol_type = genomic DNA
atggtaatgcagtttcaggggttagaaaatccaattcaaattagtcctcactgcagctgtacgccgtcaggatttttcatggaaatgatgagtatgaagcccgcgaaaggtgttttaacagaacaagtggcaggtcctctgggacagaacctggaagtggaaccatactcgcaatacagcaatgttcagtttccccaagttcaaccacagatttcctcgtcatcctattattccaacctgggtttctacccccagcagcctgaagagtggtactctcctggaatatatgaactcaggcgtatgccagctgagactctctaccagggagaaactgaggtagcagagatgcctgtaacaaagaagccccgcatgggcgcgtcagcagggaggatcaaaggggatgagctgtgtgttgtttgtggagacagagcctctggataccactataatgcactgacctgtgaggggtgtaaaggtttcttcaggagaagcattaccaaaaacgctgtgtacaagtgtaaaaacgggggcaactgtgtgatggatatgtacatgcgaagaaagtgtcaagagtgtcgactaaggaaatgcaaagagatgggaatgttggctgaatgtatgtatacaggcttgttaactgaaattcagtgtaaatctaagcgactgagaaaaaatgtgaagcagcatgcagatcagaccgtgaatgaagacagtgaaggtcgtgacttgcgacaagtgacctcgacaacaaagtcatgcagggagaaaactgaactcaccccagatcaacagactcttctacattttattatggattcatataacaaacagaggatgcctcaggaaataacaaataaaattttaaaagaagaattcagtgcagaagaaaattttctcattttgacggaaatggcaaccaatcatgtacaggttcttgtagaattcacaaaaaagctaccaggatttcagactttggaccatgaagaccagattgctttgctgaaagggtctgcggttgaagctatgttccttcgttcagctgagattttcaataagaaacttccgtctgggcattctgacctattggaagaaagaattcgaaatagtggtatctctgatgaatatataacacctatgtttagtttttataaaagtattggggaactgaaaatgactcaagaggagtatgctctgcttacagcaattgttatcctgtctccagatagacaatacataaaggatagagaggcagtagagaagcttcaggagccacttcttgatgtgctacaaaagttgtgtaagattcaccagcctgaaaatcctcaacactttgcctgtctcctgggtcgcctgactgaattacggacattcaatcatcaccacgctgagatgctgatgtcatggagagtaaacgaccacaagtttaccccacttctctgtgaaatctgggacgtgcag

SEQ ID NO: 4502 - DNA, 1446 bp, Homo sapiens
  source 1..1446: mol_type = genomic DNA
atggtaatgcagtttcaggggttagaaaatccaattcaaattagtcctcactgcagctgtacgccgtcaggatttttcatggaaatgatgagtatgaagcccgcgaaaggtgttttaacagaacaagtggcaggtcctctgggacagaacctggaagtggaaccatactcgcaatacagcaatgttcagtttccccaagttcaaccacagatttcctcgtcatcctattattccaacctgggtttctacccccagcagcctgaagagtggtactctcctggaatatatgaactcaggcgtatgccagctgagactctctaccagggagaaactgaggtagcagagatgcctgtaacaaagaagccccgcatgggcgcgtcagcagggaggatcaaaggggatgagctgtgtgttgtttgtggagacagagcctctggataccactataatgcactgacctgtgaggggtgtaaaggtttcttcaggagaagcattaccaaaaacgctgtgtacaagtgtaaaaacgggggcaactgtgtgatggatatgtacatgcgaagaaagtgtcaagagtgtcgactaaggaaatgcaaagagatgggaatgttggctgaatgcttgttaactgaaattcagtgtaaatctaagcgactgagaaaaaatgtgaagcagcatgcagatcagaccgtgaatgaagacagtgaaggtcgtgacttgcgacaagtgacctcgacaacaaagtcatgcagggagaaaactgaactcaccccagatcaacagactcttctacattttattatggattcatataacaaacagaggatgcctcaggaaataacaaataaaattttaaaagaagaattcagtgcagaagaaaattttctcattttgacggaaatggcaaccaatcatgtacaggttcttgtagaattcacaaaaaagctaccaggatttcagactttggaccatgaagaccagattgctttgctgaaagggtctgcggttgaagctatgttccttcgttcagctgagattttcaataagaaacttccgtctgggcattctgacctattggaagaaagaattcgaaatagtggtatctctgatgaatatataacacctatgtttagtttttataaaagtattggggaactgaaaatgactcaagaggagtatgctctgcttacagcaattgttatcctgtctccagatagacaatacataaaggatagagaggcagtagagaagcttcaggagccacttcttgatgtgctacaaaagttgtgtaagattcaccagcctgaaaatcctcaacactttgcctgtctcctgggtcgcctgactgaattacggacattcaatcatcaccacgctgagatgctgatgtcatggagagtaaacgaccacaagtttaccccacttctctgtgaaatctgggacgtgcag

SEQ ID NO: 4503 - DNA, 2994 bp, Homo sapiens
  source 1..2994: mol_type = genomic DNA
atggcccaagttgcaatgtccaccctccccgttgaagatgaggagtcctcggagagcaggatggtggtgacattcctcatgtcagctctcgagtccatgtgtaaagaactggccaagtccaaagccgaagtggcctgcattgcagtgtatgaaacagacgtgtttgtcgtcggaactgaaagaggacgtgcttttgtcaataccagaaaggattttcaaaaagattttgtaaaatattgtgttgaagaagaagaaaaagctgcagagatgcataaaatgaaatctacaacccaggcaaatcggatgagtgtagatgctgtagaaattgaaacactcagaaaaacagttgaggactatttctgcttttgctatgggaaagctttaggcaaatccacagtggtacctgtaccatatgagaagatgctgcgagaccagtcggctgtggtagtgcaggggcttccggaaggtgttgcctttaaacaccccgagaactatgatcttgcaaccctgaaatggattttggagaacaaagcagggatttcattcatcattaagagaccttttttagagccaaagaagcatgtaggtggtcgtgtgatggtaacagatgctgacaggtcaatactatctccaggtggaagttgtggccccatcaaagtgaaaactgaacccacagaagattctggcatttccctggaaatggcagctgtgacagtaaaggaagaatcagaagatcctgattattatcaatataacattcaagcaggcccttctgaaactgatgatgttgatgaaaaacagcccctatcgaagcctttgcaaggaagccaccattcttcagagggcaatgaaggcacagaaatggaagtaccagcagaagattctactcaacatgtcccttcagaaacaagtgaggaccctgaagttgaggtgactattgaagatgatgattattctccaccgtctaagagaccaaaggccaatgagctaccgcagccaccagtcccggaacccgccaatgctgggaagcggaaagtgagggagttcaacttcgagaaatggaatgctcgcatcactgatctacgtaaacaagttgaagaattgtttgaaaggaaatatgctcaagccataaaagccaaaggtccggtgacgatcccgtaccctcttttccagtctcatgttgaagatctttatgtagaaggacttcctgaaggaattccttttagaaggccatctacttacggaattcctcgcctggagaggatattacttgcaaaggaaaggattcgttttgtgattaagaaacatgagcttctgaattcaacacgtgaagatttacagcttgataagccagcttcaggagtaaaggaagaatggtatgccagaatcactaaattaagaaagatggtggatcagcttttctgcaaaaaatttgcggaagccttggggagcactgaagccaaggctgtaccgtaccaaaaatttgaggcacacccgaatgatctgtacgtggaaggactgccagaaaacattcctttccgaagtccctcatggtatggaatcccaaggctggaaaaaatcattcaagtgggcaatcgaattaaatttgttattaaaagaccagaacttctgactcacagtaccactgaagttactcagccaagaacgaatacaccagtcaaagaagattggaatgtcagaattaccaagctacggaagcaagtggaagagatttttaatttgaaatttgctcaagctcttggactcaccgaggcagtaaaagtaccatatcctgtgtttgaatcaaacccggagttcttgtatgtggaaggcttgccagaggggattcccttccgaagccctacctggtttggaattccacgacttgaaaggatcgtccgcgggagtaataaaatcaagttcgttgttaaaaaacctgaactagttatttcctacttgcctcctgggatggctagtaaaataaacactaaagctttgcagtcccccaaaagaccacgaagtcctgggagtaattcaaaggttcctgaaattgaggtcaccgtggaaggccctaataacaacaatcctcaaacctcagctgttcgaaccccgacccagactaacggttctaacgttcccttcaagccacgagggagagagttttcctttgaggcctggaatgccaaaatcacggacctaaaacagaaagttgaaaatctcttcaatgagaaatgtggggaagctcttggccttaaacaagctgtgaaggtgccgttcgcgttatttgagtctttcccggaagacttttatgtggaaggcttacctgagggtgtgccattccgaagaccatcgacttttggcattccgaggctggagaagatactcagaaacaaagccaaaattaagttcatcattaaaaagcccgaaatgtttgagacggcgattaaggagagcacctcctctaagagccctcccagaaaaataaattcatcacccaatgttaatactactgcatcaggtgttgaagaccttaacatcattcaggtgacaattccagatgatgataatgaaagactctcgaaagttgaaaaagctagacagctaagagaacaagtgaatgacctctttagtcggaaatttggtgaagctattggtatgggttttcctgtgaaagttccctacaggaaaatcacaattaaccctggctgtgtggtagttgatggcatgcccccgggggtgtccttcaaagcccccagctacctggaaatcagctccatgagaaggatcttagactctgccgagtttatcaaattcacggtcattagaccatttccaggacttgtgattaataaccagctggttgatcagagtgagtcagaaggccccgtgatacaagaatcagctgaaccaagccagttggaagttccagccacagaagaaataaaagagactgatggaagctctcagatcaagcaagaaccagaccccacgtgg

SEQ ID NO: 4504 - DNA, 2931 bp, Homo sapiens
  source 1..2931: mol_type = genomic DNA
atggcccaagttgcaatgtccaccctccccgttgaagatgaggagtcctcggagagcaggatggtggtgacattcctcatgtcagctctcgagtccatgtgtaaagaactggccaagtccaaagccgaagtggcctgcattgcagtgtatgaaacagacgtgtttgtcgtcggaactgaaagaggacgtgcttttgtcaataccagaaaggattttcaaaaagattttgtaaaatattgtgttgaagaagaagaaaaagctgcagagatgcataaaatgaaatctacaacccaggcaaatcggatgagtgtagatgctgtagaaattgaaacactcagaaaaacagttgaggactatttctgcttttgctatgggaaagctttaggcaaatccacagtggtacctgtaccatatgagaagatgctgcgagaccagtcggctgtggtagtgcaggggcttccggaaggtgttgcctttaaacaccccgagaactatgatcttgcaaccctgaaatggattttggagaacaaagcagggatttcattcatcattaagagaccttttttagagccaaagaagcatgtaggtggtcgtgtgatggtaacagatgctgacaggtcaatactatctccaggtggaagttgtggccccatcaaagtgaaaactgaacccacagaagattctggcatttccctggaaatggcagctgtgacagtaaaggaagaatcagaagatcctgattattatcaatataacattcaagcaggcccttctgaaactgatgatgttgatgaaaaacagcccctatcgaagcctttgcaaggaagccaccattcttcagagggcaatgaaggcacagaaatggaagtaccagcagaagatgatgattattctccaccgtctaagagaccaaaggccaatgagctaccgcagccaccagtcccggaacccgccaatgctgggaagcggaaagtgagggagttcaacttcgagaaatggaatgctcgcatcactgatctacgtaaacaagttgaagaattgtttgaaaggaaatatgctcaagccataaaagccaaaggtccggtgacgatcccgtaccctcttttccagtctcatgttgaagatctttatgtagaaggacttcctgaaggaattccttttagaaggccatctacttacggaattcctcgcctggagaggatattacttgcaaaggaaaggattcgttttgtgattaagaaacatgagcttctgaattcaacacgtgaagatttacagcttgataagccagcttcaggagtaaaggaagaatggtatgccagaatcactaaattaagaaagatggtggatcagcttttctgcaaaaaatttgcggaagccttggggagcactgaagccaaggctgtaccgtaccaaaaatttgaggcacacccgaatgatctgtacgtggaaggactgccagaaaacattcctttccgaagtccctcatggtatggaatcccaaggctggaaaaaatcattcaagtgggcaatcgaattaaatttgttattaaaagaccagaacttctgactcacagtaccactgaagttactcagccaagaacgaatacaccagtcaaagaagattggaatgtcagaattaccaagctacggaagcaagtggaagagatttttaatttgaaatttgctcaagctcttggactcaccgaggcagtaaaagtaccatatcctgtgtttgaatcaaacccggagttcttgtatgtggaaggcttgccagaggggattcccttccgaagccctacctggtttggaattccacgacttgaaaggatcgtccgcgggagtaataaaatcaagttcgttgttaaaaaacctgaactagttatttcctacttgcctcctgggatggctagtaaaataaacactaaagctttgcagtcccccaaaagaccacgaagtcctgggagtaattcaaaggttcctgaaattgaggtcaccgtggaaggccctaataacaacaatcctcaaacctcagctgttcgaaccccgacccagactaacggttctaacgttcccttcaagccacgagggagagagttttcctttgaggcctggaatgccaaaatcacggacctaaaacagaaagttgaaaatctcttcaatgagaaatgtggggaagctcttggccttaaacaagctgtgaaggtgccgttcgcgttatttgagtctttcccggaagacttttatgtggaaggcttacctgagggtgtgccattccgaagaccatcgacttttggcattccgaggctggagaagatactcagaaacaaagccaaaattaagttcatcattaaaaagcccgaaatgtttgagacggcgattaaggagagcacctcctctaagagccctcccagaaaaataaattcatcacccaatgttaatactactgcatcaggtgttgaagaccttaacatcattcaggtgacaattccagatgatgataatgaaagactctcgaaagttgaaaaagctagacagctaagagaacaagtgaatgacctctttagtcggaaatttggtgaagctattggtatgggttttcctgtgaaagttccctacaggaaaatcacaattaaccctggctgtgtggtagttgatggcatgcccccgggggtgtccttcaaagcccccagctacctggaaatcagctccatgagaaggatcttagactctgccgagtttatcaaattcacggtcattagaccatttccaggacttgtgattaataaccagctggttgatcagagtgagtcagaaggccccgtgatacaagaatcagctgaaccaagccagttggaagttccagccacagaagaaataaaagagactgatggaagctctcagatcaagcaagaaccagaccccacgtgg

SEQ ID NO: 4505 - DNA, 2934 bp, Homo sapiens
  source 1..2934: mol_type = genomic DNA
atggcccaagttgcaatgtccaccctccccgttgaagatgaggagtcctcggagagcaggatggtggtgacattcctcatgtcagctctcgagtccatgtgtaaagaactggccaagtccaaagccgaagtggcctgcattgcagtgtatgaaacagacgtgtttgtcgtcggaactgaaagaggacgtgcttttgtcaataccagaaaggattttcaaaaagattttgtaaaatattgtgttgaagaagaagaaaaagctgcagagatgcataaaatgaaatctacaacccaggcaaatcggatgagtgtagatgctgtagaaattgaaacactcagaaaaacagttgaggactatttctgcttttgctatgggaaagctttaggcaaatccacagtggtacctgtaccatatgagaagatgctgcgagaccagtcggctgtggtagtgcaggggcttccggaaggtgttgcctttaaacaccccgagaactatgatcttgcaaccctgaaatggattttggagaacaaagcagggatttcattcatcattaagagaccttttttagagccaaagaagcatgtaggtggtcgtgtgatggtaacagatgctgacaggtcaatactatctccaggtggaagttgtggccccatcaaagtgaaaactgaacccacagaagattctggcatttccctggaaatggcagctgtgacagtaaaggaagaatcagaagatcctgattattatcaatataacattcaaggaagccaccattcttcagagggcaatgaaggcacagaaatggaagtaccagcagaagattctactcaacatgtcccttcagaaacaagtgaggaccctgaagttgaggtgactattgaagatgatgattattctccaccgtctaagagaccaaaggccaatgagctaccgcagccaccagtcccggaacccgccaatgctgggaagcggaaagtgagggagttcaacttcgagaaatggaatgctcgcatcactgatctacgtaaacaagttgaagaattgtttgaaaggaaatatgctcaagccataaaagccaaaggtccggtgacgatcccgtaccctcttttccagtctcatgttgaagatctttatgtagaaggacttcctgaaggaattccttttagaaggccatctacttacggaattcctcgcctggagaggatattacttgcaaaggaaaggattcgttttgtgattaagaaacatgagcttctgaattcaacacgtgaagatttacagcttgataagccagcttcaggagtaaaggaagaatggtatgccagaatcactaaattaagaaagatggtggatcagcttttctgcaaaaaatttgcggaagccttggggagcactgaagccaaggctgtaccgtaccaaaaatttgaggcacacccgaatgatctgtacgtggaaggactgccagaaaacattcctttccgaagtccctcatggtatggaatcccaaggctggaaaaaatcattcaagtgggcaatcgaattaaatttgttattaaaagaccagaacttctgactcacagtaccactgaagttactcagccaagaacgaatacaccagtcaaagaagattggaatgtcagaattaccaagctacggaagcaagtggaagagatttttaatttgaaatttgctcaagctcttggactcaccgaggcagtaaaagtaccatatcctgtgtttgaatcaaacccggagttcttgtatgtggaaggcttgccagaggggattcccttccgaagccctacctggtttggaattccacgacttgaaaggatcgtccgcgggagtaataaaatcaagttcgttgttaaaaaacctgaactagttatttcctacttgcctcctgggatggctagtaaaataaacactaaagctttgcagtcccccaaaagaccacgaagtcctgggagtaattcaaaggttcctgaaattgaggtcaccgtggaaggccctaataacaacaatcctcaaacctcagctgttcgaaccccgacccagactaacggttctaacgttcccttcaagccacgagggagagagttttcctttgaggcctggaatgccaaaatcacggacctaaaacagaaagttgaaaatctcttcaatgagaaatgtggggaagctcttggccttaaacaagctgtgaaggtgccgttcgcgttatttgagtctttcccggaagacttttatgtggaaggcttacctgagggtgtgccattccgaagaccatcgacttttggcattccgaggctggagaagatactcagaaacaaagccaaaattaagttcatcattaaaaagcccgaaatgtttgagacggcgattaaggagagcacctcctctaagagccctcccagaaaaataaattcatcacccaatgttaatactactgcatcaggtgttgaagaccttaacatcattcaggtgacaattccagatgatgataatgaaagactctcgaaagttgaaaaagctagacagctaagagaacaagtgaatgacctctttagtcggaaatttggtgaagctattggtatgggttttcctgtgaaagttccctacaggaaaatcacaattaaccctggctgtgtggtagttgatggcatgcccccgggggtgtccttcaaagcccccagctacctggaaatcagctccatgagaaggatcttagactctgccgagtttatcaaattcacggtcattagaccatttccaggacttgtgattaataaccagctggttgatcagagtgagtcagaaggccccgtgatacaagaatcagctgaaccaagccagttggaagttccagccacagaagaaataaaagagactgatggaagctctcagatcaagcaagaaccagaccccacgtgg

SEQ ID NO: 4506 - DNA, 2871 bp, Homo sapiens
  source 1..2871: mol_type = genomic DNA
atggcccaagttgcaatgtccaccctccccgttgaagatgaggagtcctcggagagcaggatggtggtgacattcctcatgtcagctctcgagtccatgtgtaaagaactggccaagtccaaagccgaagtggcctgcattgcagtgtatgaaacagacgtgtttgtcgtcggaactgaaagaggacgtgcttttgtcaataccagaaaggattttcaaaaagattttgtaaaatattgtgttgaagaagaagaaaaagctgcagagatgcataaaatgaaatctacaacccaggcaaatcggatgagtgtagatgctgtagaaattgaaacactcagaaaaacagttgaggactatttctgcttttgctatgggaaagctttaggcaaatccacagtggtacctgtaccatatgagaagatgctgcgagaccagtcggctgtggtagtgcaggggcttccggaaggtgttgcctttaaacaccccgagaactatgatcttgcaaccctgaaatggattttggagaacaaagcagggatttcattcatcattaagagaccttttttagagccaaagaagcatgtaggtggtcgtgtgatggtaacagatgctgacaggtcaatactatctccaggtggaagttgtggccccatcaaagtgaaaactgaacccacagaagattctggcatttccctggaaatggcagctgtgacagtaaaggaagaatcagaagatcctgattattatcaatataacattcaaggaagccaccattcttcagagggcaatgaaggcacagaaatggaagtaccagcagaagatgatgattattctccaccgtctaagagaccaaaggccaatgagctaccgcagccaccagtcccggaacccgccaatgctgggaagcggaaagtgagggagttcaacttcgagaaatggaatgctcgcatcactgatctacgtaaacaagttgaagaattgtttgaaaggaaatatgctcaagccataaaagccaaaggtccggtgacgatcccgtaccctcttttccagtctcatgttgaagatctttatgtagaaggacttcctgaaggaattccttttagaaggccatctacttacggaattcctcgcctggagaggatattacttgcaaaggaaaggattcgttttgtgattaagaaacatgagcttctgaattcaacacgtgaagatttacagcttgataagccagcttcaggagtaaaggaagaatggtatgccagaatcactaaattaagaaagatggtggatcagcttttctgcaaaaaatttgcggaagccttggggagcactgaagccaaggctgtaccgtaccaaaaatttgaggcacacccgaatgatctgtacgtggaaggactgccagaaaacattcctttccgaagtccctcatggtatggaatcccaaggctggaaaaaatcattcaagtgggcaatcgaattaaatttgttattaaaagaccagaacttctgactcacagtaccactgaagttactcagccaagaacgaatacaccagtcaaagaagattggaatgtcagaattaccaagctacggaagcaagtggaagagatttttaatttgaaatttgctcaagctcttggactcaccgaggcagtaaaagtaccatatcctgtgtttgaatcaaacccggagttcttgtatgtggaaggcttgccagaggggattcccttccgaagccctacctggtttggaattccacgacttgaaaggatcgtccgcgggagtaataaaatcaagttcgttgttaaaaaacctgaactagttatttcctacttgcctcctgggatggctagtaaaataaacactaaagctttgcagtcccccaaaagaccacgaagtcctgggagtaattcaaaggttcctgaaattgaggtcaccgtggaaggccctaataacaacaatcctcaaacctcagctgttcgaaccccgacccagactaacggttctaacgttcccttcaagccacgagggagagagttttcctttgaggcctggaatgccaaaatcacggacctaaaacagaaagttgaaaatctcttcaatgagaaatgtggggaagctcttggccttaaacaagctgtgaaggtgccgttcgcgttatttgagtctttcccggaagacttttatgtggaaggcttacctgagggtgtgccattccgaagaccatcgacttttggcattccgaggctggagaagatactcagaaacaaagccaaaattaagttcatcattaaaaagcccgaaatgtttgagacggcgattaaggagagcacctcctctaagagccctcccagaaaaataaattcatcacccaatgttaatactactgcatcaggtgttgaagaccttaacatcattcaggtgacaattccagatgatgataatgaaagactctcgaaagttgaaaaagctagacagctaagagaacaagtgaatgacctctttagtcggaaatttggtgaagctattggtatgggttttcctgtgaaagttccctacaggaaaatcacaattaaccctggctgtgtggtagttgatggcatgcccccgggggtgtccttcaaagcccccagctacctggaaatcagctccatgagaaggatcttagactctgccgagtttatcaaattcacggtcattagaccatttccaggacttgtgattaataaccagctggttgatcagagtgagtcagaaggccccgtgatacaagaatcagctgaaccaagccagttggaagttccagccacagaagaaataaaagagactgatggaagctctcagatcaagcaagaaccagaccccacgtgg

SEQ ID NO: 4507 - DNA, 1089 bp, Homo sapiens
  source 1..1089: mol_type = genomic DNA
atgtcctctcctaccacgagttccctggatacccccctgcctggaaatggcccccctcagcctggcgccccttcttcttcacccactgtaaaggaggagggtccggagccgtggcccgggggtccggaccctgatgtcccaggcactgatgaggccagctcagcctgcagcacagactggggcgtcctttctgaagaacagatccggaagaagaagattcggaaacagcagcaggagtcacagtcacagtcgcagtcacctgtggggccgcagggcagcagcagctcagcctctgggcctggggcttcccctggtggatctgaggcaggcagccagggctccggggaaggcgagggtgtccagctaacagcggctcaagaactaatgatccagcagttggtggcggcccaactgcagtgcaacaaacgctccttctccgaccagcccaaagtcacgccctggcccctgggcgcagacccccagtcccgagatgcccgccagcaacgctttgcccacttcacggagctggccatcatctcagtccaggagatcgtggacttcgctaagcaagtgcctggtttcctgcagctgggccgggaggaccagatcgccctcctgaaggcatccactatcgagatcatgctgctagagacagccaggcgctacaaccacgagacagagtgtatcaccttcttgaaggacttcacctacagcaaggacgacttccaccgtgcaggcctgcaggtggagttcatcaaccccatcttcgagttctcgcgggccatgcggcggctgggcctggacgacgctgagtacgccctgctcatcgccatcaacatcttctcggccgaccggcccaacgtgcaggagccgggccgcgtggaggcgttgcagcagccctacgtggaggcgctgctgtcctacacgcgcatcaagaggccgcaggaccagctgcgcttcccgcgcatgctcatgaagctggtgagcctgcgcacgctgagctctgtgcactcggagcaggtcttcgccttgcggctccaggacaagaagctgccgcctctgctgtcggagatctgggacgtccacgag

SEQ ID NO: 4508 - DNA, 1359 bp, Homo sapiens
  source 1..1359: mol_type = genomic DNA
atgcagcaaacaagctggaacccgctgggtggcacctgcaagcagccgcccggacgcacccactctgcggtggagctgtggaagccaggcgcacaggatgcaagcagccaggcccagggaggcagcagctgcatcctcagagaggaagccaggatgccccactctgctgggggtactgcaggggtggggctggaggctgcagagcccacagccctgctcaccagggcagagcccccttcagaacccacagagatccgtccacaaaagcggaaaaaggggccagcccccaaaatgctggggaacgagctatgcagcgtgtgtggggacaaggcctcgggcttccactacaatgttctgagctgcgagggctgcaagggattcttccgccgcagcgtcatcaagggagcgcactacatctgccacagtggcggccactgccccatggacacctacatgcgtcgcaagtgccaggagtgtcggcttcgcaaatgccgtcaggctggcatgcgggaggagtgtgtcctgtcagaagaacagatccgcctgaagaaactgaagcggcaagaggaggaacaggctcatgccacatccttgccccccagggcttcctcacccccccaaatcctgccccagctcagcccggaacaactgggcatgatcgagaagctcgtcgctgcccagcaacagtgtaaccggcgctccttttctgaccggcttcgagtcacgccttggcccatggcaccagatccccatagccgggaggcccgtcagcagcgctttgcccacttcactgagctggccatcgtctctgtgcaggagatagttgactttgctaaacagctacccggcttcctgcagctcagccgggaggaccagattgccctgctgaagacctctgcgatcgaggtgatgcttctggagacatctcggaggtacaaccctgggagtgagagtatcaccttcctcaaggatttcagttataaccgggaagactttgccaaagcagggctgcaagtggaattcatcaaccccatcttcgagttctccagggccatgaatgagctgcaactcaatgatgccgagtttgccttgctcattgctatcagcatcttctctgcagaccggcccaacgtgcaggaccagctccaggtagagaggctgcagcacacatatgtggaagccctgcatgcctacgtctccatccaccatccccatgaccgactgatgttcccacggatgctaatgaaactggtgagcctccggaccctgagcagcgtccactcagagcaagtgtttgcactgcgtctgcaggacaaaaagctcccaccgctgctctctgagatctgggatgtgcacgaa

SEQ ID NO: 4509 - DNA, 1341 bp, Homo sapiens
  source 1..1341: mol_type = genomic DNA
atgtccttgtggctgggggcccctgtgcctgacattcctcctgactctgcggtggagctgtggaagccaggcgcacaggatgcaagcagccaggcccagggaggcagcagctgcatcctcagagaggaagccaggatgccccactctgctgggggtactgcaggggtggggctggaggctgcagagcccacagccctgctcaccagggcagagcccccttcagaacccacagagatccgtccacaaaagcggaaaaaggggccagcccccaaaatgctggggaacgagctatgcagcgtgtgtggggacaaggcctcgggcttccactacaatgttctgagctgcgagggctgcaagggattcttccgccgcagcgtcatcaagggagcgcactacatctgccacagtggcggccactgccccatggacacctacatgcgtcgcaagtgccaggagtgtcggcttcgcaaatgccgtcaggctggcatgcgggaggagtgtgtcctgtcagaagaacagatccgcctgaagaaactgaagcggcaagaggaggaacaggctcatgccacatccttgccccccagggcttcctcacccccccaaatcctgccccagctcagcccggaacaactgggcatgatcgagaagctcgtcgctgcccagcaacagtgtaaccggcgctccttttctgaccggcttcgagtcacgccttggcccatggcaccagatccccatagccgggaggcccgtcagcagcgctttgcccacttcactgagctggccatcgtctctgtgcaggagatagttgactttgctaaacagctacccggcttcctgcagctcagccgggaggaccagattgccctgctgaagacctctgcgatcgaggtgatgcttctggagacatctcggaggtacaaccctgggagtgagagtatcaccttcctcaaggatttcagttataaccgggaagactttgccaaagcagggctgcaagtggaattcatcaaccccatcttcgagttctccagggccatgaatgagctgcaactcaatgatgccgagtttgccttgctcattgctatcagcatcttctctgcagaccggcccaacgtgcaggaccagctccaggtagagaggctgcagcacacatatgtggaagccctgcatgcctacgtctccatccaccatccccatgaccgactgatgttcccacggatgctaatgaaactggtgagcctccggaccctgagcagcgtccactcagagcaagtgtttgcactgcgtctgcaggacaaaaagctcccaccgctgctctctgagatctgggatgtgcacgaa

SEQ ID NO: 4510 - DNA, 1161 bp, Homo sapiens
  source 1..1161: mol_type = genomic DNA
atgtccttgtggctgggggcccctgtgcctgacattcctcctgactctgcggtggagctgtggaagccaggcgcacaggatgcaagcagccaggcccagggaggcagcagctgcatcctcagagaggaagccaggatgccccactctgctgggggtactgcaggggtggggctggaggctgcagagcccacagccctgctcaccagggcagagcccccttcagaacccacagagatccgtccacaaaagcggaaaaaggggccagcccccaaaatgctggggaacgagctatgcagcgtgtgtggggacaaggcctcgggcttccactacaatgttctgagctgcgagggctgcaagggattcttccgccgcagcgtcatcaagggagcgcactacatctgccacagtggcggccactgccccatggacacctacatgcgtcgcaagtgccaggagtgtcggcttcgcaaatgccgtcaggctggcatgcgggaggagtgtgtcctgtcagaagaacagatccgcctgaagaaactgaagcggcaagaggaggaacaggctcatgccacatccttgccccccagggcttcctcacccccccaaatcctgccccagctcagcccggaacaactgggcatgatcgagaagctcgtcgctgcccagcaacagtgtaaccggcgctccttttctgaccggcttcgagtcacggtgatgcttctggagacatctcggaggtacaaccctgggagtgagagtatcaccttcctcaaggatttcagttataaccgggaagactttgccaaagcagggctgcaagtggaattcatcaaccccatcttcgagttctccagggccatgaatgagctgcaactcaatgatgccgagtttgccttgctcattgctatcagcatcttctctgcagaccggcccaacgtgcaggaccagctccaggtagagaggctgcagcacacatatgtggaagccctgcatgcctacgtctccatccaccatccccatgaccgactgatgttcccacggatgctaatgaaactggtgagcctccggaccctgagcagcgtccactcagagcaagtgtttgcactgcgtctgcaggacaaaaagctcccaccgctgctctctgagatctgggatgtgcacgaa

SEQ ID NO: 4511 - DNA, 1026 bp, Homo sapiens
  source 1..1026: mol_type = genomic DNA
atgccccactctgctgggggtactgcaggggtggggctggaggctgcagagcccacagccctgctcaccagggcagagcccccttcagaacccacagagatccgtccacaaaagcggaaaaaggggccagcccccaaaatgctggggaacgagctatgcagcgtgtgtggggacaaggcctcgggcttccactacaatgttctgagctgcgagggctgcaagggattcttccgccgcagcgtcatcaagggagcgcactacatctgccacagtggcggccactgccccatggacacctacatgcgtcgcaagtgccaggagtgtcggcttcgcaaatgccgtcaggctggcatgcgggaggagtgtgtcctgtcagaagaacagatccgcctgaagaaactgaagcggcaagaggaggaacaggctcatgccacatccttgccccccagggcttcctcacccccccaaatcctgccccagctcagcccggaacaactgggcatgatcgagaagctcgtcgctgcccagcaacagtgtaaccggcgctccttttctgaccggcttcgagtcacggtgatgcttctggagacatctcggaggtacaaccctgggagtgagagtatcaccttcctcaaggatttcagttataaccgggaagactttgccaaagcagggctgcaagtggaattcatcaaccccatcttcgagttctccagggccatgaatgagctgcaactcaatgatgccgagtttgccttgctcattgctatcagcatcttctctgcagaccggcccaacgtgcaggaccagctccaggtagagaggctgcagcacacatatgtggaagccctgcatgcctacgtctccatccaccatccccatgaccgactgatgttcccacggatgctaatgaaactggtgagcctccggaccctgagcagcgtccactcagagcaagtgtttgcactgcgtctgcaggacaaaaagctcccaccgctgctctctgagatctgggatgtgcacgaa

SEQ ID NO: 4512 - DNA, 726 bp, Homo sapiens
  source 1..726: mol_type = genomic DNA
atgagctcttatttcgtcaactcactgttctccaaatacaaaaccggggagtccctgcgccccaattattatgactgcggcttcgcccaggacctgggcggccgacccaccgtggtgtacggtcccagcagcggcggcagcttccagcacccgtcgcaaatccaggagttctaccacgggccgtcgtcgctgtccacggctccctaccagcagaacccgtgcgccgtggcgtgccacggggaccccggcaatttctacggctacgacccgctgcaacgccagagcctattcggtgcgcaggatccagacctggtgcagtacgcagactgcaagcttgccgccgccagcggcctgggcgaggaggccgagggctccgagcagagcccgtcgcccacacagctcttcccctggatgcgcccgcaagccgccggacgcaggcgaggccgacagacctacagccgctaccagaccctggagctggagaaggagttcctatttaatccctatctgactcgtaagcggcgaatcgaggtatcgcacgccctgggactgacagagagacaggtcaaaatctggttccagaaccggaggatgaagtggaaaaaagagaacaacaaagacaagttccccagcagcaaatgcgagcaggaggagctggagaaacagaagctggagcgggccccagaggcggcggacgagggcgacgcgcagaagggcgacaagaag

SEQ ID NO: 4513 - DNA, 729 bp, Homo sapiens
  source 1..729: mol_type = genomic DNA
atgagctcttatttcgtcaactcactgttctccaaatacaaaaccggggagtccctgcgccccaattattatgactgcggcttcgcccaggacctgggcggccgacccaccgtggtgtacggtcccagcagcggcggcagcttccagcacccgtcgcaaatccaggagttctaccacgggccgtcgtcgctgtccacggctccctaccagcagaacccgtgcgccgtggcgtgccacggggaccccggcaatttctacggctacgacccgctgcaacgccagagcctattcggtgcgcaggatccagacctggtgcagtacgcagactgcaagcttgccgccgccagcggcctgggcgaggaggccgagggctccgagcagagcccgtcgcccacacagctcttcccctggatgcgcccgcaagcagccgccggacgcaggcgaggccgacagacctacagccgctaccagaccctggagctggagaaggagttcctatttaatccctatctgactcgtaagcggcgaatcgaggtatcgcacgccctgggactgacagagagacaggtcaaaatctggttccagaaccggaggatgaagtggaaaaaagagaacaacaaagacaagttccccagcagcaaatgcgagcaggaggagctggagaaacagaagctggagcgggccccagaggcggcggacgagggcgacgcgcagaagggcgacaagaag

SEQ ID NO: 4514 - DNA, 750 bp, Homo sapiens
  source 1..750: mol_type = genomic DNA
atgtccatttctgggacgcttagcagctattatgtcgactcgatcataagtcacgagagtgaggacgcgcctccagccaagtttccttctggccagtacgcgagctcgcggcagccgggccacgcggagcacctggagttcccctcgtgcagcttccagcccaaagcgccggtgttcggcgcctcctgggcgccgctgagcccgcacgcgtccgggagcctgccgtccgtctaccacccttacatccagccccagggcgtcccgccggccgagagcaggtacctccgcacctggctggagccggcgccgcgcggcgaagcggccccggggcagggccaggcggcggtgaaggcggagccgctgctgggcgcgcctggggagctgctcaaacagggcacgcccgagtacagtttggaaacttcggcgggcagggaggccgtgctgtctaatcaaagacccggctacggggacaataaaatttgcgaaggaagcgaggacaaagagaggccggatcaaaccaacccctccgccaactggctgcacgctcgctcttcccggaaaaagcgctgtccctacaccaaataccagacgctggagctagagaaggagtttctgttcaatatgtacctcaccagggaccgtaggcacgaagtggccagactcctcaatctgagtgagagacaagtcaaaatctggtttcagaaccggcggatgaaaatgaagaaaatgaataaggagcagggcaaagag

SEQ ID NO: 4515 - DNA, 975 bp, Homo sapiens
  source 1..975: mol_type = genomic DNA
atggtggccaccaacaccccccacagcaccctgagcgtcaactggagcctcctgctatcccctgagcccgatgggggcctgatggtgctccctaaggacagcattcagttttcttctgcccttgtttttaccaggctgcttgagtttgacagcaccaacgtgtccgatacggcagcaaagcctttgggaagaccatatcctccatactccttggccgatttctcttggaacaacatcactgattcattggatcctgccaccctgagtgccacatttcaaggccaccccatgaacgaccctaccaggacttttgccaatggcagcctggccttcagggtccaggccttttccaggtccagccgaccagcccaaccccctcgcctcctgcacacagcagacacctgtcagctagaggtggccctgattggagcctctccccggggaaaccgttccctgtttgggctggaggtagccacattgggccagggccctgactgcccctcaatgcaggagcagcactccatcgacgatgaatatgcaccggccgtcttccagttggaccagctactgtggggctccctcccatcaggctttgcacagtggcgaccagtggcttactcccagaagccggggggccgagaatcagccctgccctgccaagcttcccctcttcatcctgccttagcatactctcttccccagtcacccattgtccgagccttctttgggtcccagaataacttctgtgccttcaatctgacgttcggggcttccacaggccctggctattgggaccaacactacctcagctggtcgatgctcctgggtgtgggcttccctccagtggacggcttgtccccactagtcctgggcatcatggcagtggccctgggtgccccagggctcatgctgctagggggcggcttggttctgctgctgcaccacaagaagtactcagagtaccagtccataaat

SEQ ID NO: 4516 - DNA, 993 bp, Homo sapiens
  source 1..993: mol_type = genomic DNA
atgcgcggctctgtggagtgcacctggggttgggggcactgtgcccccagccccctgctcctttggactctacttctgtttgcagccccatttggcctgctgggggagaagacccgccaggtgtctctggaggtcatccctaactggctgggccccctgcagaacctgcttcatatacgggcagtgggcaccaattccacactgcactatgtgtggagcagcctggggcctctggcagtggtaatggtggccaccaacaccccccacagcaccctgagcgtcaactggagcctcctgctatcccctgagcccgatgggggcctgatggtgctccctaaggacagcattcagttttcttctgcccttgtttttaccaggctgcttgagtttgacagcaccaacgtgtccgatacggcagcaaagcctttgggaagaccatatcctccatactccttggccgatttctcttggaacaacatcactgattcattggatcctgccaccctgagtgccacatttcaaggccaccccatgaacgaccctaccaggacttttgccaatggcagcctggccttcagggtccaggccttttccaggtccagccgaccagcccaaccccctcgcctcctgcacacagcagacacctgtcagctagaggtggccctgattggagcctctccccggggaaaccgttccctgtttgggctggaggtagccacattgggccagggccctgactgcccctcaatgcaggagcagcactccatcgacgatgaatatgcaccggccgtcttccaggtcgatgctcctgggtgtgggcttccctccagtggacggcttgtccccactagtcctgggcatcatggcagtggccctgggtgccccagggctcatgctgctagggggcggcttggttctgctgctgcaccacaagaagtactcagagtaccagtccataaattaaggcccgctctctggagggaaggacattac

SEQ ID NO: 4517 - DNA, 960 bp, Homo sapiens
  source 1..960: mol_type = genomic DNA
atgcgcggctctgtggagtgcacctggggttgggggcactgtgcccccagccccctgctcctttggactctacttctgtttgcagccccatttggcctgctgggggagaagacccgccagctgcttgagtttgacagcaccaacgtgtccgatacggcagcaaagcctttgggaagaccatatcctccatactccttggccgatttctcttggaacaacatcactgattcattggatcctgccaccctgagtgccacatttcaaggccaccccatgaacgaccctaccaggacttttgccaatggcagcctggccttcagggtccaggccttttccaggtccagccgaccagcccaaccccctcgcctcctgcacacagcagacacctgtcagctagaggtggccctgattggagcctctccccggggaaaccgttccctgtttgggctggaggtagccacattgggccagggccctgactgcccctcaatgcaggagcagcactccatcgacgatgaatatgcaccggccgtcttccagttggaccagctactgtggggctccctcccatcaggctttgcacagtggcgaccagtggcttactcccagaagccggggggccgagaatcagccctgccctgccaagcttcccctcttcatcctgccttagcatactctcttccccagtcacccattgtccgagccttctttgggtcccagaataacttctgtgccttcaatctgacgttcggggcttccacaggccctggctattgggaccaacactacctcagctggtcgatgctcctgggtgtgggcttccctccagtggacggcttgtccccactagtcctgggcatcatggcagtggccctgggtgccccagggctcatgctgctagggggcggcttggttctgctgctgcaccacaagaagtactcagagtaccagtccataaat

SEQ ID NO: 4518 - DNA, 1068 bp, Homo sapiens
  source 1..1068: mol_type = genomic DNA
atgaattttgaatttgagagggagattgggtttataaacagccagccgtcgctcgccgagtgtctgacttccttccccgctgtcttggagacatttcaaacttcatcaatcaaggagtcgacattaattcctcctcctcctcctttcgagcaaaccttccccagcctccagcccggcgcctccacccttcagagacccaggagccaaaagcgagccgaagatgggcctgctctgccgccgccaccgccgccgccactccccgctgcccccccggcccccgagttcccttggatgaaagagaagaaatccgccaagaaacccagccaatccgccacgtctccttctccggccgcctccgccgttccggcctccggggtcggatcgcctgcagatggcctgggactgccggaggctggtggcggcggggcgcgcaggctgcgcacggcttacaccaacacgcagctgctggaactggagaaggaattccactttaataagtacctgtgccggccacgccgcgtcgagatcgcggccttgctggacctcaccgaaaggcaggtcaaagtctggtttcagaaccggcgcatgaagcacaagcggcagacgcagcaccgagagccgccggatggggagcctgcctgcccgggagccctggaggacatctgcgaccctgccgaggaacccgcggccagcccgggcggcccctccgcctcgcgggcggcgtgggaagcctgctgtcacccgccggaggtggtgccgggggccttaagcgcggacccccggcctttagccgttcgcttagagggcgcaggcgcgtcgagtcccggctgcgcgctgcgcggggccggcgggctggagcccgggccattgccagaagacgtcttctcggggcgccaggattcacctttccttcccgacctcaacttcttcgcggccgactcctgtctccagctatccggaggcctctcccctagcctacagggttctctcgacagcccggtccctttttccgaggaagagctggattttttcaccagtacgctctgtgccatcgacctgcagtttccc

SEQ ID NO: 4519 - DNA, 1293 bp, Homo sapiens
  source 1..1293: mol_type = genomic DNA
atgcagaaagccacctactacgacaacgccgcggctgctctcttcggaggctattcctcgtaccctggcagcaatggcttcggcttcgatgtccccccccaacccccatttcaggccgccacgcacctggagggcgactaccagcgctcagcttgctcgctgcagtccctgggcaacgctgccccacatgccaagagcaaggagctcaacggcagctgcatgaggccgggtctggcccccgagcccctgtcggccccgcctggctcacccccgcccagtgccgcacctaccagtgccactagcaacagcagtaatgggggcgggcccagcaaaagtggtcccccaaagtgcggtcccggcaccaactccaccctcaccaaacagatattcccctggatgaaagagtcgaggcaaacgtccaagctgaaaaacaactcccccggcacagcagagggctgtggtggcggcggcggtggcggcggcggcggaggcagtggtggcagcgggggcggtggcggcggcggcgggggaggggacaagagccccccggggtcggcggcgtccaagcgggcgcggacggcgtacacgagcgcgcagctggtggagctggagaaggagttccattttaaccgctacctgtgccggcctcgccgtgtagagatggccaacctgctgaacctcagcgagcggcagatcaagatctggttccagaaccggcgcatgaagtacaagaaggaccagaaggccaagggattggcctcgtcgtcggggggcccatctccagccggcagccccccgcagcccatgcagtccacggccggcttcatgaacgccttacactccatgacccccagctacgagagcccgtccccacccgccttcggtaaagcccaccagaatgcctacgcgctgccctccaactaccagccccctctcaaaggctgcggcgccccgcagaagtaccctccgaccccggcgcccgagtatgagccgcacgtcctccaagccaacgggggcgcctacgggacgcccaccatgcagggcagtccggtgtacgtgggcgggggcggctacgcggatccgctgccgccccctgccggcccctccctctatggcctcaaccacctttcccatcacccttccgggaacctggactacaacggggcgccccctatggcgcccagccagcaccacggaccctgcgaaccccaccccacctacacagacctctcctctcaccacgcgcctcctcctcagggtagaatccaagaagcgcccaaattaacacacctg

SEQ ID NO: 4520 - DNA, 1074 bp, Homo sapiens
  source 1..1074: mol_type = genomic DNA
atgaggccgggtctggcccccgagcccctgtcggccccgcctggctcacccccgcccagtgccgcacctaccagtgccactagcaacagcagtaatgggggcgggcccagcaaaagtggtcccccaaagtgcggtcccggcaccaactccaccctcaccaaacagatattcccctggatgaaagagtcgaggcaaacgtccaagctgaaaaacaactcccccggcacagcagagggctgtggtggcggcggcggtggcggcggcggcggaggcagtggtggcagcgggggcggtggcggcggcggcgggggaggggacaagagccccccggggtcggcggcgtccaagcgggcgcggacggcgtacacgagcgcgcagctggtggagctggagaaggagttccattttaaccgctacctgtgccggcctcgccgtgtagagatggccaacctgctgaacctcagcgagcggcagatcaagatctggttccagaaccggcgcatgaagtacaagaaggaccagaaggccaagggattggcctcgtcgtcggggggcccatctccagccggcagccccccgcagcccatgcagtccacggccggcttcatgaacgccttacactccatgacccccagctacgagagcccgtccccacccgccttcggtaaagcccaccagaatgcctacgcgctgccctccaactaccagccccctctcaaaggctgcggcgccccgcagaagtaccctccgaccccggcgcccgagtatgagccgcacgtcctccaagccaacgggggcgcctacgggacgcccaccatgcagggcagtccggtgtacgtgggcgggggcggctacgcggatccgctgccgccccctgccggcccctccctctatggcctcaaccacctttcccatcacccttccgggaacctggactacaacggggcgccccctatggcgcccagccagcaccacggaccctgcgaaccccaccccacctacacagacctctcctctcaccacgcgcctcctcctcagggtagaatccaagaagcgcccaaattaacacacctg

SEQ ID NO: 4521 - DNA, 897 bp, Homo sapiens
  source 1..897: mol_type = genomic DNA
atgaaagagtcgaggcaaacgtccaagctgaaaaacaactcccccggcacagcagagggctgtggtggcggcggcggtggcggcggcggcggaggcagtggtggcagcgggggcggtggcggcggcggcgggggaggggacaagagccccccggggtcggcggcgtccaagcgggcgcggacggcgtacacgagcgcgcagctggtggagctggagaaggagttccattttaaccgctacctgtgccggcctcgccgtgtagagatggccaacctgctgaacctcagcgagcggcagatcaagatctggttccagaaccggcgcatgaagtacaagaaggaccagaaggccaagggattggcctcgtcgtcggggggcccatctccagccggcagccccccgcagcccatgcagtccacggccggcttcatgaacgccttacactccatgacccccagctacgagagcccgtccccacccgccttcggtaaagcccaccagaatgcctacgcgctgccctccaactaccagccccctctcaaaggctgcggcgccccgcagaagtaccctccgaccccggcgcccgagtatgagccgcacgtcctccaagccaacgggggcgcctacgggacgcccaccatgcagggcagtccggtgtacgtgggcgggggcggctacgcggatccgctgccgccccctgccggcccctccctctatggcctcaaccacctttcccatcacccttccgggaacctggactacaacggggcgccccctatggcgcccagccagcaccacggaccctgcgaaccccaccccacctacacagacctctcctctcaccacgcgcctcctcctcagggtagaatccaagaagcgcccaaattaacacacctg

SEQ ID NO: 4522 - DNA, 903 bp, Homo sapiens
  source 1..903: mol_type = genomic DNA
atggactataataggatgaactccttcttagagtacccactctgtaaccggggacccagcgcctacagcgcccacagcgccccaacctcctttcccccaagctcggctcaggcggttgacagctatgcaagcgagggccgctacggtggggggctgtccagccctgcgtttcagcagaactccggctatcccgcccagcagccgccttcgaccctgggggtgcccttccccagctccgcgccctcggggtatgctcctgccgcctgcagccccagctacgggccttctcagtactaccctctgggtcaatcagaaggagacggaggctattttcatccctcgagctacggggcccagctagggggcttgtccgatggctacggagcaggtggagccggtccggggccatatcctccgcagcatcccccttatgggaacgagcagaccgcgagctttgcaccggcctatgctgatctcctctccgaggacaaggaaacaccctgcccttcagaacctaacacccccacggcccggaccttcgactggatgaaggttaagagaaacccacccaagacagcgaaggtgtcagagccaggcctgggctcgcccagtggcctccgcaccaacttcaccacaaggcagctgacagaactggaaaaggagttccatttcaacaagtacctgagccgggcccggagggtggagattgccgccaccctggagctcaatgaaacacaggtcaagatttggttccagaaccgacgaatgaagcagaagaagcgcgagcgagaggaaggtcgggtccccccagccccaccaggctgccccaaggaggcagctggagatgcctcagaccagtcgacatgcacctccccggaagcctcacccagctctgtcacctcc

SEQ ID NO: 4523 - DNA, 651 bp, Homo sapiens
  source 1..651: mol_type = genomic DNA
atgagttcattgtattatgcgaatactttattttctaaatatccagcctcaagttcggttttcgctaccggagccttcccagaacaaacttcttgtgcgtttgcttccaacccccagcgcccgggctatggagcgggttcgggcgcttccttcgccgcctcgatgcagggcttgtaccccggcggggggggcatggcgggccagagcgcggccggcgtctacgcggccggctatgggctcgagccgagttccttcaacatgcactgcgcgccctttgagcagaacctctccggggtgtgtcccggcgactccgccaaggcggcgggcgccaaggagcagagggactcggacttggcggccgagagtaacttccggatctacccctggatgcgaagctcaggaactgaccgcaaacgaggccgccagacctacacccgctaccagaccctggagctggagaaagaatttcactacaatcgctacctgacgcggcggcggcgcatcgagatcgcgcacacgctctgcctcacggaaagacagatcaagatttggtttcagaaccggcgcatgaagtggaaaaaggagaacaagaccgcgggcccggggaccaccggccaagacagggctgaagcagaggaggaagaggaagag

SEQ ID NO: 4524 - DNA, 753 bp, Homo sapiens
  source 1..753: mol_type = genomic DNA
atggctatgagttcttttttgatcaactcaaactatgtcgaccccaagttccctccatgcgaggaatattcacagagcgattacctacccagcgaccactcgcccgggtactacgccggcggccagaggcgagagagcagcttccagccggaggcgggcttcgggcggcgcgcggcgtgcaccgtgcagcgctacgcggcctgccgggaccctgggcccccgccgcctccgccaccacccccgccgcccccgccaccgcccggtctgtcccctcgggctcctgcgccgccacccgccggggccctcctcccggagcccggccagcgctgcgaggcggtcagcagcagccccccgccgcctccctgcgcccagaaccccctgcaccccagcccgtcccactccgcgtgcaaagagcccgtcgtctacccctggatgcgcaaagttcacgtgagcacggtaaaccccaattacgccggcggggagcccaagcgctctcggaccgcctacacgcgccagcaggtcttggagctggagaaggaatttcactacaaccgctacctgacacggcgccggagggtggagatcgcccacgcgctctgcctctccgagcgccagatcaagatctggttccagaaccggcgcatgaagtggaaaaaagaccacaagttgcccaacaccaagatccgctcgggtggtgcggcaggctcagccggagggccccctggccggcccaatggaggcccccgcgcgctc

SEQ ID NO: 4525 - DNA, 750 bp, Homo sapiens
  source 1..750: mol_type = genomic DNA
atgaccatggttgacacagagatgccattctggcccaccaactttgggatcagctccgtggatctctccgtaatggaagaccactcccactcctttgatatcaagcccttcactactgttgacttctccagcatttctactccacattacgaagacattccattcacaagaacagatccagtggttgcagattacaagtatgacctgaaacttcaagagtaccaaagtgcaatcaaagtggagcctgcatctccaccttattattctgagaagactcagctctacaataagcctcatgaagagccttccaactccctcatggcaattgaatgtcgtgtctgtggagataaagcttctggatttcactatggagttcatgcttgtgaaggatgcaagggtttcttccggagaacaatcagattgaagcttatctatgacagatgtgatcttaactgtcggatccacaaaaaaagtagaaataaatgtcagtactgtcggtttcagaaatgccttgcagtggggatgtctcataatgccatcaggtttgggcggatgccacaggccgagaaggagaagctgttggcggagatctccagtgatatcgaccagctgaatccagagtccgctgacctccgggccctggcaaaacatttgtatgactcatacataaagtccttcccgctgaccaaagcaaaggcgagggcgatcttgacaggaaagacaacagacaaatcaaccgcccaggtttgc

SEQ ID NO: 4526 - DNA, 4458 bp, Homo sapiens
  source 1..4458: mol_type = genomic DNA
atggccgccaatgtgggatcgatgtttcaatattggaagcgatttgatctacggcgactccagaaggagcttaattccgtcgcttctgagctgtctgcacggcaggaggagagtgaacattctcataaacatttaattgaactccgccgggaatttaagaaaaatgtacctgaggaaatcagagagatggtggctcctgtattaaaaagcttccaagccgaggtggtggcccttagtaagagaagtcaggaggcggaggctgcttttctgagtgtttacaagcaattaattgaagcaccagaccccgtgcctgtgtttgaggcggcacgcagcctagacgacagactgcagccccccagctttgaccccagtgggcagccccggcgagacctccacacttcgtggaagaggaaccccgagctcctcagccccaaagagcagagagaggggacgtcgcctgccgggcccacgctgaccgagggaagccgcctcccaggcattcccgggaaagccctcctgacagaaaccttgctgcagagaaatgaggcggaaaaacaaaagggccttcaagaagtacagatcactttggcggccagactgggggaggcagaggagaaaatcaaagtcctacattcagcgctaaaggctacgcaggcagagctgctagagctgcggcggaagtacgacgaggaggcagcatccaaggcagatgaagtcggcctgatcatgaccaacctggagaaagctaatcagcgagctgaggctgcccagcgggaggtggaaagtctccgggaacagctggcctctgtcaacagctccatccgcctggcttgctgctctccccaggggcccagtggggataaggtgaacttcactctgtgctcgggccctcggctggaggccgcgctggcctccaaggacagggagatcctgcggctgctgaaggacgtgcagcacctccagagctcactgcaggagctggaggaggcatccgccaaccagatcgccgacctggagcggcagctcacggccaagtccgaggccatagaaaagctggaagagaagctccaggcccagtctgactatgaggaaattaaaacggagctgagcatcctgaaagccatgaagctggcctccagcacctgcagcctcccccagggcatggccaagcctgaagactcactgcttattgcaaaggaggccttcttccccacgcagaaattccttctggagaagcccagcctcctggccagccctgaggaagacccatcagaggacgattccatcaaggattcactgggcacggagcagtcctacccctcccctcagcagctcccacctccaccagggccagaagaccccctgtctcccagccccgggcagcccctgctgggccccagcttggggcctgacggcactcggactttctcgctgtcccccttccccagcctggcatcaggggagagactgatgatgcccccagccgccttcaagggagaggcgggcggcctgctggtgttccccccagccttctatggcgccaagccccccacagcccctgccaccccggcccctggccctgagccactgggcggtcctgagcccgcggatggtggtgggggcggagcggcggggcccggggcagaggaggagcagctggacacggcagagatcgccttccaggtgaaggagcagctgctgaaacacaacatcgggcagcgggtgtttgggcattacgtgctggggctgtcgcagggctcggtcagcgagatcctagcccggcccaagccctggcgcaagctcacggtgaagggcaaggagcccttcatcaagatgaagcagttcctgtcggatgagcagaatgtactggcgctcaggaccatccaagtgcggcagcgaggcagcatcaccccgagaatccgcacgcctgagacaggctcagacgacgccatcaagagcattctagagcaggccaagaaggagatcgagtcgcagaagggcggcgagcccaagacctcggtggccccgctgagcatcgccaacggcacgacccccgccagcacctcggaggacgccatcaagagcatcctggagcaggcacgccgtgagatgcaggcgcaacagcaggcgctgctggagatggaggtggcgcccaggggccgctcggtgcccccctcgcccccggagcggccatcactggccaccgcgagccagaacggggccccggccttggtgaagcaggaggagggcagcgggggccccgcgcaggcgccgctcccggtcctgtcccccgccgccttcgtgcagagcatcatccgcaaggtcaagtccgagatcggcgacgccggctacttcgaccaccactgggcctccgaccgcggcctgctcagccgcccctacgcctccgtgtcgccctcgctgtcctcctcctcctcctctggctactctggccagcccaacggccgcgcctggccccgcggggacgaggcccctgtgccccccgaggacgaggcggcggcaggggcggaggacgaaccccccaggacgggcgagctcaaggctgagggcgcgacggccgaggcgggcgcgcggctgccctactacccggcctacgtgccgcgcaccctgaagcccaccgtgccgccgctgacccccgagcagtacgagctgtacatgtaccgtgaggtagacacgctggagctcacccgccaggtcaaggagaagctggccaagaacggcatctgccagaggatcttcggggagaaggtgctgggcctgtcacagggcagcgtgagcgacatgctgtcccggccgaagccatggagcaagctgacgcagaaggggcgggagcccttcatccgcatgcagctgtggctctctgaccagctcggccaggcagtgggccagcagcctggtgcctcccaggccagtcccacagaaccaaggtcctcaccatccccaccccccagccccacagagcctgagaagagctcccaggagccgttgagcctgtccctggagagcagcaaggagaaccagcagccagagggccgctccagctcctcgttgagcgggaagatgtactcaggcagccaggccccagggggcatccaggagatcgtggccatgtcccccgagctggacacgtactccatcaccaagagggtgaaggaggtcctcacagacaacaatctagggcagcggctgtttggggaaagcatcctgggtctgacacagggctccgtgtctgacctgctgtcccggcccaaaccctggcacaagctgagcctgaaggggcgggagccttttgtccgcatgcagctgtggctcaatgacccccataacgtggagaagctgagggatatgaagaagctggagaagaaagcctacctgaaacgtcgctatggcctcatcagcaccggctcagacagtgagtccccggccacccgctcagagtgccccagcccctgcctgcagccccaggacctgagcctcctgcagatcaagaagccccgggtggtgctggcacccgaggagaaggaggcactgcggaaggcctatcagctggaaccctacccctcgcagcagaccatcgagctcctctccttccagctcaacctcaagaccaacaccgtcatcaactggttccacaactacaggtcccggatgcgccgggagatgttggtggaggggacccaggatgagccagaccttgatccaagcgggggtcctggaatcctaccgccaggccactcccacccagaccccaccccgcagagccctgactctgagactgaggaccagaagccaaccgtgaaggaactggagcttcaggagggccctgaggagaacagcacacccctgaccacccaggacaaggcccaagtgaggatcaagcaggaacagatggaggaggatgctgaggaagaggcaggcagccagccccaggactcaggggagctggacaaaggccaaggtccccccaaagaggagcatcccgaccctccgggtaatgatggactcccaaaagtggctcccgggcccctccttccaggtggatccaccccagactgtccctcacttcatccccaacaggagagtgaggccggggagcgacttcacccggaccctttaagttttaagtcagcctcagagtcctcacgctgcagcctggaggtgtcactgaactcgccctcggccgcctcctcaccaggcctcatgatgtctgtgtcacctgtcccctcctcctcagctcccatctccccatccccacctggcgccccccctgccaaagtgccgagtgccagccccactgctgacatggctggagccttgcaccccagtgccaaggtgaaccccaacttgcagcggcggcatgagaagatggccaatctgaacaacatcatttaccgagtagagcgggctgccaatcgggaggaggccctggagtgggagttc

SEQ ID NO: 4527 - DNA, 1383 bp, Homo sapiens
  source 1..1383: mol_type = genomic DNA
atggaagaatctcacttcaattctaacccgtacttctggccttctatccccacagtctcaggtcagatcgagaacacaatgttcatcaacaagatgaaggatcagctgttgccagagaagggctgtggtctggccccacctcactaccccaccttgctgacagtgcctgcctcagtgtccctgccctcaggcatcagtatggacacagagtccaagtcagaccagctgaccccacacagccaagcgtccgttacccagaatatcacggtggtccctgtgccgtctacaggactgatgactgctgccctgcaggttgtccctgacctctccaagaaggtagcatcgaccctaaccgaggaaggaggcggaggtggtggtggaggtggcagtgtggctcctaagccaccccggggccggaagaagaagcggatgctggaatcagggctgcccgagatgaatgacccttatgtcctctcccctgaggatgatgatgaccatcagaaagacggcaagacctacaggtgccggatgtgctcactgacattctactccaagtcggagatgcagatccactccaagtcacacaccgagaccaagccccacaagtgcccacattgctccaagaccttcgccaacagctcctacctggcccagcacatccgtatacactcaggggctaagccctacagttgtaacttctgtgagaaatccttccgccagctctcccaccttcagcagcacacccgaatccacactggtgatagaccatacaaatgtgcacacccaggctgtgagaaagccttcacacaactctccaatctgcagtcccacagacggcaacacaacaaagataaacccttcaagtgccacaactgtcatcgggcgtacacggatgcagcctcactagaggtgcacctgtctacgcacacagtgaagcatgccaaggtgtacacctgcactatctgcagtcgggcatacacatcagaaacataccttatgaaacatatgcgcaaacacaacccgcctgatcttcagcaacaggtgcaggcagcagcagcagcggcagcagtggcccaggcccaggctcaagctcaagcccaggctcaggctcaggctcaagcccaggcccaggcccaggcctcccaggcatcacagcagcagcagcagcagcagcagcagcagcagcagcagcagcaacagccaccaccacacttccagtctcctggggcagccccccagggtgggggtggtggggacagcaatcccaaccctccaccccagtgttcctttgacctgaccccgtataagacggcggagcatcataaggacatctgcctcactgtcaccaccagcaccatccaggtggagcacctggccagctct

SEQ ID NO: 4528 - DNA, 1731 bp, Homo sapiens
  source 1..1731: mol_type = genomic DNA
atggaagaatctcacttcaattctaacccgtacttctggccttctatccccacagtctcaggtcagatcgagaacacaatgttcatcaacaagatgaaggatcagctgttgccagagaagggctgtggtctggccccacctcactaccccaccttgctgacagtgcctgcctcagtgtccctgccctcaggcatcagtatggacacagagtccaagtcagaccagctgaccccacacagccaagcgtccgttacccagaatatcacggtggtccctgtgccgtctacaggactgatgactgctggagtctcctgttctcagaggtggagaagagaagggagtcaatcaaggggtccgggtttggtaatcacgtccccctcaggctctcttgtgaccacagcatcatcagctcagaccttccccatttcggctcccatgattgtctcagctcttccccctggctcacaagccctgcaggttgtccctgacctctccaagaaggtagcatcgaccctaaccgaggaaggaggcggaggtggtggtggaggtggcagtgtggctcctaagccaccccggggccggaagaagaagcggatgctggaatcagggctgcccgagatgaatgacccttatgtcctctcccctgaggatgatgatgaccatcagaaagacggcaagacctacaggtgccggatgtgctcactgacattctactccaagtcggagatgcagatccactccaagtcacacaccgagaccaagccccacaagtgcccacattgctccaagaccttcgccaacagctcctacctggcccagcacatccgtatacactcaggggctaagccctacagttgtaacttctgtgagaaatccttccgccagctctcccaccttcagcagcacacccggatccactccaagatgcacacggagaccatcaagccccacaagtgcccgcactgctccaagaccttcgccaacacctcctacctggcccagcacctccgtatccactcgggggccaagccctacaactgttcctactgccagaaggccttccgccagctctcccacctccagcagcacacacgaatccacactggtgatagaccatacaaatgtgcacacccaggctgtgagaaagccttcacacaactctccaatctgcagtcccacagacggcaacacaacaaagataaacccttcaagtgccacaactgtcatcgggcgtacacggatgcagcctcactagaggtgcacctgtctacgcacacagtgaagcatgccaaggtgtacacctgcactatctgcagtcgggcatacacatcagaaacataccttatgaaacatatgcgcaaacacaacccgcctgatcttcagcaacaggtgcaggcagcagcagcagcggcagcagtggcccaggcccaggctcaagctcaagcccaggctcaggctcaggctcaagcccaggcccaggcccaggcctcccaggcatcacagcagcagcagcagcagcagcagcagcagcagcagcagcagcaacagccaccaccacacttccagtctcctggggcagccccccagggtgggggtggtggggacagcaatcccaaccctccaccccagtgttcctttgacctgaccccgtataagacggcggagcatcataaggacatctgcctcactgtcaccaccagcaccatccaggtggagcacctggccagctct

SEQ ID NO: 4529 - DNA, 1548 bp, Homo sapiens
  source 1..1548: mol_type = genomic DNA
atggaagaatctcacttcaattctaacccgtacttctggccttctatccccacagtctcaggtcagatcgagaacacaatgttcatcaacaagatgaaggatcagctgttgccagagaagggctgtggtctggccccacctcactaccccaccttgctgacagtgcctgcctcagtgtccctgccctcaggcatcagtatggacacagagtccaagtcagaccagctgaccccacacagccaagcgtccgttacccagaatatcacggtggtccctgtgccgtctacaggactgatgactgctggagtctcctgttctcagaggtggagaagagaagggagtcaatcaaggggtccgggtttggtaatcacgtccccctcaggctctcttgtgaccacagcatcatcagctcagaccttccccatttcggctcccatgattgtctcagctcttccccctggctcacaagccctgcaggttgtccctgacctctccaagaaggtagcatcgaccctaaccgaggaaggaggcggaggtggtggtggaggtggcagtgtggctcctaagccaccccggggccggaagaagaagcggatgctggaatcagggctgcccgagatgaatgacccttatgtcctctcccctgaggatgatgatgaccatcagaaagacggcaagacctacaggtgccggatgtgctcactgacattctactccaagtcggagatgcagatccactccaagtcacacaccgagaccaagccccacaagtgcccacattgctccaagaccttcgccaacagctcctacctggcccagcacatccgtatacactcaggggctaagccctacagttgtaacttctgtgagaaatccttccgccagctctcccaccttcagcagcacacccgaatccacactggtgatagaccatacaaatgtgcacacccaggctgtgagaaagccttcacacaactctccaatctgcagtcccacagacggcaacacaacaaagataaacccttcaagtgccacaactgtcatcgggcgtacacggatgcagcctcactagaggtgcacctgtctacgcacacagtgaagcatgccaaggtgtacacctgcactatctgcagtcgggcatacacatcagaaacataccttatgaaacatatgcgcaaacacaacccgcctgatcttcagcaacaggtgcaggcagcagcagcagcggcagcagtggcccaggcccaggctcaagctcaagcccaggctcaggctcaggctcaagcccaggcccaggcccaggcctcccaggcatcacagcagcagcagcagcagcagcagcagcagcagcagcagcagcaacagccaccaccacacttccagtctcctggggcagccccccagggtgggggtggtggggacagcaatcccaaccctccaccccagtgttcctttgacctgaccccgtataagacggcggagcatcataaggacatctgcctcactgtcaccaccagcaccatccaggtggagcacctggccagctct

SEQ ID NO: 4530 - DNA, 675 bp, Homo sapiens
  source 1..675: mol_type = genomic DNA
atggctgcggggatgtatttggaacattatctggacaacctgaaggctgaaattgacaagttggccactgagtatatgagtagtgcccgcagcctgagctccgaggaaaaattggcccttctcaaacagatccaggaagcctatggcaagtgcaaggaatttggtgacgacaaggtgcagcttgccatgcagacctatgagatggtggacaaacacattcggcggctggacacagacctggcccgttttgaggctgatctcaaggagaaacagattgagtcaagtgactatgacagctcttccagcaaaggcaaaaagaaaggccggactcaaaaggagaagaaagctgctcgtgctcgttccaaagggaaaaactcggatgaagaagcccccaagactgcccagaagaagttaaagctcgtgcgcacaagtcctgagtatgggatgccctcagtgacctttggcagtgtccacccctctgatgtgttggatatgcctgtggatcccaacgaacccacctattgcctttgtcaccaggtctcctatggagagatgattggctgtgacaaccctgattgttccattgagtggttccattttgcctgtgtggggctgacaaccaagcctcgggggaaatggttttgcccacgctgctcccaagaacggaagaagaaa

SEQ ID NO: 4531 - DNA, 747 bp, Homo sapiens
  source 1..747: mol_type = genomic DNA
atggctgcggggatgtatttggaacattatctggacagtattgaaaaccttccctttgaattacagagaaactttcagctcatgagggacctagaccaaagaacagaggacctgaaggctgaaattgacaagttggccactgagtatatgagtagtgcccgcagcctgagctccgaggaaaaattggcccttctcaaacagatccaggaagcctatggcaagtgcaaggaatttggtgacgacaaggtgcagcttgccatgcagacctatgagatggtggacaaacacattcggcggctggacacagacctggcccgttttgaggctgatctcaaggagaaacagattgagtcaagtgactatgacagctcttccagcaaaggcaaaaagaaaggccggactcaaaaggagaagaaagctgctcgtgctcgttccaaagggaaaaactcggatgaagaagcccccaagactgcccagaagaagttaaagctcgtgcgcacaagtcctgagtatgggatgccctcagtgacctttggcagtgtccacccctctgatgtgttggatatgcctgtggatcccaacgaacccacctattgcctttgtcaccaggtctcctatggagagatgattggctgtgacaaccctgattgttccattgagtggttccattttgcctgtgtggggctgacaaccaagcctcgggggaaatggttttgcccacgctgctcccaagaacggaagaagaaa

SEQ ID NO: 4532 - DNA, 735 bp, Homo sapiens
  source 1..735: mol_type = genomic DNA
atggctgcggggatgtatttggaacattatctggacagtattgaaaaccttccctttgaattacagagaaactttcagctcatgagggacctagaccaaagaacagaggacctgaaggctgaaattgacaagttggccactgagtatatgagtagtgcccgcagcctgagctccgaggaaaaattggcccttctcaaacagatccaggaagcctatggcaagtgcaaggaatttggtgacgacaaggtgcagcttgccatgcagacctatgagatggtggacaaacacattcggcggctggacacagacctggcccgttttgaggctgatctcaaggagaaacagattgagtcaagtgactatgacagctcttccagcaaaggccggactcaaaaggagaagaaagctgctcgtgctcgttccaaagggaaaaactcggatgaagaagcccccaagactgcccagaagaagttaaagctcgtgcgcacaagtcctgagtatgggatgccctcagtgacctttggcagtgtccacccctctgatgtgttggatatgcctgtggatcccaacgaacccacctattgcctttgtcaccaggtctcctatggagagatgattggctgtgacaaccctgattgttccattgagtggttccattttgcctgtgtggggctgacaaccaagcctcgggggaaatggttttgcccacgctgctcccaagaacggaagaagaaa

SEQ ID NO: 4533 - DNA, 744 bp, Homo sapiens
  source 1..744: mol_type = genomic DNA
atggctgcggggatgtatttggaacattatctggacagtattgaaaaccttccctttgaattacagagaaactttcagctcatgagggacctagaccaaagaacagaggacctgaaggctgaaattgacaagttggccactgagtatatgagtagtgcccgcagcctgagctccgaggaaaaattggcccttctcaaacagatccaggaagcctatggcaagtgcaaggaatttggtgacgacaaggtgcagcttgccatgcagacctatgagatggtggacaaacacattcggcggctggacacagacctggcccgttttgaggctgatctcaaggagaaacagattgagtcaagtgactatgacagctcttccagcaaaggcaaaaagagccggactcaaaaggagaagaaagctgctcgtgctcgttccaaagggaaaaactcggatgaagaagcccccaagactgcccagaagaagttaaagctcgtgcgcacaagtcctgagtatgggatgccctcagtgacctttggcagtgtccacccctctgatgtgttggatatgcctgtggatcccaacgaacccacctattgcctttgtcaccaggtctcctatggagagatgattggctgtgacaaccctgattgttccattgagtggttccattttgcctgtgtggggctgacaaccaagcctcgggggaaatggttttgcccacgctgctcccaagaacggaagaagaaa

SEQ ID NO: 4534 - DNA, 537 bp, Homo sapiens
  source 1..537: mol_type = genomic DNA
atggctgcggggatgtatttggaacattatctggacagtattgaaaaccttccctttgaattacagagaaactttcagctcatgagggacctagaccaaagaacagaggacctgaaggctgaaattgacaagttggccactgagtatatgagtagtgcccgcagcctgagctccgaggaaaaattggcccttctcaaacagatccaggaagcctatggcaagtgcaaggaatttggtgacgacaaggtgcagcttgccatgcagacctatgagatggtggacaaacacattcggcggctggacacagacctggcccgttttgaggctgatctcaaggagaaacagattgagtcaagtgactatgacagctcttccagcaaaggcaaaaagaaaggccggactcaaaaggagaagaaagctgctcgtgctcgttccaaagggaaaaactcggatgaagaagcccccaagactgcccagaagaagttaaagctcgtgcgcactgttccattgagtggttccattttgcctgtgtggggc

SEQ ID NO: 4535 - DNA, 738 bp, Homo sapiens
  source 1..738: mol_type = genomic DNA
atggctgcggggatgtatttggaacattatctggacagtattgaaaaccttccctttgaattacagagaaactttcagctcatgagggacctagaccaaagaacagaggacctgaaggctgaaattgacaagttggccactgagtatatgagtagtgcccgcagcctgagctccgaggaaaaattggcccttctcaaacagatccaggaagcctatggcaagtgcaaggaatttggtgacgacaaggtgcagcttgccatgcagacctatgagatggtggacaaacacattcggcggctggacacagacctggcccgttttgaggctgatctcaaggagaaacagattgagtcaagtgactatgacagctcttccagcaaagaaggccggactcaaaaggagaagaaagctgctcgtgctcgttccaaagggaaaaactcggatgaagaagcccccaagactgcccagaagaagttaaagctcgtgcgcacaagtcctgagtatgggatgccctcagtgacctttggcagtgtccacccctctgatgtgttggatatgcctgtggatcccaacgaacccacctattgcctttgtcaccaggtctcctatggagagatgattggctgtgacaaccctgattgttccattgagtggttccattttgcctgtgtggggctgacaaccaagcctcgggggaaatggttttgcccacgctgctcccaagaacggaagaagaaa

SEQ ID NO: 4536 - DNA, 1425 bp, Homo sapiens
  source 1..1425: mol_type = genomic DNA
atggctgagggatcagtgatgttcagtgatgtgtccatagacttctctcaggaggagtgggactgcctggaccctgttcagagggacttatacagagatgtgatgttggagaactacggcaatctggtttcaatgggactttacactcctaagcctcaagtgatctccttattggaacaagggaaagagccctggatggttggcagagagcttacaagaggcctgtgttcagatctggaatcgatgtgtgaaaccaagttattatctctaaagaaggaagtttatgaaatagaattatgccagagggagataatgggacttacaaagcatggccttgagtactccagttttggagatgttttggaatatagaagccaccttgcaaaacaactgggatatccaaatgggcattttagtcaagaaatattcactcctgaatacatgcccacatttattcaacagacattccttactctccatcaaataattaataatgaagacagaccctatgaatgtaagaaatgtggaaaggcctttagtcagaactcacaatttattcaacatcagagaattcatattggtgaaaaatcttatgaatgtaaagagtgtgggaaattctttagttgtggttcacatgttactcggcatctgaaaattcatactggcgaaaaaccctttgaatgtaaggaatgtggaaaggccttcagttgtagctcatacctttctcaacatcagagaatccataccggtaagaaaccctatgaatgtaaggaatgtgggaaggcctttagttattgctcaaatcttattgaccatcagcgaattcacactggtgaaaaaccttatgaatgtaaagtatgtgggaaagcctttactaagagctcacaactttttcagcatgcacgaattcatacaggtgagaaaccctatgaatgtaaggaatgtggcaaagcctttacccagagctcaaagcttgttcaacatcagagaattcatactggtgagaaaccctatgagtgcaaggaatgtggcaaagcctttagtagtggctcagcacttactaatcatcagagaattcacactggtgagaaaccctatgattgtaaggaatgtggaaaggcttttactcagagctcacagcttcgtcaacatcagagaattcacgctggtgagaaaccctttgaatgtcttgaatgtgggaaggcctttactcagaactcacaacttttccagcatcagagaattcatacagatgaaaaaccatatgaatgtaatgaatgtggaaaggcctttaataaatgctcaaaccttactcgacatctgagaattcacactggtgaaaagccctataactgtaaggaatgtgggaaggcttttagtagtggctcggatctcattcgtcatcagggaattcatactaataaa

SEQ ID NO: 4537 - DNA, 705 bp, Homo sapiens
  source 1..705: mol_type = genomic DNA
atggagatcctgaaggagctagacgagtgctacgagcgcttcagtcgcgagacagacggggcgcagaagcggcggatgctgcactgtgtgcagcgcgcgctgatccgcagccaggagctgggcgacgagaagatccagatcgtgagccagatggtggagctggtggagaaccgcacgcggcaggtggacagccacgtggagctgttcgaggcgcagcaggagctgggcgacacagcgggcaacagcggcaaggctggcgcggacaggcccaaaggcgaggcggcagcgcaggctgacaagcccaacagcaagcgctcacggcggcagcgcaacaacgagaaccgtgagaacgcgtccagcaaccacgaccacgacgacggcgcctcgggcacacccaaggagaagaaggccaagacctccaagaagaagaagcgctccaaggccaaggcggagcgagaggcgtcccctgccgacctccccatcgaccccaacgaacccacgtactgtctgtgcaaccaggtctcctatggggagatgatcggctgcgacaacgacgagtgccccatcgagtggttccacttctcgtgcgtggggctcaatcataaacccaagggcaagtggtactgtcccaagtgccggggggagaacgagaagaccatggacaaagccctggagaaatccaaaaaagagagggcttacaacagg

SEQ ID NO: 4538 - DNA, 1266 bp, Homo sapiens
  source 1..1266: mol_type = genomic DNA
atgtccttcgtggaatgtccttatcattcccctgcggaacgattggtcgctgaggcggatgaaggcgggcctagcgcaataactggtatgggtctgtgtttccgctgtcttcttttttctttttcggggaggagcggggtggagggtggacgagttgatttgaacgtcttcgggtcgctcggcctccagccttggattggttcttctcgctgctggggcgggccgtgctcttccgccctgcggtgtggttggttctcctcctggcctccgccctccaaatcggcgattcccataggcggcggctctcggggtgcggggcgagtctcccgctggcctcctccccattggctggaggcctggcgggtgtcgccccggcccctctccccgctcagcccggccactttcgggcgcggatttatagcagtagcagtgatcccgggcctgtgggctcggggccggggctgcagttcggaccgcctcccgcgacccgcggggccggctcggagacagtttcaggccgcatctctgctgacccgagggtggggccgcgcgtggccgtggaaacagatcctgaaggagctagacgagtgctacgagcgcttcagtcgcgagacagacggggcgcagaagcggcggatgctgcactgtgtgcagcgcgcgctgatccgcagccaggagctgggcgacgagaagatccagatcgtgagccagatggtggagctggtggagaaccgcacgcggcaggtggacagccacgtggagctgttcgaggcgcagcaggagctgggcgacacagcgggcaacagcggcaaggctggcgcggacaggcccaaaggcgaggcggcagcgcaggctgacaagcccaacagcaagcgctcacggcggcagcgcaacaacgagaaccgtgagaacgcgtccagcaaccacgaccacgacgacggcgcctcgggcacacccaaggagaagaaggccaagacctccaagaagaagaagcgctccaaggccaaggcggagcgagaggcgtcccctgccgacctccccatcgaccccaacgaacccacgtactgtctgtgcaaccaggtctcctatggggagatgatcggctgcgacaacgacgagtgccccatcgagtggttccacttctcgtgcgtggggctcaatcataaacccaagggcaagtggtactgtcccaagtgccggggggagaacgagaagaccatggacaaagccctggagaaatccaaaaaagagagggcttacaacagg

SEQ ID NO: 4539 - DNA, 630 bp, Homo sapiens
  source 1..630: mol_type = genomic DNA
atgctgcactgtgtgcagcgcgcgctgatccgcagccaggagctgggcgacgagaagatccagatcgtgagccagatggtggagctggtggagaaccgcacgcggcaggtggacagccacgtggagctgttcgaggcgcagcaggagctgggcgacacagcgggcaacagcggcaaggctggcgcggacaggcccaaaggcgaggcggcagcgcaggctgacaagcccaacagcaagcgctcacggcggcagcgcaacaacgagaaccgtgagaacgcgtccagcaaccacgaccacgacgacggcgcctcgggcacacccaaggagaagaaggccaagacctccaagaagaagaagcgctccaaggccaaggcggagcgagaggcgtcccctgccgacctccccatcgaccccaacgaacccacgtactgtctgtgcaaccaggtctcctatggggagatgatcggctgcgacaacgacgagtgccccatcgagtggttccacttctcgtgcgtggggctcaatcataaacccaagggcaagtggtactgtcccaagtgccggggggagaacgagaagaccatggacaaagccctggagaaatccaaaaaagagagggcttacaacagg

SEQ ID NO: 4540 - DNA, 1647 bp, Homo sapiens
  source 1..1647: mol_type = genomic DNA
atgtctcagggatcagtgtcattcaaggatgtgactgtggacttcacccaggaggagtggcagcaactagaccctgctcagaaggcgctttacagggatgtgatgttggaaaactattgccacttcgtatctgtggggtttcacatggctaagcctgatatgatccgcaagttggaacaaggagaagagctatggacacagagaatttttccaagttacagctacctagaagaagatgggaaaactgaagatgtcttagtgaagttcaaagaataccaagacaggcattctagacccctcatattcatcaaccacaaaaaactaattaaggagagaagtaatatttatggtaaaacatttactctaggcaagaaccgtatttcaaaaacaatactatgtgaatataaacctgatggaaaagttttgaaaaatatttcagaactagtcattagaaatataagccccataaaagagaagtttggtgacagtactggatgggagaaatcactcctcaataccaagcatgagaaaattcatcctgcagtgaatctccataaacaaacagaaagagttctcagtggtaaacaggagcttattcagcatcagaaggttcaagctccagagcaaccatttgaccataatgaatgtgaaaaatccttcctgatgaaaggaatgctatttacacatactagagctcacagaggagaaagaacctttgaatacaataaagatggaattgccttcatagaaaagtcaagcctcagtgtccatccaagtaatcttatggaaaagaagccctctgcctacaacaaatatgggaaattcctctgcagaaagcctgtttttattatgcctcagagacctcaaacagaagagaaaccctttcactgtccttactgtgggaataactttagaaggaagtcatacctcattgaacatcagcgaattcacacaggtgaaaaaccttatgtttgcaatcaatgtggaaaggccttccgtcagaagacagccctcacccttcatgagaaaacacatatagaggggaaaccctttatttgtatcgattgtgggaagtccttccgccagaaggccaccctcactagacatcacaaaacacatacgggggagaaagcctatgaatgtcctcagtgtggaagtgcctttaggaagaagtcatacctcattgatcaccagagaactcacacaggagagaaaccgtatcagtgtaatgagtgtgggaaggcatttatccagaagacaaccctcactgttcatcagagaactcacacaggagagaaaccctatatttgcaatgaatgtgggaagtccttctgccaaaagacaaccctcactctccaccagagaattcacacgggggaaaaaccctatatttgtaatgaatgtgggaagtccttccgccagaaggcaatcctcactgttcatcacagaatacatacaggagaaaaatccaatgggtgtcctcagtgtgggaaagccttcagtaggaaatcaaacctcattcgccatcagaaaactcacacaggcgagaaaccatatgaatgtaaacagtgtgggaagttcttcagttgtaagtcaaacctcattgtccatcagaaaactcacaaggtagaaaccacgggaattcag

SEQ ID NO: 4541 - DNA, 1650 bp, Homo sapiens
  source 1..1650: mol_type = genomic DNA
atgcccttacagggatcagtgtcattcaaggatgtgactgtggacttcacccaggaggagtggcagcaactagaccctgctcagaaggcgctttacagggatgtgatgttggaaaactattgccacttcgtatctgtggggtttcacatggctaagcctgatatgatccgcaagttggaacaaggagaagagctatggacacagagaatttttccaagttacagctacctagaagaagatgggaaaactgaagatgtcttagtgaagttcaaagaataccaagacaggcattctagacccctcatattcatcaaccacaaaaaactaattaaggagagaagtaatatttatggtaaaacatttactctaggcaagaaccgtatttcaaaaacaatactatgtgaatataaacctgatggaaaagttttgaaaaatatttcagaactagtcattagaaatataagccccataaaagagaagtttggtgacagtactggatgggagaaatcactcctcaataccaagcatgagaaaattcatcctgcagtgaatctccataaacaaacagaaagagttctcagtggtaaacaggagcttattcagcatcagaaggttcaagctccagagcaaccatttgaccataatgaatgtgaaaaatccttcctgatgaaaggaatgctatttacacatactagagctcacagaggagaaagaacctttgaatacaataaagatggaattgccttcatagaaaagtcaagcctcagtgtccatccaagtaatcttatggaaaagaagccctctgcctacaacaaatatgggaaattcctctgcagaaagcctgtttttattatgcctcagagacctcaaacagaagagaaaccctttcactgtccttactgtgggaataactttagaaggaagtcatacctcattgaacatcagcgaattcacacaggtgaaaaaccttatgtttgcaatcaatgtggaaaggccttccgtcagaagacagccctcacccttcatgagaaaacacatatagaggggaaaccctttatttgtatcgattgtgggaagtccttccgccagaaggccaccctcactagacatcacaaaacacatacgggggagaaagcctatgaatgtcctcagtgtggaagtgcctttaggaagaagtcatacctcattgatcaccagagaactcacacaggagagaaaccgtatcagtgtaatgagtgtgggaaggcatttatccagaagacaaccctcactgttcatcagagaactcacacaggagagaaaccctatatttgcaatgaatgtgggaagtccttctgccaaaagacaaccctcactctccaccagagaattcacacgggggaaaaaccctatatttgtaatgaatgtgggaagtccttccgccagaaggcaatcctcactgttcatcacagaatacatacaggagaaaaatccaatgggtgtcctcagtgtgggaaagccttcagtaggaaatcaaacctcattcgccatcagaaaactcacacaggcgagaaaccatatgaatgtaaacagtgtgggaagttcttcagttgtaagtcaaacctcattgtccatcagaaaactcacaaggtagaaaccacgggaattcag

SEQ ID NO: 4542 - DNA, 984 bp, Homo sapiens
  source 1..984: mol_type = genomic DNA
atggacgcggtgttgctggagcacttccccgggggcctagacgcctttccttcttcgtacttcgacgaggacgacttcttcaccgaccagtcttcacgggaccccctggaggacggcgatgagctgctggcggacgagcaggccgaggtggagttccttagccaccagctccacgagtactgctaccgcgacggggcgtgcctgctgctgcagcccgcgcccccggccgccccgctagcgctcgccccgccgtcctcggggggcctcggtgagccagacgacggcggcggcggcggctactgctgcgagacgggggcgcccccaggcggcttcccctactcgcccggctcgccgccctcgtgcctggcctacccgtgcgccggggcggcagtactgtctcccggggcgcggctgcgcggcctgagcggagcggcggctgcggcggcgcggcgccggcggcgggtgcgctccgaggcggagctgcagcagctgcggcaggcggccaacgtgcgcgagcggcggcgcatgcagtccatcaacgacgccttcgaggggctgcgctcgcacatccccacgctgccctacgagaagcgcctctccaaggtggacacgctgcgcctggccatcggctacatcaacttcctcagcgagctcgtgcaggccgacctgcccttgcgcggcggtggcgcgggcggctgcggggggccgggcggcggcgggcgcctgggcggggacagcccgggcagccaggcccagaaggtcatcatctgccatcggggcacccggtccccctcccccagcgaccctgattatggcctccctcccctagcaggacactctctctcatggactgatgaaaaacaactcaaggaacaaaatattatccgaacagccaaagtctggaccccagaggaccccagaaaactcaacagcaaatcttccttcaacaacatagaaaacgaaccaccatttgagtttgtgtcc

SEQ ID NO: 4543 - DNA, 957 bp, Homo sapiens
  source 1..957: mol_type = genomic DNA
atgggcagcgccagcccgggtctgagcagcgtatcccccagccacctcctgctgccccccgacacggtgtcgcggacaggcttggagaaggcggcagcgggggcagtgggtctcgagagacgggactggagtcccagtccacccgccacgcccgagcagggcctgtccgccttctacctctcctactttgacatgctgtaccctgaggacagcagctgggcagccaaggcccctggggccagcagtcgggaggagccacctgaggagcctgagcagtgcccggtcattgacagccaagccccagcgggcagcctggacttggtgcccggcgggctgaccttggaggagcactcgctggagcaggtgcagtccatggtggtgggcgaagtgctcaaggacatcgagacggcctgcaagctgctcaacatcaccgcagatcccatggactggagccccagcaatgtgcagaagtggctcctgtggacagagcaccaataccggctgccccccatgggcaaggccttccaggagctggcgggcaaggagctgtgcgccatgtcggaggagcagttccgccagcgctcgcccctgggtggggatgtgctgcacgcccacctggacatctggaagtcagcctcgaccagtgaggagagctggaccgacagcgaggtggactcatcatgctccgggcagcccatccacctgtggcagttcctcaaggagttgctactcaagccccacagctatggccgcttcattaggtggctcaacaaggagaagggcatcttcaaaattgaggactcagcccaggtggcccggctgtggggcatccgcaagaaccgtcccgccatgaactacgacaagctgagccgctccatccgccagtattacaagaagggcatcatccggaagccagacatctcccagcgcctcgtctaccagttcgtgcaccccatc

SEQ ID NO: 4544 - DNA, 1662 bp, Homo sapiens
  source 1..1662: mol_type = genomic DNA
atgacggctccttgctcccagccggcgcagcttcctggacgccgccagctcgggctggtgccgttcccgccgccgccgccgcggacgccgctgctgtggctgctgctgctgctgctggccgccgtggcgccggcgcgcggctgggagagcggagacctggagttgtttgacttagtggaggaggtgcagctcaacttctaccagttcctcggggtgcagcaggatgcatcatctgcagacatcagaaaagcatatcgtaagctttcactaactttacatccagacaagaataaagatgaaaatgcagaaactcagtttagacaattggtggccatttatgaagttttaaaggatgatgaacgaaggcagaggtatgatgatattctgatcaatggacttccagattggcgacagcctgtattctactacaggcgggtgagaaaaatgagcaatgctgagctggcattactcttgttcattattctcacagtgggtcattatgctgtggtttggtcaatctacctggaaaaacaactggatgaactactaagtagaaaaaagagagaaaagaaaaaaaagactggcagcaagagtgtggatgtatcaaaactcggtgcttcagaaaaaaatgaaagattgctgatgaaaccacagtggcatgatttgcttccatgcaaactggggatttggttttgccttacactaaaagcattacctcacctcatccaggatgctgggcagttttatgctaaatataaagaaacaagattgaaggaaaaggaagatgcactgactagaactgaacttgaaacacttcaaaaacagaagaaagttaaaaaaccaaaacctgaatttcctgtatacacacctttagaaactacatatattcagtcttatgatcatggaacttccatagaagaaattgaggaacaaatggatgattggttggaaaacaggaaccgaacacagaaaaaacaggcacctgaatggacagaagaggacctcagccaactgacaagaagtatggttaagttcccaggagggactccaggtcgatgggaaaagattgcccacgaattgggtcgatctgtgacagatgtgacaaccaaagccaagcaactgaaggattcagtgacctgctccccaggaatggttagactctccgaactcaaatcgacagttcagaattccaggcccatcaaaacggccaccaccttgcccgatgacatgatcacccagcgagaggacgcagagggggtggcagcggaggaggagcaggagggagactccggtgagcaggagaccggggccactgatgcccggcctcggaggcggaagccagccaggctgctggaggctacagcgaagccggagccagaggagaagtccagagccaagcggcagaaggactttgacatagcagaacaaaacgagtccagcgacgaggagagcctgagaaaagagagagctcggtctgcagaggagccgtggactcaaaatcaacagaaacttctggaactggcgttgcagcagtacccaaggggatcctctgaccgctgggacaaaatagccagatgtgtcccgtccaagagcaaggaagactgtatcgctaggtacaagttgctggttgaactggtccaaaagaaaaaacaagctaaaagc

SEQ ID NO: 4545 - DNA, 1863 bp, Homo sapiens
  source 1..1863: mol_type = genomic DNA
atgctgcttctgccaagcgccgcggacggccggggcaccgccatcacccacgctctgacctctgcctctacactctgtcaagttgaacctgtgggaagatggtttgaagcttttgttaagaggagaaacagaaatgcttctgcctcttttcaggaactggaggataagaaagagttatccgaggaatcagaagatgaagaattgcagttggaagagtttcccatgctgaaaacacttgatcccaaagactggaagaaccaagatcattatgcagttcttggacttggccatgtgagatacaaggctacacagagacagatcaaagcagctcataaagcaatggttttaaaacatcacccagacaaacggaaagcagctggtgaaccaataaaagaaggagataatgactacttcacttgcataactaaagcttatgaaatgttatctgatccagtgaaaagacgagcatttaacagtgtagatcctacttttgataactcagttccttctaaaagtgaagcaaaggataatttcttcgaagtgtttaccccagtgtttgaaaggaattccagatggtcaaataaaaaaaatgttcctaaacttggtgatatgaattcatcatttgaagatgtagatatattttattctttctggtataattttgattcttggagagaattttcttatttagatgaagaagaaaaagaaaaagcagaatgtcgtgatgagaggagatggattgaaaagcagaacagagcaacaagagcacaaagaaaaaaagaagaaatgaacagaataagaacattagttgacaatgcatacagctgtgatccaaggataaaaaagttcaaggaagaagaaaaagccaagaaagaagcagaaaagaaagcaaaagcagaagctaaacggaaggagcaagaagctaaagaaaaacaaagacaagctgaattagaagctgctcggttagctaaggagaaagaagaggaggaagtcagacagcaagcattgctggcaaagaaggaaaaagatatccagaaaaaagccattaagaaggaaaggcaaaaacttcgaaactcatgcaagacctggaatcatttttctgataatgaggcagagcgggttaaaatgatggaagaagtggaaaaactttgtgatcggcttgaactggcaagcttacagtgcttgaatgaaacactcacatcatgcacaaaagaagtaggaaaggctgctttggaaaaacagatagaagaaataaatgagcaaatcagaaaagagaaagaggaagctgaggctcgtatgcgacaagcatctaagaacacagagaaatcaactggtggaggtggaaatggaagtaaaaattggtcagaagatgatctacaattactaattaaagctgtgaatctgttccctgctggaacaaattcaagatgggaagttattgctaattacatgaacatacattcttcctctggagtcaaaagaactgccaaagatgttattggcaaagcaaagagtctccaaaaacttgaccctcatcaaaaagatgacataaataaaaaggcatttgataagttcaaaaaagaacatggagtggtacctcaagcagacaacgcaacgccttcagaacgatttgaaggtccatatacagacttcaccccttggacaacagaagaacagaagcttttggaacaagctttgaaaacatacccagtaaatacacctgaaagatgggaaaaaatagcagaagcggtgcctggcaggacaaagaaggactgcatgaaacgatacaaggaacttgtcgagatggtaaaagcaaagaaagctgctcaagaacaagtgctgaatgcaagtagagccaagaaa

SEQ ID NO: 4546 - DNA, 1704 bp, Homo sapiens
  source 1..1704: mol_type = genomic DNA
atgctgcttctgccaagcgccgcggacggccggggcaccgccatcacccacgctctgacctctgcctctacactctgtcaagttgaacctgtgggaagatggtttgaagcttttgttaagaggagaaacagaaatgcttctgcctcttttcaggaactggaggataagaaagagttatccgaggaatcagaagatgaagaattgcagttggaagagtttcccatgctgaaaacacttgatcccaaagactggaagaaccaagatcattatgcagttcttggacttggccatgtgagatacaaggctacacagagacagatcaaagcagctcataaagcaatggttttaaaacatcacccagacaaacggaaagcagctggtgaaccaataaaagaaggagataatgactacttcacttgcataactaaagcttatgaaatgttatctgatccagtgaaaagacgagcatttaacagtgtagatcctacttttgataactcagttccttctaaaagtgaagcaaaggataatttcttcgaagtgtttaccccagtgtttgaaaggaattccagatggtcaaataaaaaaaatgttcctaaacttggtgatatgaattcatcatttgaagatgtagatatattttattctttctggtataattttgattcttggagagaattttcttatttagatgaagaagaaaaagaaaaagcagaatgtcgtgatgagaggagatggattgaaaagcagaacagagcaacaagagcacaaagaaaaaaagaagaaatgaacagaataagaacattagttgacaatgcatacagctgtgatccaaggataaaaaagttcaaggaagaagaaaaagccaagaaagaagcagaaaagaaagcaaaagcagaagctaaacggaaggagcaagaagctaaagaaaaacaaagacaagctgaattagaagctgctcggttagctaaggagaaagaagaggaggaagtcagacagcaagcattgctggcaaagaaggaaaaagatatccagaaaaaagccattaagaaggaaaggcaaaaacttcgaaactcatgcaagatagaagaaataaatgagcaaatcagaaaagagaaagaggaagctgaggctcgtatgcgacaagcatctaagaacacagagaaatcaactggtggaggtggaaatggaagtaaaaattggtcagaagatgatctacaattactaattaaagctgtgaatctgttccctgctggaacaaattcaagatgggaagttattgctaattacatgaacatacattcttcctctggagtcaaaagaactgccaaagatgttattggcaaagcaaagagtctccaaaaacttgaccctcatcaaaaagatgacataaataaaaaggcatttgataagttcaaaaaagaacatggagtggtacctcaagcagacaacgcaacgccttcagaacgatttgaaggtccatatacagacttcaccccttggacaacagaagaacagaagcttttggaacaagctttgaaaacatacccagtaaatacacctgaaagatgggaaaaaatagcagaagcggtgcctggcaggacaaagaaggactgcatgaaacgatacaaggaacttgtcgagatggtaaaagcaaagaaagctgctcaagaacaagtgctgaatgcaagtagagccaagaaa

SEQ ID NO: 4547 - DNA, 2241 bp, Homo sapiens
  source 1..2241: mol_type = genomic DNA
atgggtcgctccaattctagatcacattcttcaaggtcaaagtctagatcacagtctagttctcgatcaagatcaagatctcattctagaaagaagcgatacagttctaggtctcgttccagaacatattcaaggtctcgtagtagagatcgtatgtattctagagattatcgtcgcgattacagaaataatagaggaatgagacgaccttatgggtacagaggaaggggtagagggtattatcaaggaggaggaggtagatatcatcgaggtggttatagacctgtctggaatagaaggcactctaggagtcctagacgaggtcgttcacgttccaggagtccaaaaagaagatccgtttcttctcaaagatccagaagcagatctcgccggtcatatagatcttctaggtctccaagatcatcctcttctcgttcttcatccccatatagcaaatctcctgtttctaaaagacgagggtctcaggaaaaacaaaccaaaaaagctgaaggggaaccccaagaagagagtccgttgaaaagtaaatcacaggaggaaccgaaagatacatttgaacatgacccatctgagtctatcgatgaatttaataagtcatcagccacatccggtgatatttggcctggcctttcagcttatgataatagtcctagatcaccccatagtccttcacctattgctacaccacctagtcagagttcatcttgctctgatgctcccatgctcagtacagttcactctgcaaaaaatactccttctcagcattcacattccattcagcatagtcctgaaaggtctgggtctggttctgttggaaatggatctagtcgatacagtccttctcagaatagtccaattcatcacatcccttcacgaagaagtcctgcaaagacaatcgcaccacagaatgctccaagagatgagtctaggggccgttcctcgttttatcctgatggtggagatcaggaaactgcaaagactgggaagttcttaaaaagtccccctctacacaagaatctggatgcacgagaaaagtctaccttcagagaggaaagcccacttaggatcaaaatgatagcgagtgattctcaccgtcctgaagtcaaactcaaaatggcacctgttcctcttgatgattctaacagacctgcttccttgactaaagacaggctgcttgctagtacacttgtccattctgtcaagaaggagcaagaattccgatccatctttgaccacattaagttgccacaggccagcaaaagcacttcagagtcatttattcaacacattgtgtccttggttcatcatgttaaagagcaatacttcaagtcagctgcaatgaccctaaacgagcggttcacttcgtatcagaaagccactgaagaacatagtactcggcaaaagagccctgaaatacacaggagaattgacatctcaccaagtaccctgaggaagcatacccgtttagcaggggaagagagagtttttaaagaagaaaatcaaaagggagataaaaaattaaggtgtgactctgctgaccttcggcatgacattgatcgccgtagaaaagaaagaagtaaagaacggggagattccaagggctccagggaatccagtggatcaagaaagcaggaaaaaactccaaaagattacaaggaatacaaatcttacaaagatgacagtaaacataaaagagagcaagatcattctcgatcttcatcctcttcagcatcaccttcttctcccagttctcgagaagaaaaggagagtaagaaggaaagagaagaagaatttaaaactcaccatgaaatgaaagaatactcaggctttgcaggagttagccgaccacgaggaaccttttttcgaattagaggcagaggaagagccagaggagtttttgctgggacaaatactggtccaaacaactcaaatactacttttcaaaagagaccgaaggaagaggaatgggatccagaatataccccaaagagcaagaagtacttcttgcatgacgacagagatgatggtgtggattattgggccaaaagaggaagaggtcgtggtacttttcaacgtggcagagggcgctttaacttcaaaaaatcaggtagcagtcctaaatggactcatgacaaataccaaggggatgggattgttgaagatgaagaagagaccatggaaaataatgaagaaaagaaggacagacgcaaggaagaaaaggaa

SEQ ID NO: 4548 - DNA, 2607 bp, Homo sapiens
  source 1..2607: mol_type = genomic DNA
atgggtcgctccaattctagatcacattcttcaaggtcaaagtctagatcacagtctagttctcgatcaagatcaagatctcattctagaaagaagcgatacaggtctcgttccagaacatattcaaggtctcgtagtagagatcgtatgtattctagagattatcgtcgcgattacagaaataatagaggaatgagacgaccttatgggtacagaggaaggggtagagggtattatcaaggaggaggaggtagatatcatcgaggtggttatagacctgtctggaatagaaggcactctaggagtcctagacgaggtcgttcacgttccaggagtccaaaaagaagatccgtttcttctcaaagatccagaagcagatctcgccggtcatatagatcttctaggtctccaagatcatcctcttctcgttcttcatccccatatagcaaatctcctgtttctaaaagacgagggtctcaggaaaaacaaaccaaaaaagctgaaggggaaccccaagaagagagtccgttgaaaagtaaatcacaggaggaaccgaaagatacatttgaacatgacccatctgagtctatcgatgaatttaataagtcatcagccacatccggtgatatttggcctggcctttcagcttatgataatagtcctagatcaccccatagtccttcacctattgctacaccacctagtcagagttcatcttgctctgatgctcccatgctcagtacagttcactctgcaaaaaatactccttctcagcattcacattccattcagcatagtcctgaaaggtctgggtctggttctgttggaaatggatctagtcgatacagtccttctcagaatagtccaattcatcacatcccttcacgaagaagtcctgcaaagacaatcgcaccacagaatgctccaagagatgagtctaggggccgttcctcgttttatcctgatggtggagatcaggaaactgcaaagactgggaagttcttaaaaaggttcacagatgaagagtctagagtattcctgcttgataggggtaataccagggataaagaggcttcaaaagagaaaggatcagagaaagggagggcagagggagaatgggaagatcaggaagctctagattacttcagtgataaagagtctggaaaacaaaagtttaatgattcagaaggggatgacacagaggagacagaggattatagacagttcaggaagtcagtcctcgcagatcagggtaaaagttttgctactgcatctcaccggaatactgaggaggaaggactcaagtacaagtccaaagtttcactgaaaggcaatagagaaagtgatggatttagagaagaaaaaaattataaacttaaagagactggatatgtagtggaaaggcctagcactacaaaagataagcacaaagaagaagacaaaaattctgaaagaataacagtaaagaaagaaactcagtcacctgagcaggtaaagtctgaaaagctcaaagacctctttgattacagtccccctctacacaagaatctggatgcacgagaaaagtctaccttcagagaggaaagcccacttaggatcaaaatgatagcgagtgattctcaccgtcctgaagtcaaactcaaaatggcacctgttcctcttgatgattctaacagacctgcttccttgactaaagacaggctgcttgctagtacacttgtccattctgtcaagaaggagcaagaattccgatccatctttgaccacattaagttgccacaggccagcaaaagcacttcagagtcatttattcaacacattgtgtccttggttcatcatgttaaagagcaatacttcaagtcagctgcaatgaccctaaacgagcggttcacttcgtatcagaaagccactgaagaacatagtactcggcaaaagagccctgaaatacacaggagaattgacatctcaccaagtaccctgaggaagcatacccgtttagcaggggaagagagagtttttaaagaagaaaatcaaaagggagataaaaaattaaggtgtgactctgctgaccttcggcatgacattgatcgccgtagaaaagaaagaagtaaagaacggggagattccaagggctccagggaatccagtggatcaagaaagcaggaaaaaactccaaaagattacaaggaatacaaatcttacaaagatgacagtaaacataaaagagagcaagatcattctcgatcttcatcctcttcagcatcaccttcttctcccagttctcgagaagaaaaggagagtaagaaggaaagagaagaagaatttaaaactcaccatgaaatgaaagaatactcaggctttgcaggagttagccgaccacgaggaacctttcatgacgacagagatgatggtgtggattattgggccaaaagaggaagaggtcgtggtacttttcaacgtggcagagggcgctttaacttcaaaaaatcaggtagcagtcctaaatggactcatgacaaataccaaggggatgggattgttgaagatgaagaagagaccatggaaaataatgaagaaaagaaggacagacgcaaggaagaaaaggaa

SEQ ID NO: 4549 - DNA, 2754 bp, Homo sapiens
  source 1..2754: mol_type = genomic DNA
atgggtcgctccaattctagatcacattcttcaaggtcaaagtctagatcacagtctagttctcgatcaagatcaagatctcattctagaaagaagcgatacaggtctcgttccagaacatattcaaggtctcgtagtagagatcgtatgtattctagagattatcgtcgcgattacagaaataatagaggaatgagacgaccttatgggtacagaggaaggggtagagggtattatcaaggaggaggaggtagatatcatcgaggtggttatagacctgtctggaatagaaggcactctaggagtcctagacgaggtcgttcacgttccaggagtccaaaaagaagatccgtttcttctcaaagatccagaagcagatctcgccggtcatatagatcttctaggtctccaagatcatcctcttctcgttcttcatccccatatagcaaatctcctgtttctaaaagacgagggtctcaggaaaaacaaaccaaaaaagctgaaggggaaccccaagaagagagtccgttgaaaagtaaatcacaggaggaaccgaaagatacatttgaacatgacccatctgagtctatcgatgaatttaataagtcatcagccacatccggtgatatttggcctggcctttcagcttatgataatagtcctagatcaccccatagtccttcacctattgctacaccacctagtcagagttcatcttgctctgatgctcccatgctcagtacagttcactctgcaaaaaatactccttctcagcattcacattccattcagcatagtcctgaaaggtctgggtctggttctgttggaaatggatctagtcgatacagtccttctcagaatagtccaattcatcacatcccttcacgaagaagtcctgcaaagacaatcgcaccacagaatgctccaagagatgagtctaggggccgttcctcgttttatcctgatggtggagatcaggaaactgcaaagactgggaagttcttaaaaaggttcacagatgaagagtctagagtattcctgcttgataggggtaataccagggataaagaggcttcaaaagagaaaggatcagagaaagggagggcagagggagaatgggaagatcaggaagctctagattacttcagtgataaagagtctggaaaacaaaagtttaatgattcagaaggggatgacacagaggagacagaggattatagacagttcaggaagtcagtcctcgcagatcagggtaaaagttttgctactgcatctcaccggaatactgaggaggaaggactcaagtacaagtccaaagtttcactgaaaggcaatagagaaagtgatggatttagagaagaaaaaaattataaacttaaagagactggatatgtagtggaaaggcctagcactacaaaagataagcacaaagaagaagacaaaaattctgaaagaataacagtaaagaaagaaactcagtcacctgagcaggtaaagtctgaaaagctcaaagacctctttgattacagtccccctctacacaagaatctggatgcacgagaaaagtctaccttcagagaggaaagcccacttaggatcaaaatgatagcgagtgattctcaccgtcctgaagtcaaactcaaaatggcacctgttcctcttgatgattctaacagacctgcttccttgactaaagacaggctgcttgctagtacacttgtccattctgtcaagaaggagcaagaattccgatccatctttgaccacattaagttgccacaggccagcaaaagcacttcagagtcatttattcaacacattgtgtccttggttcatcatgttaaagagcaatacttcaagtcagctgcaatgaccctaaacgagcggttcacttcgtatcagaaagccactgaagaacatagtactcggcaaaagagccctgaaatacacaggagaattgacatctcaccaagtaccctgaggaagcatacccgtttagcaggggaagagagagtttttaaagaagaaaatcaaaagggagataaaaaattaaggtgtgactctgctgaccttcggcatgacattgatcgccgtagaaaagaaagaagtaaagaacggggagattccaagggctccagggaatccagtggatcaagaaagcaggaaaaaactccaaaagattacaaggaatacaaatcttacaaagatgacagtaaacataaaagagagcaagatcattctcgatcttcatcctcttcagcatcaccttcttctcccagttctcgagaagaaaaggagagtaagaaggaaagagaagaagaatttaaaactcaccatgaaatgaaagaatactcaggctttgcaggagttagccgaccacgaggaaccttttttcgaattagaggcagaggaagagccagaggagtttttgctgggacaaatactggtccaaacaactcaaatactacttttcaaaagagaccgaaggaagaggaatgggatccagaatataccccaaagagcaagaagtacttcttgcatgacgacagagatgatggtgtggattattgggccaaaagaggaagaggtcgtggtacttttcaacgtggcagagggcgctttaacttcaaaaaatcaggtagcagtcctaaatggactcatgacaaataccaaggggatgggattgttgaagatgaagaagagaccatggaaaataatgaagaaaagaaggacagacgcaaggaagaaaaggaa

SEQ ID NO: 4550 - DNA, 2760 bp, Homo sapiens
  source 1..2760: mol_type = genomic DNA
atgggtcgctccaattctagatcacattcttcaaggtcaaagtctagatcacagtctagttctcgatcaagatcaagatctcattctagaaagaagcgatacagttctaggtctcgttccagaacatattcaaggtctcgtagtagagatcgtatgtattctagagattatcgtcgcgattacagaaataatagaggaatgagacgaccttatgggtacagaggaaggggtagagggtattatcaaggaggaggaggtagatatcatcgaggtggttatagacctgtctggaatagaaggcactctaggagtcctagacgaggtcgttcacgttccaggagtccaaaaagaagatccgtttcttctcaaagatccagaagcagatctcgccggtcatatagatcttctaggtctccaagatcatcctcttctcgttcttcatccccatatagcaaatctcctgtttctaaaagacgagggtctcaggaaaaacaaaccaaaaaagctgaaggggaaccccaagaagagagtccgttgaaaagtaaatcacaggaggaaccgaaagatacatttgaacatgacccatctgagtctatcgatgaatttaataagtcatcagccacatccggtgatatttggcctggcctttcagcttatgataatagtcctagatcaccccatagtccttcacctattgctacaccacctagtcagagttcatcttgctctgatgctcccatgctcagtacagttcactctgcaaaaaatactccttctcagcattcacattccattcagcatagtcctgaaaggtctgggtctggttctgttggaaatggatctagtcgatacagtccttctcagaatagtccaattcatcacatcccttcacgaagaagtcctgcaaagacaatcgcaccacagaatgctccaagagatgagtctaggggccgttcctcgttttatcctgatggtggagatcaggaaactgcaaagactgggaagttcttaaaaaggttcacagatgaagagtctagagtattcctgcttgataggggtaataccagggataaagaggcttcaaaagagaaaggatcagagaaagggagggcagagggagaatgggaagatcaggaagctctagattacttcagtgataaagagtctggaaaacaaaagtttaatgattcagaaggggatgacacagaggagacagaggattatagacagttcaggaagtcagtcctcgcagatcagggtaaaagttttgctactgcatctcaccggaatactgaggaggaaggactcaagtacaagtccaaagtttcactgaaaggcaatagagaaagtgatggatttagagaagaaaaaaattataaacttaaagagactggatatgtagtggaaaggcctagcactacaaaagataagcacaaagaagaagacaaaaattctgaaagaataacagtaaagaaagaaactcagtcacctgagcaggtaaagtctgaaaagctcaaagacctctttgattacagtccccctctacacaagaatctggatgcacgagaaaagtctaccttcagagaggaaagcccacttaggatcaaaatgatagcgagtgattctcaccgtcctgaagtcaaactcaaaatggcacctgttcctcttgatgattctaacagacctgcttccttgactaaagacaggctgcttgctagtacacttgtccattctgtcaagaaggagcaagaattccgatccatctttgaccacattaagttgccacaggccagcaaaagcacttcagagtcatttattcaacacattgtgtccttggttcatcatgttaaagagcaatacttcaagtcagctgcaatgaccctaaacgagcggttcacttcgtatcagaaagccactgaagaacatagtactcggcaaaagagccctgaaatacacaggagaattgacatctcaccaagtaccctgaggaagcatacccgtttagcaggggaagagagagtttttaaagaagaaaatcaaaagggagataaaaaattaaggtgtgactctgctgaccttcggcatgacattgatcgccgtagaaaagaaagaagtaaagaacggggagattccaagggctccagggaatccagtggatcaagaaagcaggaaaaaactccaaaagattacaaggaatacaaatcttacaaagatgacagtaaacataaaagagagcaagatcattctcgatcttcatcctcttcagcatcaccttcttctcccagttctcgagaagaaaaggagagtaagaaggaaagagaagaagaatttaaaactcaccatgaaatgaaagaatactcaggctttgcaggagttagccgaccacgaggaaccttttttcgaattagaggcagaggaagagccagaggagtttttgctgggacaaatactggtccaaacaactcaaatactacttttcaaaagagaccgaaggaagaggaatgggatccagaatataccccaaagagcaagaagtacttcttgcatgacgacagagatgatggtgtggattattgggccaaaagaggaagaggtcgtggtacttttcaacgtggcagagggcgctttaacttcaaaaaatcaggtagcagtcctaaatggactcatgacaaataccaaggggatgggattgttgaagatgaagaagagaccatggaaaataatgaagaaaagaaggacagacgcaaggaagaaaaggaa

SEQ ID NO: 4551 - DNA, 2613 bp, Homo sapiens
  source 1..2613: mol_type = genomic DNA
atgggtcgctccaattctagatcacattcttcaaggtcaaagtctagatcacagtctagttctcgatcaagatcaagatctcattctagaaagaagcgatacagttctaggtctcgttccagaacatattcaaggtctcgtagtagagatcgtatgtattctagagattatcgtcgcgattacagaaataatagaggaatgagacgaccttatgggtacagaggaaggggtagagggtattatcaaggaggaggaggtagatatcatcgaggtggttatagacctgtctggaatagaaggcactctaggagtcctagacgaggtcgttcacgttccaggagtccaaaaagaagatccgtttcttctcaaagatccagaagcagatctcgccggtcatatagatcttctaggtctccaagatcatcctcttctcgttcttcatccccatatagcaaatctcctgtttctaaaagacgagggtctcaggaaaaacaaaccaaaaaagctgaaggggaaccccaagaagagagtccgttgaaaagtaaatcacaggaggaaccgaaagatacatttgaacatgacccatctgagtctatcgatgaatttaataagtcatcagccacatccggtgatatttggcctggcctttcagcttatgataatagtcctagatcaccccatagtccttcacctattgctacaccacctagtcagagttcatcttgctctgatgctcccatgctcagtacagttcactctgcaaaaaatactccttctcagcattcacattccattcagcatagtcctgaaaggtctgggtctggttctgttggaaatggatctagtcgatacagtccttctcagaatagtccaattcatcacatcccttcacgaagaagtcctgcaaagacaatcgcaccacagaatgctccaagagatgagtctaggggccgttcctcgttttatcctgatggtggagatcaggaaactgcaaagactgggaagttcttaaaaaggttcacagatgaagagtctagagtattcctgcttgataggggtaataccagggataaagaggcttcaaaagagaaaggatcagagaaagggagggcagagggagaatgggaagatcaggaagctctagattacttcagtgataaagagtctggaaaacaaaagtttaatgattcagaaggggatgacacagaggagacagaggattatagacagttcaggaagtcagtcctcgcagatcagggtaaaagttttgctactgcatctcaccggaatactgaggaggaaggactcaagtacaagtccaaagtttcactgaaaggcaatagagaaagtgatggatttagagaagaaaaaaattataaacttaaagagactggatatgtagtggaaaggcctagcactacaaaagataagcacaaagaagaagacaaaaattctgaaagaataacagtaaagaaagaaactcagtcacctgagcaggtaaagtctgaaaagctcaaagacctctttgattacagtccccctctacacaagaatctggatgcacgagaaaagtctaccttcagagaggaaagcccacttaggatcaaaatgatagcgagtgattctcaccgtcctgaagtcaaactcaaaatggcacctgttcctcttgatgattctaacagacctgcttccttgactaaagacaggctgcttgctagtacacttgtccattctgtcaagaaggagcaagaattccgatccatctttgaccacattaagttgccacaggccagcaaaagcacttcagagtcatttattcaacacattgtgtccttggttcatcatgttaaagagcaatacttcaagtcagctgcaatgaccctaaacgagcggttcacttcgtatcagaaagccactgaagaacatagtactcggcaaaagagccctgaaatacacaggagaattgacatctcaccaagtaccctgaggaagcatacccgtttagcaggggaagagagagtttttaaagaagaaaatcaaaagggagataaaaaattaaggtgtgactctgctgaccttcggcatgacattgatcgccgtagaaaagaaagaagtaaagaacggggagattccaagggctccagggaatccagtggatcaagaaagcaggaaaaaactccaaaagattacaaggaatacaaatcttacaaagatgacagtaaacataaaagagagcaagatcattctcgatcttcatcctcttcagcatcaccttcttctcccagttctcgagaagaaaaggagagtaagaaggaaagagaagaagaatttaaaactcaccatgaaatgaaagaatactcaggctttgcaggagttagccgaccacgaggaacctttcatgacgacagagatgatggtgtggattattgggccaaaagaggaagaggtcgtggtacttttcaacgtggcagagggcgctttaacttcaaaaaatcaggtagcagtcctaaatggactcatgacaaataccaaggggatgggattgttgaagatgaagaagagaccatggaaaataatgaagaaaagaaggacagacgcaaggaagaaaaggaa

SEQ ID NO: 4552 - DNA, 5031 bp, Homo sapiens
  source 1..5031: mol_type = genomic DNA
atggaggttccagaacccacctgccctgcccctcctgcgagggaccagccagctcccactcctggccctccaggggccccaggtggccaggcctcacctcacctgaccctgggccctgtccttctgccgccagagcagggcctggccccccccactgtgttcctgaaggccctgcccatcccactgtaccacacggtgcctcccgggggcctccagccccgcgccccgctagtgacgggcagcctagatgggggcaacgtgcccttcatactcagccctgtgctgcagcctgaagggcctggccccacccaggtggggaagccggcggcccctacgctgacggtgaacatcgtgggcactctgcctgtcctgtcgccgggcctgggccccacgctgggcagcccaggcaaggtgcggaatgcgggcaagtacctgtgtccgcactgtggtcgcgactgcctgaagcccagtgttctagagaagcacatccggtcccacacgggtgagaggcccttcccgtgtgccacctgcggcatcgcctttaagacccagagcaatctctacaagcacaggcggacgcagacgcacctcaacaactcccggctgtcctcagagtccgagggcgccgggggcggcctcctggaggaaggggacaaggccggagagccccccagaccagagggcaggggcgagagcaggtgccaggggatgcacgaaggcgcctcggagagacccctttctccgggtgcccacgtgcccctacttgccaagaacctggatgtgaggaccgaagctgctccctgtccagggtccgcatttgccgacagagaggctccttgggactctgcccccatggcgtcacctgggctcccagcggccagcacacaaccctggcgtaagttgccagagcagaagtcgccgaccgccgggaagccgtgcgccctgcagcggcagcaggcgacggcagcggagaagccctgggatgccaaggcccccgagggccggctgcggaagtgtgagagcaccgactcggggtacctgtcgcgctccgacagcgcggagcagccgcatgcgccctgcagccccctgcacagcctttcggagcacagcgccgagtccgagggggagggcggcccgggcccggggccaggggtcgcaggggccgagcccggggcgcgagaagccggcctggagctggagaagaagcggctggaggagcgcatcgcccagctcatctcccacaaccaggcggtggtggacgatgcccagctggacaacgtgcggccccggaagaccgggctgtccaaacagggcagcatcgacctgcccacgccctacacctacaaggactccttccactttgacatccgcgcgctggagccaggccgtaggagggccccgggccccgtgcgctccacctggacgcccccagacaagtctcggcccctcttcttccactccgtccccactcagctctccaccaccgtggaatgtgtccccgtcaccaggagcaactcgctgcccttcgtcgagggctccaggacgtggctggagcccagggagccccgggacccctggtccaggacgcagaagcctctgagccccaggcccggcccagcccgcctgggctgccgctcgggactaagctcgactgacgttcccagtgggcatccccgggccctggtcagacaggccgcggtggaggacctgccaggcacccccattggcgatgccctggtgcccgcagaggacacagacgcaaagagaactgctgcgcgggaggccatggccggcaagggcagagcgggcggcaggaagtgcggccagagaaggctgaagatgttctcccaggagaagtggcaggtgtacggggatgagacgttcaaaaggatctaccagaaaatgaaagccagtccccatggaggcaagaaagccagggaggtgggaatgggcagtggggcagaactgggctttcctctgcagaaagaggcagcagggagctcaggcacagtccccacccaagacaggaggacccctgtccatgaggacatatccgcaggggcaacgccagagccttggggaaatccaccagccctggaggcctccttggtgactgaacccactaagcatggggagacggtggccaggagaggagacagtgaccgacccagggtggaagaggctgtgtcatcccctgcactgggtggcagagacagtccctgttcaggcagtaggagccccctggtctctccaaatgggaggctggaactggggtggcagatgcccccagcacctggccccctcaaagggggtgatgtagaggctcccaggccagtttggccggaccccaagctggaaggaggtgcccgaggtgtgggggatgttcaggagacctgcctgtgggcccagactgtcctgagatggcccagcaggggctcaggggaggacaagctcccctcagagaggaagaagctgaaagtggaggacctgcacagctggaagcaaccagagcctgtgagcgcagagaccccaggtgggcccacgcagcctgcctctttgtcatcccagaagcaggatgccgatcccggggaggtgccagggggctcaaaggagagtgccaggcaggtgggcgagcctctggagtcctctggagcctccttggctgctgcttctgttgccctgaagagggtggggccaagggacaaggctaccccactgcatcctgcagccccagcccccgcagagcacccctcgctggccaccccacctcaggctcctagagtgctctctgccctggcagataatgccttttcccccaagtacctcctcaggttacctcaggcagagacccccttaccactgcccattccctggggaccaaggcacagccaggactctctctgcagcagtgggtggcctgaagaacgggcatcatttgttgggtcaggactggggacccctctttctcccagcccagcctcaggcccctccccaggtgaggcggacagcatcctggaggaccccagctgttccaggccacaggatgggagaaaaggggcacagttggggggggacaagggggacaggatggccactagcaggccagcagccagggagttgcccatctcagcaccaggggctcccagggaggctacctcctccccgcccactccaacgtgtgaggcacacttagttcaggacatggagggtgacagccaccgtatccatcgcctctgcatgggcagcactttggcaagggccaggctctctggggatgtcctgaatccctgggtacccaactgggagctgggggagcctcctgggaatgccccagaagatccttcttcagggcccctggtgggccccgacccgtgttcccccctccagcctggctccttcctcactgccctcactcggcctcagggtgtgcccccaggctggccagagctggccttgtcttcccactcagggacgtcccggagccacagcacccgcagtccccacagcacccaaaacccctttccctcactgaaggctgagccgcggctcacgtggtgttgcctgagccgcagtgtccctctgcccgcggagcagaaggcaaaggcggcatctgtgtacttggcggtgcactttcctggtagcagcctccgagatgagggtcccaatggccctcctgggagcaatggaggatggacctggacaagccctggagaaggagggccggcgcagatgtccaagttctcctacccaacagtcccaggggtgatgccccagcaccaggtgtctgagccagaatggaagaaaggcctgccttggagggcaaagatgtctcgtgggaacagcaagcagagaaaactgaagatcaaccctaaaaggtacaaagggaatttcttgcagagctgtgttcagctgagagccagtagacttcgcacaccaacctgggtgcgaagaagaagccgccaccctcccgcacttgagggactgaagccatgcaggacccctgggcagacctcttcagaaatagcaggtctgaatctgcaagaggagccatcttgtgccacctcagaatcacctccttgttgtgggaaggaagagaagaaggaaggtgactgcagacaaaccttaggaaccctctctcttggtacaagttcaagaattgtcagggaaatggacaaacgaactgtgaaggatatttctccatctgctggtgagcatggtgactgtactactcacagcactgctgccacatcaggattatctctgcaatctgacacctgcctggcagtggttaatgacgtgcctctaccccctggcaaaggtcttgaccttgggttgctggagactcagctgctggcctcccaggattcagtctcaacagatcccaaaccatacatcttctcagatgctcaaaggccttcttcctttgggtccaaaggaacttttccccaccatgacattgctacctctgtggctgccgtttgtatttctctgccagtgagaacagatcacatagcccaggaaattcacagtgctgaatcacgagaccacagccagactgcagggaggactctgacatcaagctccccagacagcaaagtcacagaagagggcagagcacagaccctcttgccagggagaccttcatctggacaaagaatttcagattcggttccactggagtcaactgaaaaaactcatcttgaaataccagcttcaggaccaagttcagctagttcacaccacaaggaagggagacacaagacgttttttccttccagaggccagtatgggtgtggggaaatgactgtcccctgcccctctttaggaagtgacggtaggaaacgtcaggtatctggattaatcactcggaaagattctgtggttccttctaagccagagcagcccatagaaattcctgaagccccttctaaatccctcaagaagaggagtctggaaggaatgagaaagcaaactcgagtagagttcagtgacaccagcagcgacgatgaagaccgattagttatagaaata

SEQ ID NO: 4553 - DNA, 1611 bp, Homo sapiens
  source 1..1611: mol_type = genomic DNA
atggagggactcttgagcgtcgccctccagggcgcagagttggaaggaaactggaaacacgagggccaggttgaggacctgcaggaaaaccaggaaagctgtccagagccagaggccgtggcctgcaagggagaccctgctggggacagcatgcaggaacgcgatgaattcagccgaatcccaagaaccatatcgagccctgctgctacccaagccagtgtccccgacgacagcagttcccggaggtgcagcgcgcctggggagagcccgaaggagaggcatcctgacagccgccagcgggagagaggtggaggccccaagaagccgtggaaatgcggggactgcgggaaggccttcagctactgttcagcgttcatcttacaccagagaatccacaccggggagaagccatttgcgtgccccgagtgcggcaaggccttcagccagagcgtgcacctgaccctgcaccagcgcacgcacacgggcgagaagccctacgcctgccacgagtgcggcaaggccttcagccagggctcgtacctggcgtcccactggcgcacgcacacgggcgagaagccgcaccgctgcgccgactgcggcaaggccttcacgcgcgtcacgcacctgacccagcaccggcgcgtgcacacgggcgagcggccctacgcgtgcgcccagtgcgccaaggcgttccgcaaccgctcgtccctgatagagcaccagcgcatccacaccggtgagaagccctacgagtgctccgcgtgcgccaaggccttccgcttctcctcagcgctcatccgccaccagcgcatccacacggaggagaagccctaccgctgcggccagtgcgccaaggccttcgcgcagatcgcgcacctgacccagcaccggcgcgtgcacacgggcgagaagccctacacgtgccaggactgcggcgcgctcttcagccagagcgcctctctggccgagcaccggcgcatccacacaggcgagaagccctacgcgtgcggccagtgcgccaaggccttcacccaggtgtcgcacctgacgcagcaccagcgcacgcacaccggagagcggccttacccctgccacgactgcggcaagcgcttcagcaaccgctcccacctcctccagcaccgcctcgtgcacaccggtgagcggccctacaggtgcctgcaatgcggggccgccttcagccacgtgtcctcgcttatagagcaccagaagatccacaccggagagcggccctacaagtgcggcgagtgcggcaaagctttcagccagggctcctcgctcgccctgcaccagcgcacgcacacgggcgagcggccctacacctgccccgagtgcggcaaggccttcagcaaccgctcctacctgatccagcaccacatcgtgcacaccggggagaagccctacgagtgcagcggctgcgggaaggccttcagcttctcctccgcgctcatccgacaccagaggacgcatgcagacagttcgggacgcctttgcccagctcccacgcctgactcaacacctgggctctcacagggaggagaaacctgtcaacaggggtgccctggcagaaacccgcgtggaccagcagaagat

SEQ ID NO: 4554 - DNA, 2808 bp, Homo sapiens
  source 1..2808: mol_type = genomic DNA
atggctcttacacagggacctttgacattcagggatgtagccatagaattctctcaggaggagtggaaatccctggaccctgtgcagaaagctttgtactgggatgtgatgttggagaactacaggaacctggtcttcctgggtatccttcctaaatgtatgaccaaggaattaccaccaatagggaacagtaatacaggagaaaaatgccaaacagtgacgctggaaagacatgaatgttatgatgttgaaaatttttacttaagggaaatccagaaaaatctacaggaccttgagtttcaatggaaagatggtgaaataaattataaagaagtgccaatgacctataaaaacaatcttaatggtaaaagaggtcaacatagtcaagaggatgtagaaaacaaatgtattgaaaatcagcttacattaagctttcagtcacgtctgactgaactgcagaaatttcaaactgaagggaaaatttatgagtgtaaccaatctgagaagacagttaataacagttccctagtttcaccacttcaaagaattcttcctagtgtccaaaccaacatttctaaaaaatatgagaatgagtttttgcagctgtcattacccacccaacttgagaaaacacacattagggaaaaaccttatatgtgtaaagggtgtggcaaagcctttagagtgtcttcaagtcttattaaccatcagatggtacatactacagagaaaccttacaaatgcaatgaatgtggcaaagcctttcatcggggctcactactaactatacatcagatagtccatacaagggggaagccatatcaatgtggtgtatgtggcaagatcttcagacaaaattcagatcttgtaaatcaccggagaagtcacactggagagaaaccgtacaaatgtaatgaatgtggcaagtcctttagtcaaagttataaccttgcaatacatcagagaattcacactggagagaaaccttacaaatgtaatgagtgtgggaaaaccttcaaacaaggctcatgcctcactacacatcagataatccatacaggagagaaaccatatcaatgtgatatatgtggcaaggtcttcaggcagaattctaatcttgtaaatcaccagagaatccacactggagagaaaccatacaaatgcaacatatgtggaaagtcctttagtcaaagttccaacctggcaactcatcagacagttcatagtggaaacaaaccttacaaatgtgatgagtgtggcaaaacctttaaacggagctccagcctcactacacatcagataatccatacaggagagaaaccatatacatgtgatgtatgcgacaaggtcttcagtcaacgttcacaacttgcaaggcaccagagaagtcatactggagagaaaccttacaaatgcaatgaatgtggcaaggtcttcagtcagacttcacatcttgtggggcatcggagaattcatactggagagaaaccttacaaatgtgataaatgtggtaaagcctttaaacagggctcattactcactcgacataagataattcataccagagagaaacgttaccaatgcggtgaatgtggaaaggtctttagtgaaaattcatgccttgtaagacatttaagaattcatactggggagcaaccttacaaatgtaatgtgtgtggcaaggtcttcaattacagtggaaacctttcaattcataagagaatacatacgggagagaaacctttccaatgtaatgaatgtggcacagtcttcaggaactactcatgcctagcacgtcatctaagaattcatactgggcagaaaccttacaaatgtaatgtgtgtggcaaggtcttcaatgacagtggaaacctttcaaatcataagagaattcatactggagagaagccgtttcaatgtaacgaatgcggcaaggttttcagttactactcatgcctagcacgtcatcggaaaattcataccggagagaaaccttacaaatgtaatgattgtggcaaagcctatactcagcgttcaagcctcactaaacatctgataattcatactggagagaaaccttacaattgtaatgagtttggaggggcatttatccaaagttcaaaacttgcaagatatcacagaaatcctactggggagaaaccacacaaatgtagccattgtggtagaacttttagtcatataacaggcctgacgtaccatcagagaaggcatactggagagatgccatacaaatgtattgaatgtggccaggtctttaattccacttcgaaccttgcaaggcatcggagaattcacactggagagaaaccttacaaatgtaatgaatgtggcaaggtctttcgtcatcaatcaacactagcacgtcatcggagtattcatactggagagaaaccttacgtgtgtaatgagtgtggcaaagcctttagagtgcgttcaattctggttaatcatcagaaaatgcatactggggacaaaccttacaaatgtaatgaatgtggtaaagcttttattgaaaggtcaaagctggtgtaccatcaaagaaatcacactggagagaagccatacaaatgtattgaatgtggcaaggcctttgggcggttttcttgcctcaacaaacaccaaatgattcattctggagaaaaaccttataaatgtaatgagtgtggcaaatctttcattagtcgctcaggcctcactaaacatcagacaaaacatactgcagagagtcttaaaacaaaattcaatgtggaaaagcctttagatgttctcctaacttctgggttcaaa

SEQ ID NO: 4555 - DNA, 4392 bp, Homo sapiens
  source 1..4392: mol_type = genomic DNA
atgagtgggatgggagaaaatacctctgacccctccagggcagagacaagaaagcgcaaggaatgtcctgaccaacttggacccagccccaaaaggaacactgaaaaacgtaatcgtgaacaggaaaataaatatatagaagaacttgcagagttgatttttgcaaattttaatgatatagacaactttaacttcaaacctgacaaatgtgcaatcttaaaagaaactgtgaagcaaattcgtcagatcaaagaacaagagaaagcagcagctgccaacatagatgaagtgcagaagtcagatgtatcctctacagggcagggtgtcatcgacaaggatgcgctggggcctatgatgcttgaggcccttgatgggttcttctttgtagtgaacctggaaggcaacgttgtgtttgtgtcagagaatgtgacacagtatctaaggtataaccaagaagagctgatgaacaaaagtgtatatagcatcttgcatgttggggaccacacggaatttgtcaaaaacctgctgccaaagtctatagtaaatgggggatcttggtctggcgaacctccgaggcggaacagccataccttcaattgtcggatgctggtaaaacctttacctgattcagaagaggagggtcatgataaccaggaagctcatcagaaatatgaaactatgcagtgcttcgctgtctctcaaccaaagtccatcaaagaagaaggagaagatttgcagtcctgcttgatttgcgtggcaagaagagttcccatgaaggaaagaccagttcttccctcatcagaaagttttactactcgccaggatctccaaggcaagatcacgtctctggataccagcaccatgagagcagccatgaaaccaggctgggaggacctggtaagaaggtgtattcagaagttccatgcgcagcatgaaggagaatctgtgtcctatgctaagaggcatcatcatgaagtactgagacaaggattggcattcagtcaaatctatcgtttttccttgtctgatggcactcttgttgctgcacaaacgaagagcaaactcatccgttctcagactactaatgaacctcaacttgtaatatctttacatatgcttcacagagagcagaatgtgtgtgtgatgaatccggatctgactggacaaacgatggggaagccactgaatccaattagctctaacagccctgcccatcaggccctgtgcagtgggaacccaggtcaggacatgaccctcagtagcaatataaattttcccataaatggcccaaaggaacaaatgggcatgcccatgggcaggtttggtggttctgggggaatgaaccatgtgtcaggcatgcaagcaaccactcctcagggtagtaactatgcactcaaaatgaacagcccctcacaaagcagccctggcatgaatccaggacagcccacctccatgctttcaccaaggcatcgcatgagccctggagtggctggcagccctcgaatcccacccagtcagttttcccctgcaggaagcttgcattcccctgtgggagtttgcagcagcacaggaaatagccatagttataccaacagctccctcaatgcacttcaggccctcagcgaggggcacggggtctcattagggtcatcgttggcttcaccagacctaaaaatgggcaatttgcaaaactccccagttaatatgaatcctcccccactcagcaagatgggaagcttggactcaaaagactgttttggactatatggggagccctctgaaggtacaactggacaagcagagagcagctgccatcctggagagcaaaaggaaacaaatgaccccaacctgcccccggccgtgagcagtgagagagctgacgggcagagcagactgcatgacagcaaagggcagaccaaactcctgcagctgctgaccaccaaatctgatcagatggagccctcgcccttagccagctctttgtcggatacaaacaaagactccacaggtagcttgcctggttctgggtctacacatggaacctcgctcaaggagaagcataaaattttgcacagactcttgcaggacagcagttcccctgtggacttggccaagttaacagcagaagccacaggcaaagacctgagccaggagtccagcagcacagctcctggatcagaagtgactattaaacaagagccggtgagccccaagaagaaagagaatgcactacttcgctatttgctagataaagatgatactaaagatattggtttaccagaaataacccccaaacttgagagactggacagtaagacagatcctgccagtaacacaaaattaatagcaatgaaaactgagaaggaggagatgagctttgagcctggtgaccagcctggcagtgagctggacaacttggaggagattttggatgatttgcagaatagtcaattaccacagcttttcccagacacgaggccaggcgcccctgctggatcagttgacaagcaagccatcatcaatgacctcatgcaactcacagctgaaaacagccctgtcacacctgttggagcccagaaaacagcactgcgaatttcacagagcacttttaataacccacgaccagggcaactgggcaggttattgccaaaccagaatttaccacttgacatcacattgcaaagcccaactggtgctggacctttcccaccaatcagaaacagtagtccctactcagtgatacctcagccaggaatgatgggtaatcaagggatgataggaaaccaaggaaatttagggaacagtagcacaggaatgattggtaacagtgcttctcggcctactatgccatctggagaatgggcaccgcagagttcggctgtgagagtcacctgtgctgctaccaccagtgccatgaaccggccagtccaaggaggtatgattcggaacccagcagccagcatccccatgaggcccagcagccagcctggccaaagacagacgcttcagtctcaggtcatgaatatagggccatctgaattagagatgaacatggggggacctcagtatagccaacaacaagctcctccaaatcagactgccccatggcctgaaagcatcctgcctatagaccaggcgtcttttgccagccaaaacaggcagccatttggcagttctccagatgacttgctatgtccacatcctgcagctgagtctccgagtgatgagggagctctcctggaccagctgtatctggccttgcggaattttgatggcctggaggagattgatagagccttaggaatacccgaactggtcagccagagccaagcagtagatccagaacagttctcaagtcaggattccaacatcatgctggagcagaaggcgcccgttttcccacagcagtatgcatctcaggcacaaatggcccagggtagctattctcccatgcaagatccaaactttcacaccatgggacagcggcctagttatgccacactccgtatgcagcccagaccgggcctcaggcccacgggcctagtgcagaaccagccaaatcaactaagacttcaacttcagcatcgcctccaagcacagcagaatcgccagccacttatgaatcaaatcagcaatgtttccaatgtgaacttgactctgaggcctggagtaccaacacaggcacctattaatgcacagatgctggcccagagacagagggaaatcctgaaccagcatcttcgacagagacaaatgcatcagcaacagcaagttcagcaacgaactttgatgatgagaggacaagggttgaatatgacaccaagcatggtggctcctagtggtatgccagcaactatgagcaaccctcggattccccaggcaaatgcacagcagtttccatttcctccaaactacggaataagtcagcaacctgatccaggctttactggggctacgactccccagagcccacttatgtcaccccgaatggcacatacacagagtcccatgatgcaacagtctcaggccaacccagcctatcaggccccctccgacataaatggatgggcgcaggggaacatgggcggaaacagcatgttttcccagcagtccccaccacactttgggcagcaagcaaacaccagcatgtacagtaacaacatgaacatcaatgtgtccatggcgaccaacacaggtggcatgagcagcatgaaccagatgacaggacagatcagcatgacctcagtgacctccgtgcctacgtcagggctgtcctccatgggtcccgagcaggttaatgatcctgctctgaggggaggcaacctgttcccaaaccagctgcctggaatggatatgattaagcaggagggagacacaacacggaaatattgc

SEQ ID NO: 4556 - DNA, 4245 bp, Homo sapiens
  source 1..4245: mol_type = genomic DNA
atgagtggattaggagaaaacttggatccactggccagtgattcacgaaaacgcaaattgccatgtgatactccaggacaaggtcttacctgcagtggtgaaaaacggagacgggagcaggaaagtaaatatattgaagaattggctgagctgatatctgccaatcttagtgatattgacaatttcaatgtcaaaccagataaatgtgcgattttaaaggaaacagtaagacagatacgtcaaataaaagagcaaggaaaaactatttccaatgatgatgatgttcaaaaagccgatgtatcttctacagggcagggagttattgataaagactccttaggaccgcttttacttcaggcattggatggtttcctatttgtggtgaatcgagacggaaacattgtatttgtatcagaaaatgtcacacaatacctgcaatataagcaagaggacctggttaacacaagtgtttacaatatcttacatgaagaagacagaaaggattttcttaagaatttaccaaaatctacagttaatggagtttcctggacaaatgagacccaaagacaaaaaagccatacatttaattgccgtatgttgatgaaaacaccacatgatattctggaagacataaacgccagtcctgaaatgcgccagagatatgaaacaatgcagtgctttgccctgtctcagccacgagctatgatggaggaaggggaagatttgcaatcttgtatgatctgtgtggcacgccgcattactacaggagaaagaacatttccatcaaaccctgagagctttattaccagacatgatctttcaggaaaggttgtcaatatagatacaaattcactgagatcctccatgaggcctggctttgaagatataatccgaaggtgtattcagagattttttagtctaaatgatgggcagtcatggtcccagaaacgtcactatcaagaagttaccagtgatgggatattttccccaacagcttatcttaatggccatgcagaaaccccagtatatcgattctcgttggctgatggaactatagtgactgcacagacaaaaagcaaactcttccgaaatcctgtaacaaatgatcgacatggctttgtctcaacccacttccttcagagagaacagaatggatatagaccaaacccaaatcctgttggacaagggattagaccacctatggctggatgcaacagttcggtaggcggcatgagtatgtcgccaaaccaaggcttacagatgccgagcagcagggcctatggcttggcagaccctagcaccacagggcagatgagtggagctaggtatgggggttccagtaacatagcttcattgacccctgggccaggcatgcaatcaccatcttcctaccagaacaacaactatgggctcaacatgagtagccccccacatgggagtcctggtcttgccccaaaccagcagaatatcatgatttctcctcgtaatcgtgggagtccaaagatagcctcacatcagttttctcctgttgcaggtgtgcactctcccatggcatcttctggcaatactgggaaccacagcttttccagcagctctctcagtgccctgcaagccatcagtgaaggtgtggggacttcccttttatctactctgtcatcaccaggccccaaattggataactctcccaatatgaatattacccaaccaagtaaagtaagcaatcaggattccaagagtcctctgggcttttattgcgaccaaaatccagtggagagttcaatgtgtcagtcaaatagcagagatcacctcagtgacaaagaaagtaaggagagcagtgttgagggggcagagaatcaaaggggtcctttggaaagcaaaggtcataaaaaattactgcagttacttacctgttcttctgatgaccggggtcattcctccttgaccaactcccccctagattcaagttgtaaagaatcttctgttagtgtcaccagcccctctggagtctcctcctctacatctggaggagtatcctctacatccaatatgcatgggtcactgttacaagagaagcaccggattttgcacaagttgctgcagaatgggaattcaccagctgaggtagccaagattactgcagaagccactgggaaagacaccagcagtataacttcttgtggggacggaaatgttgtcaagcaggagcagctaagtcctaagaagaaggagaataatgcacttcttagatacctgctggacagggatgatcctagtgatgcactctctaaagaactacagccccaagtggaaggagtggataataaaatgagtcagtgcaccagctccaccattcctagctcaagtcaagagaaagaccctaaaattaagacagagacaagtgaagagggatctggagacttggataatctagatgctattcttggtgatctgactagttctgacttttacaataattccatatcctcaaatggtagtcatctggggactaagcaacaggtgtttcaaggaactaattctctgggtttgaaaagttcacagtctgtgcagtctattcgtcctccatataaccgagcagtgtctctggatagccctgtttctgttggctcaagtcctccagtaaaaaatatcagtgctttccccatgttaccaaagcaacccatgttgggtgggaatccaagaatgatggatagtcaggaaaattatggctcaagtatgggagactggggcttaccaaactcaaaggccggcagaatggaacctatgaattcaaactccatgggaagaccaggaggagattataatacttctttacccagacctgcactgggtggctctattcccacattgcctcttcggtctaatagcataccaggtgcgagaccagtattgcaacagcagcagcagatgcttcaaatgaggcctggtgaaatccccatgggaatgggggctaatccctatggccaagcagcagcatctaaccaactgggttcctggcccgatggcatgttgtccatggaacaagtttctcatggcactcaaaataggcctcttcttaggaattccctggatgatcttgttgggccaccttccaacctggaaggccagagtgacgaaagagcattattggaccagctgcacactcttctcagcaacacagatgccacaggcctggaagaaattgacagagctttgggcattcctgaacttgtcaatcagggacaggcattagagcccaaacaggatgctttccaaggccaagaagcagcagtaatgatggatcagaaggcaggattatatggacagacatacccagcacaggggcctccaatgcaaggaggctttcatcttcagggacaatcaccatcttttaactctatgatgaatcagatgaaccagcaaggcaattttcctctccaaggaatgcacccacgagccaacatcatgagaccccggacaaacacccccaagcaacttagaatgcagcttcagcagaggctgcagggccagcagtttttgaatcagagccgacaggcacttgaattgaaaatggaaaaccctactgctggtggtgctgcggtgatgaggcctatgatgcagccccagcagggttttcttaatgctcaaatggtcgcccaacgcagcagagagctgctaagtcatcacttccgacaacagagggtggctatgatgatgcagcagcagcagcagcagcaacagcagcagcagcagcagcagcagcagcaacagcaacagcaacagcaacagcagcaacagcagcaaacccaggccttcagcccacctcctaatgtgactgcttcccccagcatggatgggcttttggcaggacccacaatgccacaagctcctccgcaacagtttccatatcaaccaaattatggaatgggacaacaaccagatccagcctttggtcgagtgtctagtcctcccaatgcaatgatgtcgtcaagaatgggtccctcccagaatcccatgatgcaacacccgcaggctgcatccatctatcagtcctcagaaatgaagggctggccatcaggaaatttggccaggaacagctccttttcccagcagcagtttgcccaccaggggaatcctgcagtgtatagtatggtgcacatgaatggcagcagtggtcacatgggacagatgaacatgaaccccatgcccatgtctggcatgcctatgggtcctgatcagaaatactgc

SEQ ID NO: 4557 - DNA, 4272 bp, Homo sapiens
  source 1..4272: mol_type = genomic DNA
atgagtggattaggagaaaacttggatccactggccagtgattcacgaaaacgcaaattgccatgtgatactccaggacaaggtcttacctgcagtggtgaaaaacggagacgggagcaggaaagtaaatatattgaagaattggctgagctgatatctgccaatcttagtgatattgacaatttcaatgtcaaaccagataaatgtgcgattttaaaggaaacagtaagacagatacgtcaaataaaagagcaaggaaaaactatttccaatgatgatgatgttcaaaaagccgatgtatcttctacagggcagggagttattgataaagactccttaggaccgcttttacttcaggcattggatggtttcctatttgtggtgaatcgagacggaaacattgtatttgtatcagaaaatgtcacacaatacctgcaatataagcaagaggacctggttaacacaagtgtttacaatatcttacatgaagaagacagaaaggattttcttaagaatttaccaaaatctacagttaatggagtttcctggacaaatgagacccaaagacaaaaaagccatacatttaattgccgtatgttgatgaaaacaccacatgatattctggaagacataaacgccagtcctgaaatgcgccagagatatgaaacaatgcagtgctttgccctgtctcagccacgagctatgatggaggaaggggaagatttgcaatcttgtatgatctgtgtggcacgccgcattactacaggagaaagaacatttccatcaaaccctgagagctttattaccagacatgatctttcaggaaaggttgtcaatatagatacaaattcactgagatcctccatgaggcctggctttgaagatataatccgaaggtgtattcagagattttttagtctaaatgatgggcagtcatggtcccagaaacgtcactatcaagaagcttatcttaatggccatgcagaaaccccagtatatcgattctcgttggctgatggaactatagtgactgcacagacaaaaagcaaactcttccgaaatcctgtaacaaatgatcgacatggctttgtctcaacccacttccttcagagagaacagaatggatatagaccaaacccaaatcctgttggacaagggattagaccacctatggctggatgcaacagttcggtaggcggcatgagtatgtcgccaaaccaaggcttacagatgccgagcagcagggcctatggcttggcagaccctagcaccacagggcagatgagtggagctaggtatgggggttccagtaacatagcttcattgacccctgggccaggcatgcaatcaccatcttcctaccagaacaacaactatgggctcaacatgagtagccccccacatgggagtcctggtcttgccccaaaccagcagaatatcatgatttctcctcgtaatcgtgggagtccaaagatagcctcacatcagttttctcctgttgcaggtgtgcactctcccatggcatcttctggcaatactgggaaccacagcttttccagcagctctctcagtgccctgcaagccatcagtgaaggtgtggggacttcccttttatctactctgtcatcaccaggccccaaattggataactctcccaatatgaatattacccaaccaagtaaagtaagcaatcaggattccaagagtcctctgggcttttattgcgaccaaaatccagtggagagttcaatgtgtcagtcaaatagcagagatcacctcagtgacaaagaaagtaaggagagcagtgttgagggggcagagaatcaaaggggtcctttggaaagcaaaggtcataaaaaattactgcagttacttacctgttcttctgatgaccggggtcattcctccttgaccaactcccccctagattcaagttgtaaagaatcttctgttagtgtcaccagcccctctggagtctcctcctctacatctggaggagtatcctctacatccaatatgcatgggtcactgttacaagagaagcaccggattttgcacaagttgctgcagaatgggaattcaccagctgaggtagccaagattactgcagaagccactgggaaagacaccagcagtataacttcttgtggggacggaaatgttgtcaagcaggagcagctaagtcctaagaagaaggagaataatgcacttcttagatacctgctggacagggatgatcctagtgatgcactctctaaagaactacagccccaagtggaaggagtggataataaaatgagtcagtgcaccagctccaccattcctagctcaagtcaagagaaagaccctaaaattaagacagagacaagtgaagagggatctggagacttggataatctagatgctattcttggtgatctgactagttctgacttttacaataattccatatcctcaaatggtagtcatctggggactaagcaacaggtgtttcaaggaactaattctctgggtttgaaaagttcacagtctgtgcagtctattcgtcctccatataaccgagcagtgtctctggatagccctgtttctgttggctcaagtcctccagtaaaaaatatcagtgctttccccatgttaccaaagcaacccatgttgggtgggaatccaagaatgatggatagtcaggaaaattatggctcaagtatgggtgggccaaaccgaaatgtgactgtgactcagactccttcctcaggagactggggcttaccaaactcaaaggccggcagaatggaacctatgaattcaaactccatgggaagaccaggaggagattataatacttctttacccagacctgcactgggtggctctattcccacattgcctcttcggtctaatagcataccaggtgcgagaccagtattgcaacagcagcagcagatgcttcaaatgaggcctggtgaaatccccatgggaatgggggctaatccctatggccaagcagcagcatctaaccaactgggttcctggcccgatggcatgttgtccatggaacaagtttctcatggcactcaaaataggcctcttcttaggaattccctggatgatcttgttgggccaccttccaacctggaaggccagagtgacgaaagagcattattggaccagctgcacactcttctcagcaacacagatgccacaggcctggaagaaattgacagagctttgggcattcctgaacttgtcaatcagggacaggcattagagcccaaacaggatgctttccaaggccaagaagcagcagtaatgatggatcagaaggcaggattatatggacagacatacccagcacaggggcctccaatgcaaggaggctttcatcttcagggacaatcaccatcttttaactctatgatgaatcagatgaaccagcaaggcaattttcctctccaaggaatgcacccacgagccaacatcatgagaccccggacaaacacccccaagcaacttagaatgcagcttcagcagaggctgcagggccagcagtttttgaatcagagccgacaggcacttgaattgaaaatggaaaaccctactgctggtggtgctgcggtgatgaggcctatgatgcagccccaggtgagctcccagcagggttttcttaatgctcaaatggtcgcccaacgcagcagagagctgctaagtcatcacttccgacaacagagggtggctatgatgatgcagcagcagcagcagcagcaacagcagcagcagcagcagcagcagcagcaacagcaacagcaacagcaacagcagcaacagcagcaaacccaggccttcagcccacctcctaatgtgactgcttcccccagcatggatgggcttttggcaggacccacaatgccacaagctcctccgcaacagtttccatatcaaccaaattatggaatgggacaacaaccagatccagcctttggtcgagtgtctagtcctcccaatgcaatgatgtcgtcaagaatgggtccctcccagaatcccatgatgcaacacccgcaggctgcatccatctatcagtcctcagaaatgaagggctggccatcaggaaatttggccaggaacagctccttttcccagcagcagtttgcccaccaggggaatcctgcagtgtatagtatggtgcacatgaatggcagcagtggtcacatgggacagatgaacatgaaccccatgcccatgtctggcatgcctatgggtcctgatcagaaatactgc

SEQ ID NO: 4558 - DNA, 4197 bp, Homo sapiens
  source 1..4197: mol_type = genomic DNA
atgagtggcctcggggacagttcatccgaccctgctaacccagactcacataagaggaaaggatcgccatgtgacacactggcatcaagcacggaaaagaggcgcagggagcaagaaaataaatatttagaagaactagctgagttactgtctgccaacattagtgacattgacagcttgagtgtaaaaccagacaaatgcaagattttgaagaaaacagtcgatcagatacagctaatgaagagaatggaacaagagaaatcaacaactgatgacgatgtacagaaatcagacatctcatcaagtagtcaaggagtgatagaaaaggaatccttgggacctcttcttttggaggctttggatggatttttctttgttgtgaactgtgaagggagaattgtatttgtgtcagagaatgtaaccagctacttaggttacaatcaggaggaattaatgaatacgagcgtctacagcatactgcacgtgggggatcatgcagaatttgtgaagaatctgctaccaaaatcactagtaaatggagttccttggcctcaagaggcaacacgacgaaatagccatacctttaactgcaggatgctaattcaccctccagatgagccagggaccgagaaccaagaagcttgccagcgttatgaagtaatgcagtgtttcactgtgtcacagccaaaatcaattcaagaggatggagaagatttccagtcatgtctgatttgtattgcacggcgattacctcggcctccagctattacgggtgtagaatcctttatgaccaagcaagatactacaggtaaaatcatctctattgatactagttccctgagagctgctggcagaactggttgggaagatttagtgaggaagtgcatttatgcttttttccaacctcagggcagagaaccatcttatgccagacagctgttccaagaagtgatgactcgtggcactgcctccagcccctcctatagattcatattgaatgatgggacaatgcttagcgcccacaccaagtgtaaactttgctaccctcaaagtccagacatgcaacctttcatcatgggaattcatatcatcgacagggagcacagtgggctttctcctcaagatgacactaattctggaatgtcaattccccgagtaaatccctcggtcaatcctagtatctctccagctcatggtgtggctcgttcatccacattgccaccatccaacagcaacatggtatccaccagaataaaccgccagcagagctcagaccttcatagcagcagtcatagtaattctagcaacagccaaggaagtttcggatgctcacccggaagtcagattgtagccaatgttgccttaaaccaaggacaggccagttcacagagcagtaatccctctttaaacctcaataattctcctatggaaggtacaggaatatccctagcacagttcatgtctccaaggagacaggttacttctggattggcaacaaggcccaggatgccaaacaattcctttcctcctaatatttcgacattaagctctcccgttggcatgacaagtagtgcctgtaataataataaccgatcttattcaaacatcccagtaacatctttacagggtatgaatgaaggacccaataactccgttggcttctctgccagttctccagtcctcaggcagatgagctcacagaattcacctagcagattaaatatacaaccagcaaaagctgagtccaaagataacaaagagattgcctcaattttaaatgaaatgattcaatctgacaacagctctagtgatggcaaacctctggattcagggcttctgcataacaatgacagactttcagatggagacagtaaatactctcaaaccagtcacaaactagtgcagcttttgacaacaactgccgaacagcagttacggcatgctgatatagacacaagctgcaaagatgtcctgtcttgcacaggcacttccaactctgcctctgctaactcttcaggaggttcttgtccctcttctcatagctcattgacagaacggcataaaattctacaccggctcttacaggagggtagcccctcagatatcaccactttgtctgtcgagcctgataaaaaggacagtgcatctacttctgtgtcagtgactggacaggtacaaggaaactccagtataaaactagaactggatgcttcaaagaaaaaagaatcaaaagaccatcagctcctacgctatcttttagataaagatgagaaagatttaagatcaactccaaacctgagcctggatgatgtaaaggtgaaagtggaaaagaaagaacagatggatccatgtaatacaaacccaaccccaatgaccaaacccactcctgaggaaataaaactggaggcccagagccagtttacagctgaccttgaccagtttgatcagttactgcccacgctggagaaggcagcacagttgccaggcttatgtgagacagacaggatggatggtgcggtcaccagtgtaaccatcaaatcggagatcctgccagcttcacttcagtccgccactgccagacccacttccaggctaaatagattacctgagctggaattggaagcaattgataaccaatttggacaaccaggaacaggcgatcagattccatggacaaataatacagtgacagctataaatcagagtaaatcagaagaccagtgtattagctcacaattagatgagcttctctgtccacccacaacagtagaagggagaaatgatgagaaggctcttcttgaacagctggtatccttccttagtggcaaagatgaaactgagctagctgaactagacagagctctgggaattgacaaacttgttcaggggggtggattagatgtattatcagagagatttccaccacaacaagcaacgccacctttgatcatggaagaaagacccaacctttattcccagccttactcttctccttctcctactgccaatctccctagccctttccaaggcatggtcaggcaaaaaccttcactggggacgatgcctgttcaagtaacacctccccgaggtgctttttcacctggcatgggcatgcagcccaggcaaactctaaacagacctccggctgcacctaaccagcttcgacttcaactacagcagcgattacagggacaacagcagttgatacaccaaaatcggcaagctatcttaaaccagtttgcagcaactgctcctgttggcatcaatatgagatcaggcatgcaacagcaaattacacctcagccacccctgaatgctcaaatgttggcacaacgtcagcgggaactgtacagtcaacagcaccgacagaggcagctaatacagcagcaaagagccatgcttatgaggcagcaaagctttgggaacaacctccctccctcatctggactaccagttcaaatggggaacccccgtcttcctcagggtgctccacagcaattcccctatccaccaaactatggtacaaatccaggaaccccacctgcttctaccagcccgttttcacaactagcagcaaatcctgaagcatccttggccaaccgcaacagcatggtgagcagaggcatgacaggaaacataggaggacagtttggcactggaatcaatcctcagatgcagcagaatgtcttccagtatccaggagcaggaatggttccccaaggtgaggccaactttgctccatctctaagccctgggagctccatggtgccgatgccaatccctcctcctcagagttctcttctccagcaaactccacctgcctccgggtatcagtcaccagacatgaaggcctggcagcaaggagcgataggaaacaacaatgtgttcagtcaagctgtccagaaccagcccacgcctgcacagccaggagtatacaacaacatgagcatcaccgtttccatggcaggtggaaatacgaatgttcagaacatgaacccaatgatggcccagatgcagatgagctctttgcagatgccaggaatgaacactgtgtgccctgagcagataaatgatcccgcactgagacacacaggcctctactgcaaccagctctcatccactgaccttctcaaaacagaagcagatggaacccaggacaagaagacagaagagttcttctctgtggtgactacagac

SEQ ID NO: 4559 - DNA, 4323 bp, Homo sapiens
  source 1..4323: mol_type = genomic DNA
atgagtggcctcggggacagttcatccgaccctgctaacccagactcacataagaggaaaggatcgccatgtgacacactggcatcaagcacggaaaagaggcgcagggagcaagaaaataaatatttagaagaactagctgagttactgtctgccaacattagtgacattgacagcttgagtgtaaaaccagacaaatgcaagattttgaagaaaacagtcgatcagatacagctaatgaagagaatggaacaagagaaatcaacaactgatgacgatgtacagaaatcagacatctcatcaagtagtcaaggagtgatagaaaaggaatccttgggacctcttcttttggaggctttggatggatttttctttgttgtgaactgtgaagggagaattgtatttgtgtcagagaatgtaaccagctacttaggttacaatcaggaggaattaatgaatacgagcgtctacagcatactgcacgtgggggatcatgcagaatttgtgaagaatctgctaccaaaatcactagtaaatggagttccttggcctcaagaggcaacacgacgaaatagccatacctttaactgcaggatgctaattcaccctccagatgagccagggaccgagaaccaagaagcttgccagcgttatgaagtaatgcagtgtttcactgtgtcacagccaaaatcaattcaagaggatggagaagatttccagtcatgtctgatttgtattgcacggcgattacctcggcctccagctattacgggtgtagaatcctttatgaccaagcaagatactacaggtaaaatcatctctattgatactagttccctgagagctgctggcagaactggttgggaagatttagtgaggaagtgcatttatgcttttttccaacctcagggcagagaaccatcttatgccagacagctgttccaagaagtgatgactcgtggcactgcctccagcccctcctatagattcatattgaatgatgggacaatgcttagcgcccacaccaagtgtaaactttgctaccctcaaagtccagacatgcaacctttcatcatgggaattcatatcatcgacagggagcacagtgggctttctcctcaagatgacactaattctggaatgtcaattccccgagtaaatccctcggtcaatcctagtatctctccagctcatggtgtggctcgttcatccacattgccaccatccaacagcaacatggtatccaccagaataaaccgccagcagagctcagaccttcatagcagcagtcatagtaattctagcaacagccaaggaagtttcggatgctcacccggaagtcagattgtagccaatgttgccttaaaccaaggacaggccagttcacagagcagtaatccctctttaaacctcaataattctcctatggaaggtacaggaatatccctagcacagttcatgtctccaaggagacaggttacttctggattggcaacaaggcccaggatgccaaacaattcctttcctcctaatatttcgacattaagctctcccgttggcatgacaagtagtgcctgtaataataataaccgatcttattcaaacatcccagtaacatctttacagggtatgaatgaaggacccaataactccgttggcttctctgccagttctccagtcctcaggcagatgagctcacagaattcacctagcagattaaatatacaaccagcaaaagctgagtccaaagataacaaagagattgcctcaattttaaatgaaatgattcaatctgacaacagctctagtgatggcaaacctctggattcagggcttctgcataacaatgacagactttcagatggagacagtaaatactctcaaaccagtcacaaactagtgcagcttttgacaacaactgccgaacagcagttacggcatgctgatatagacacaagctgcaaagatgtcctgtcttgcacaggcacttccaactctgcctctgctaactcttcaggaggttcttgtccctcttctcatagctcattgacagaacggcataaaattctacaccggctcttacaggagggtagcccctcagatatcaccactttgtctgtcgagcctgataaaaaggacagtgcatctacttctgtgtcagtgactggacaggtacaaggaaactccagtataaaactagaactggatgcttcaaagaaaaaagaatcaaaagaccatcagctcctacgctatcttttagataaagatgagaaagatttaagatcaactccaaacctgagcctggatgatgtaaaggtgaaagtggaaaagaaagaacagatggatccatgtaatacaaacccaaccccaatgaccaaacccactcctgaggaaataaaactggaggcccagagccagtttacagctgaccttgaccagtttgatcagttactgcccacgctggagaaggcagcacagttgccaggcttatgtgagacagacaggatggatggtgcggtcaccagtgtaaccatcaaatcggagatcctgccagcttcacttcagtccgccactgccagacccacttccaggctaaatagattacctgagctggaattggaagcaattgataaccaatttggacaaccaggaacaggcgatcagattccatggacaaataatacagtgacagctataaatcagagtaaatcagaagaccagtgtattagctcacaattagatgagcttctctgtccacccacaacagtagaagggagaaatgatgagaaggctcttcttgaacagctggtatccttccttagtggcaaagatgaaactgagctagctgaactagacagagctctgggaattgacaaacttgttcaggggggtggattagatgtattatcagagagatttccaccacaacaagcaacgccacctttgatcatggaagaaagacccaacctttattcccagccttactcttctccttctcctactgccaatctccctagccctttccaaggcatggtcaggcaaaaaccttcactggggacgatgcctgttcaagtaacacctccccgaggtgctttttcacctggcatgggcatgcagcccaggcaaactctaaacagacctccggctgcacctaaccagcttcgacttcaactacagcagcgattacagggacaacagcagttgatacaccaaaatcggcaagctatcttaaaccagtttgcagcaactgctcctgttggcatcaatatgagatcaggcatgcaacagcaaattacacctcagccacccctgaatgctcaaatgttggcacaacgtcagcgggaactgtacagtcaacagcaccgacagaggcagctaatacagcagcaaagagccatgcttatgaggcagcaaagctttgggaacaacctccctccctcatctggactaccagttcaaatggggaacccccgtcttcctcagggtgctccacagcaattcccctatccaccaaactatggtacaaatccaggaaccccacctgcttctaccagcccgttttcacaactagcagcaaatcctgaagcatccttggccaaccgcaacagcatggtgagcagaggcatgacaggaaacataggaggacagtttggcactggaatcaatcctcagatgcagcagaatgtcttccagtatccaggagcaggaatggttccccaaggtgaggccaactttgctccatctctaagccctgggagctccatggtgccgatgccaatccctcctcctcagagttctcttctccagcaaactccacctgcctccgggtatcagtcaccagacatgaaggcctggcagcaaggagcgataggaaacaacaatgtgttcagtcaagctgtccagaaccagcccacgcctgcacagccaggagtatacaacaacatgagcatcaccgtttccatggcaggtggaaatacgaatgttcagaacatgaacccaatgatggcccagatgcagatgagctctttgcagatgccaggaatgaacactgtgtgccctgagcagataaatgatcccgcactgagacacacaggcctctactgcaaccagctctcatccactgaccttctcaaaacagaagcagatggaacccagcaggtgcaacaggttcaggtgtttgctgacgtccagtgtacagtgaatctggtaggcggggacccttacctgaaccagcctggtccactgggaactcaaaagcccacgtcaggaccacagaccccccaggcccagcagaagagcctccttcagcagctactgactgaa

SEQ ID NO: 4560 - DNA, 4320 bp, Homo sapiens
  source 1..4320: mol_type = genomic DNA
atgagtggcctcggggacagttcatccgaccctgctaacccagactcacataagaggaaaggatcgccatgtgacacactggcatcaagcacggaaaagaggcgcagggagcaagaaaataaatatttagaagaactagctgagttactgtctgccaacattagtgacattgacagcttgagtgtaaaaccagacaaatgcaagattttgaagaaaacagtcgatcagatacagctaatgaagagaatggaacaagagaaatcaacaactgatgacgatgtacagaaatcagacatctcatcaagtagtcaaggagtgatagaaaaggaatccttgggacctcttcttttggaggctttggatggatttttctttgttgtgaactgtgaagggagaattgtatttgtgtcagagaatgtaaccagctacttaggttacaatcaggaggaattaatgaatacgagcgtctacagcatactgcacgtgggggatcatgcagaatttgtgaagaatctgctaccaaaatcactagtaaatggagttccttggcctcaagaggcaacacgacgaaatagccatacctttaactgcaggatgctaattcaccctccagatgagccagggaccgagaaccaagaagcttgccagcgttatgaagtaatgcagtgtttcactgtgtcacagccaaaatcaattcaagaggatggagaagatttccagtcatgtctgatttgtattgcacggcgattacctcggcctccagctattacgggtgtagaatcctttatgaccaagcaagatactacaggtaaaatcatctctattgatactagttccctgagagctgctggcagaactggttgggaagatttagtgaggaagtgcatttatgcttttttccaacctcagggcagagaaccatcttatgccagacagctgttccaagaagtgatgactcgtggcactgcctccagcccctcctatagattcatattgaatgatgggacaatgcttagcgcccacaccaagtgtaaactttgctaccctcaaagtccagacatgcaacctttcatcatgggaattcatatcatcgacagggagcacagtgggctttctcctcaagatgacactaattctggaatgtcaattccccgagtaaatccctcggtcaatcctagtatctctccagctcatggtgtggctcgttcatccacattgccaccatccaacagcaacatggtatccaccagaataaaccgccagcagagctcagaccttcatagcagcagtcatagtaattctagcaacagccaaggaagtttcggatgctcacccggaagtcagattgtagccaatgttgccttaaaccaaggacaggccagttcacagagcagtaatccctctttaaacctcaataattctcctatggaaggtacaggaatatccctagcacagttcatgtctccaaggagacaggttacttctggattggcaacaaggcccaggatgccaaacaattcctttcctcctaatatttcgacattaagctctcccgttggcatgacaagtagtgcctgtaataataataaccgatcttattcaaacatcccagtaacatctttacagggtatgaatgaaggacccaataactccgttggcttctctgccagttctccagtcctcaggcagatgagctcacagaattcacctagcagattaaatatacaaccagcaaaagctgagtccaaagataacaaagagattgcctcaattttaaatgaaatgattcaatctgacaacagctctagtgatggcaaacctctggattcagggcttctgcataacaatgacagactttcagatggagacagtaaatactctcaaaccagtcacaaactagtgcagcttttgacaacaactgccgaacagcagttacggcatgctgatatagacacaagctgcaaagatgtcctgtcttgcacaggcacttccaactctgcctctgctaactcttcaggaggttcttgtccctcttctcatagctcattgacagaacggcataaaattctacaccggctcttacaggagggtagcccctcagatatcaccactttgtctgtcgagcctgataaaaaggacagtgcatctacttctgtgtcagtgactggacaggtacaaggaaactccagtataaaactagaactggatgcttcaaagaaaaaagaatcaaaagaccatcagctcctacgctatcttttagataaagatgagaaagatttaagatcaactccaaacctgagcctggatgatgtaaaggtgaaagtggaaaagaaagaacagatggatccatgtaatacaaacccaaccccaatgaccaaacccactcctgaggaaataaaactggaggcccagagccagtttacagctgaccttgaccagtttgatcagttactgcccacgctggagaaggcagcacagttgccaggcttatgtgagacagacaggatggatggtgcggtcaccagtgtaaccatcaaatcggagatcctgccagcttcacttcagtccgccactgccagacccacttccaggctaaatagattacctgagctggaattggaagcaattgataaccaatttggacaaccaggaacaggcgatcagattccatggacaaataatacagtgacagctataaatcagagtaaatcagaagaccagtgtattagctcacaattagatgagcttctctgtccacccacaacagtagaagggagaaatgatgagaaggctcttcttgaacagctggtatccttccttagtggcaaagatgaaactgagctagctgaactagacagagctctgggaattgacaaacttgttcaggggggtggattagatgtattatcagagagatttccaccacaacaagcaacgccacctttgatcatggaagaaagacccaacctttattcccagccttactcttctccttctcctactgccaatctccctagccctttccaaggcatggtcaggcaaaaaccttcactggggacgatgcctgttcaagtaacacctccccgaggtgctttttcacctggcatgggcatgcagcccaggcaaactctaaacagacctccggctgcacctaaccagcttcgacttcaactacagcagcgattacagggacaacagcagttgatacaccaaaatcggcaagctatcttaaaccagtttgcagcaactgctcctgttggcatcaatatgagatcaggcatgcaacagcaaattacacctcagccacccctgaatgctcaaatgttggcacaacgtcagcgggaactgtacagtcaacagcaccgacagaggcagctaatacagcagcaaagagccatgcttatgaggcagcaaagctttgggaacaacctccctccctcatctggactaccagttcaaatggggaacccccgtcttcctcagggtgctccacagcaattcccctatccaccaaactatggtacaaatccaggaaccccacctgcttctaccagcccgttttcacaactagcagcaaatcctgaagcatccttggccaaccgcaacagcatggtgagcagaggcatgacaggaaacataggaggacagtttggcactggaatcaatcctcagatgcagcagaatgtcttccagtatccaggagcaggaatggttccccaaggtgaggccaactttgctccatctctaagccctgggagctccatggtgccgatgccaatccctcctcctcagagttctcttctccagcaaactccacctgcctccgggtatcagtcaccagacatgaaggcctggcagcaaggagcgataggaaacaacaatgtgttcagtcaagctgtccagaaccagcccacgcctgcacagccaggagtatacaacaacatgagcatcaccgtttccatggcaggtggaaatacgaatgttcagaacatgaacccaatgatggcccagatgcagatgagctctttgcagatgccaggaatgaacactgtgtgccctgagcagataaatgatcccgcactgagacacacaggcctctactgcaaccagctctcatccactgaccttctcaaaacagaagcagatggaacccaggtgcaacaggttcaggtgtttgctgacgtccagtgtacagtgaatctggtaggcggggacccttacctgaaccagcctggtccactgggaactcaaaagcccacgtcaggaccacagaccccccaggcccagcagaagagcctccttcagcagctactgactgaa

SEQ ID NO: 4561 - DNA, 699 bp, Homo sapiens
  source 1..699: mol_type = genomic DNA
atgaatctcaacttcacctctcctctacacccggcgtcttctcagaggcccacatccttcttcatcgaggacatcctgctgcacaagcccaagccgctgagagaggtggccccagaccatttcgccagctctctggcctctcgggtgcctctgctagactatggctaccccctcatgcccacacccaccctcttggctcctcacgcccatcaccctctgcataagggagaccaccatcatccttatttcctcaccacctcggggatgccagtcccagcgctgttcccgcacccgcagcacgcggagctgccggggaagcactgccgccgccgcaaagcccgcacggttttctctgactcgcagctctcgggcttggagaagaggttcgagatccagcgctacctgtccacgccagaacgagtggagctggccacggccctcagcctgtccgagacgcaggtgaaaacgtggttccagaaccggcggatgaagcataaaaagcaactgcggaaaagccaagacgaacccaaagcaccagacgggccagaaagccccgagggcagcccccgcggttcagaggccgccaccgccgccgaggctcggctgagcctgcccgccggtcccttcgtgctgaccgagccagaggacgaggtggacattggagacgagggggagctgggctcagggccgcacgtgctc

SEQ ID NO: 4562 - DNA, 1269 bp, Homo sapiens
  source 1..1269: mol_type = genomic DNA
atggcaatggtagttagcagctggcgagatccgcaggacgacgtggccgggggcaaccccggcggccccaaccccgcagcgcaggcggcccgcggcggcggcggcggcgccggcgagcagcagcagcaggcgggctcgggcgcgccgcacacgccgcagaccccgggccagcccggagcgcccgccacccccggcacggcgggggacaagggccagggcccgcccggttcgggccagagccagcagcacatcgagtgcgtggtgtgcggggacaagtcgagcggcaagcactacggccaattcacctgcgagggctgcaaaagtttcttcaagaggagcgtccgcaggaacttaacttacacatgccgtgccaacaggaactgtcccatcgaccagcaccaccgcaaccagtgccaatactgccgcctcaagaagtgcctcaaagtgggcatgaggcgggaagcggttcagcgaggaagaatgcctccaacccagcccaatccaggccagtacgcactcaccaacggggaccccctcaacggccactgctacctgtccggctacatctcgctgctgctgcgcgccgagccctaccccacgtcgcgctacggcagccagtgcatgcagcccaacaacattatgggcatcgagaacatctgcgagctggccgcgcgcctgctcttcagcgccgtcgagtgggcccgcaacatccccttcttcccggatctgcagatcaccgaccaggtgtccctgctacgcctcacctggagcgagctgttcgtgctcaacgcggcccagtgctctatgccgctgcacgtggcgccgttgctggccgccgccggcctgcatgcctcgcccatgtctgccgaccgcgtcgtggccttcatggaccacatccgcatcttccaggagcaggtggagaagctcaaggcgctacacgtcgactcagccgagtacagctgcctcaaagccatcgtgctgttcacgtcagacgcctgtggcctgtcggatgcggcccacatcgagagcctgcaggagaagtcgcagtgcgcactggaggagtacgtgaggagccagtaccccaaccagcccagccgttttggcaaactgctgctgcgactgccctcgctgcgcaccgtgtcctcctccgtcatcgagcagctcttcttcgtccgtttggtaggtaaaacccccatcgaaactctcatccgcgatatgttactgtctgggagcagcttcaactggccttacatgtccatccagtgctcc

SEQ ID NO: 4563 - DNA, 843 bp, Homo sapiens
  source 1..843: mol_type = genomic DNA
atgcaagcggtttgggaccttgaacaaggcaaatatggttttgcggtgcagaggggcaggatgccgccgacccagccgacccacgggcagttcgcgctgaccaacggggatcccctcaactgccactcgtacctgtccggatatatttccctgctgttgcgcgcggagccctatcccacgtcgcgcttcggcagccaatgcatgcagcccaacaacatcatgggtatcgagaacatttgcgaactggccgcgaggatgctcttcagcgccgtcgagtgggcccggaacatccccttcttccccgacctgcagatcacggaccaggtggccctgcttcgcctcacctggagcgagctgtttgtgttgaatgcggcgcagtgctccatgcccctccacgtcgccccgctcctggccgccgccggcctgcatgcttcgcccatgtccgccgaccgggtggtcgcctttatggaccacatacggatcttccaagagcaagtggagaagctcaaggcgctgcacgttgactcagccgagtacagctgcctcaaggccatagtcctgttcacctcagatgcctgtggtctctctgatgtagcccatgtggaaagcttgcaggaaaagtctcagtgtgctttggaagaatacgttaggagccagtaccccaaccagccgacgagattcggaaagcttttgcttcgcctcccttccctccgcaccgtctcctcctcagtcatagagcaattgtttttcgtccgtttggtaggtaaaacccccatcgaaaccctcatccgggatatgttactgtccggcagcagttttaactggccgtatatggcaattcaa

SEQ ID NO: 4564 - DNA, 1242 bp, Homo sapiens
  source 1..1242: mol_type = genomic DNA
atggcaatggtagtcagcacgtggcgcgacccccaggacgaggtgcccggctcacagggcagccaggcctcgcaggcgccgcccgtgcccggcccgccgcccggcgccccgcacacgccacagacgcccggccaagggggcccagccagcacgccagcccagacggcggccggtggccagggcggccctggcggcccgggtagcgacaagcagcagcagcagcaacacatcgagtgcgtggtgtgcggagacaagtcgagcggcaagcactacggccagttcacgtgcgagggctgcaagagcttcttcaagcgcagcgtgcggaggaacctgagctacacgtgccgcgccaaccggaactgtcccatcgaccagcaccatcgcaaccagtgccagtactgccgcctcaaaaagtgcctcaaagtgggcatgagacgggaagcggtgcagaggggcaggatgccgccgacccagccgacccacgggcagttcgcgctgaccaacggggatcccctcaactgccactcgtacctgtccggatatatttccctgctgttgcgcgcggagccctatcccacgtcgcgcttcggcagccaatgcatgcagcccaacaacatcatgggtatcgagaacatttgcgaactggccgcgaggatgctcttcagcgccgtcgagtgggcccggaacatccccttcttccccgacctgcagatcacggaccaggtggccctgcttcgcctcacctggagcgagctgtttgtgttgaatgcggcgcagtgctccatgcccctccacgtcgccccgctcctggccgccgccggcctgcatgcttcgcccatgtccgccgaccgggtggtcgcctttatggaccacatacggatcttccaagagcaagtggagaagctcaaggcgctgcacgttgactcagccgagtacagctgcctcaaggccatagtcctgttcacctcagatgcctgtggtctctctgatgtagcccatgtggaaagcttgcaggaaaagtctcagtgtgctttggaagaatacgttaggagccagtaccccaaccagccgacgagattcggaaagcttttgcttcgcctcccttccctccgcaccgtctcctcctcagtcatagagcaattgtttttcgtccgtttggtaggtaaaacccccatcgaaaccctcatccgggatatgttactgtccggcagcagttttaactggccgtatatggcaattcaa

SEQ ID NO: 4565 - DNA, 783 bp, Homo sapiens
  source 1..783: mol_type = genomic DNA
atgccgccgacccagccgacccacgggcagttcgcgctgaccaacggggatcccctcaactgccactcgtacctgtccggatatatttccctgctgttgcgcgcggagccctatcccacgtcgcgcttcggcagccaatgcatgcagcccaacaacatcatgggtatcgagaacatttgcgaactggccgcgaggatgctcttcagcgccgtcgagtgggcccggaacatccccttcttccccgacctgcagatcacggaccaggtggccctgcttcgcctcacctggagcgagctgtttgtgttgaatgcggcgcagtgctccatgcccctccacgtcgccccgctcctggccgccgccggcctgcatgcttcgcccatgtccgccgaccgggtggtcgcctttatggaccacatacggatcttccaagagcaagtggagaagctcaaggcgctgcacgttgactcagccgagtacagctgcctcaaggccatagtcctgttcacctcagatgcctgtggtctctctgatgtagcccatgtggaaagcttgcaggaaaagtctcagtgtgctttggaagaatacgttaggagccagtaccccaaccagccgacgagattcggaaagcttttgcttcgcctcccttccctccgcaccgtctcctcctcagtcatagagcaattgtttttcgtccgtttggtaggtaaaacccccatcgaaaccctcatccgggatatgttactgtccggcagcagttttaactggccgtatatggcaattcaa

SEQ ID NO: 4566 - DNA, 456 bp, Homo sapiens
  source 1..456: mol_type = genomic DNA
atgaagtcctgcaagcccagcggcccgccggcgggagcgcgcgttgcacccccgtgcgcgggcggcaccgagtgcgcgggcacgtgcgccggggccgggcggctggagagcgcggcgcgcaggcgcctggcggccaacgcgcgcgagcgccgccgcatgcaggggctcaacactgccttcgaccgcttacgcagggtggttccccagtggggccaggataaaaagctgtccaagtacgagaccctgcagatggccctgagctacatcatggctctgacccggatcctggccgaggccgagcgattcggctcggagcgggactgggtgggtctccactgtgagcacttcggccgcgaccactacctcccgttcccgggcgcgaagctgccgggcgagagcgagctgtacagccagagactcttcggcttccagcccgagcccttccagatggccacc

SEQ ID NO: 4567 - DNA, 714 bp, Homo sapiens
  source 1..714: mol_type = genomic DNA
atggctcccaagaaacgcccagaaacccagaagacctccgagattgtattacgccccaggaacaagaggagcaggagtcccctggagctggagcccgaggccaagaagctctgtgcgaagggctccggtcctagcagaagatgtgactcagactgcctctgggtggggctggctggcccacagatcctgccaccatgccgcagcatcgtcaggaccctccaccagcataagctgggcagagcttcctggccatctgtccagcaggggctccagcagtcctttttgcacactctggattcttaccggatattacaaaaggctgccccctttgacaggagggctacatccttggcgtggcacccaactcaccccagcaccgtggctgtgggttccaaagggggagatatcatgctctggaattttggcatcaaggacaaacccaccttcatcaaaggggcagcctggcatcctcgctacaacctcattgttgtgggccgatacccagatcctaatttcaaaagttgtaccccttatgaattgaggacgatcgacgtgttcgatggaaactcagggaagatgatgtgtcagctctatgacccagaatcttctggcatcagttcgcttaatgaattcaatcccatgggggacacgctggcctctgcaatgggttaccacattctcatctggagccaggaggaagccaggacacggaag

SEQ ID NO: 4568 - DNA, 3420 bp, Homo sapiens
  source 1..3420: mol_type = genomic DNA
atgtcgtacaactacgtggtaacggcccagaagcccaccgccgtgaacggctgcgtgaccggacactttacttcggccgaagacttaaacctgttgattgccaaaaacacgagattagagatctatgtggtcaccgccgaggggcttcggcccgtcaaagaggtgggcatgtatgggaagattgcggtcatggagcttttcaggcccaagggggagagcaaggacctgctgtttatcttgacagcgaagtacaatgcctgcatcctggagtataaacagagtggcgagagcattgacatcattacgcgagcccatggcaatgtccaggaccgcattggccgcccctcagagaccggcattattggcatcattgaccctgagtgccggatgattggcctgcgtctctatgatggccttttcaaggttattccactagatcgcgataataaagaactcaaggccttcaacatccgcctggaggagctgcatgtcattgatgtcaagttcctatatggttgccaagcacctactatttgctttgtctaccaggaccctcaggggcggcacgtaaaaacctatgaggtgtctctccgagaaaaggaattcaataagggcccttggaaacaggaaaatgtcgaagctgaagcttccatggtgatcgcagtcccagagccctttgggggggccatcatcattggacaggagtcaatcacctatcacaatggtgacaaatacctggctattgcccctcctatcatcaagcaaagcacgattgtgtgccacaatcgagtggaccctaatggctcaagatacctgctgggagacatggaaggccggctcttcatgctgcttttggagaaggaggaacagatggatggcaccgtcactctcaaggatctccgtgtagaactccttggagagacctctattgctgagtgcttgacataccttgataatggtgttgtgtttgtcgggtctcgcctgggtgactcccagcttgtgaagctcaacgttgacagtaatgaacaaggctcctatgtagtggccatggaaacctttaccaacttaggacccattgtcgatatgtgcgtggtggacctggagaggcaggggcaggggcagctggtcacttgctctggggctttcaaggaaggttctttgcggatcatccggaatggaattggaatccacgagcatgccagcattgacttaccaggcatcaaaggattatggccactgcggtctgaccctaatcgtgagactgatgacactttggtgctctcttttgtgggccagacaagagttctcatgttaaatggagaggaggtagaagaaaccgaactgatgggtttcgtggatgatcagcagactttcttctgtggcaacgtggctcatcagcagcttatccagatcacttcagcatcggtgaggttggtctctcaagaacccaaagctctggtcagtgaatggaaggagcctcaggccaagaacatcagtgtggcctcctgcaatagcagccaggtggtggtggctgtaggcagggccctctactatctgcagatccatcctcaggagctccggcagatcagccacacagagatggaacatgaagtggcttgcttggacatcaccccattaggagacagcaatggactgtcccctctttgtgccattggcctctggacggacatctcggctcgtatcttgaagttgccctcttttgaactactgcacaaggagatgctgggtggagagatcattcctcgctccatcctgatgaccacctttgagagtagccattacctcctttgtgccttgggagatggagcgcttttctactttgggctcaacattgagacaggtctgttgagcgaccgtaagaaggtgactttgggcacccagcccaccgtattgaggacttttcgttctctttctaccaccaacgtctttgcttgttctgaccgccccactgtcatctatagcagcaaccacaaattggtcttctcaaatgtcaacctcaaggaagtgaactacatgtgtcccctcaattcagatggctatcctgacagcctggcgctggccaacaatagcaccctcaccattggcaccatcgatgagatccagaagctgcacattcgcacagttcccctctatgagtctccaaggaagatctgctaccaggaagtgtcccagtgtttcggggtcctctccagccgcattgaagtccaagacacgagtgggggcacgacagccttgaggcccagcgctagcacccaggctctgtccagcagtgtaagctccagcaagctgttctccagcagcactgctcctcatgagacctcctttggagaagaggtggaggtgcacaacctacttatcattgaccaacacacctttgaagtgcttcatgcccaccagtttctgcagaatgaatatgccctcagtctggtttcctgcaagctgggcaaagaccccaacacttacttcattgtgggcacagcaatggtgtatcctgaagaggcagagcccaagcagggtcgcattgtggtctttcagtattcggatggaaaactacagactgtggctgaaaaggaagtgaaaggggccgtgtactctatggtggaatttaacgggaagctgttagccagcatcaatagcacggtgcggctctatgagtggacaacagagaaggagctgcgcactgagtgcaaccactacaacaacatcatggccctctacctgaagaccaagggcgacttcatcctggtgggcgaccttatgcgctcagtgctgctgcttgcctacaagcccatggaaggaaactttgaagagattgctcgagactttaatcccaactggatgagtgctgtggaaatcttggatgatgacaattttctgggggctgaaaatgcctttaacttgtttgtgtgtcaaaaggatagcgctgccaccactgacgaggagcggcagcacctccaggaggttggtcttttccacctgggcgagtttgtcaatgtcttttgccacggctctctggtaatgcagaatctgggtgagacttccacccccacacaaggctcggtgctcttcggcacggtcaacggcatgatagggctggtgacctcactgtcagagagctggtacaacctcctgctggacatgcagaatcgactcaataaagtcatcaaaagtgtggggaagatcgagcactccttctggagatcctttcacaccgagcggaagacagaaccagccacaggtttcatcgacggtgacttgattgagagtttcctggatattagccgccccaagatgcaggaggtggtggcaaacctacagtatgacgatggcagcggtatgaagcgagaggccactgcagacgacctcatcaaggttgtggaggagctaactcggatccat

SEQ ID NO: 4569 - DNA, 963 bp, Homo sapiens
  source 1..963: mol_type = genomic DNA
atgaagcacatcccggtcctcgaggacgggccgtggaagaccgtgtgcgtgaaggagctgaacggccttaagaagctcaagcggaaaggcaaggagccggcgcggcgcgcgaacggctataaaactttccgactggacttggaagcgcccgagccccgcgccgtagccaccaacgggctgcgggacaggacccatcggctgcagccggtcccggtaccggtgccggtgccagtcccagtggcgccggccgttcccccaagagggggcacggacacagccggggagcgcgggggctctcgggcgcccgaggtctccgacgcgcggaaacgctgcttcgccctaggcgcagtggggccaggactccccacgccgccgccgccgccgcctcctgcgccccagagccaggcacctgggggcccagaggcacagcctttccgggagccgggtctgcgtcctcgcatcttgctgtgcgcaccgcccgcgcgccccgcgccgtcagcacccccagcaccgccagcgcccccggagtccactgtgcgccctgcgcccccgacgcgccccggggaaagttcctactcgtcaatttcacacgtaatttacaataaccaccaggattcctccgcgtcgcctaggaaacgaccgggcgaagcgactgccgcctcctccgagatcaaagccctgcagcagacccggaggctcctggcgaacgccagggagcggacgcgggtgcacaccatcagcgcagccttcgaggcgctcaggaagcaggtgccgtgctactcatatgggcagaagctgtccaaactggccatcctgaggatcgcctgtaactacatcctgtccctggcgcggctggctgaccttgactacagtgccgaccacagcaacctcagcttctccgagtgtgtgcagcgctgcacccgcaccctgcaggccgagggacgtgccaagaagcgcaaggag

SEQ ID NO: 4570 - DNA, 1548 bp, Homo sapiens
  source 1..1548: mol_type = genomic DNA
atgcatgggagaaaggatgatgcacaaaagcagcctgttaaaaatcagcttggattaaacccgcagtcacatctaccagaactgcagctatttcaagctgaagggaaaatatataaatatgatcacatggaaaaatctgtcaacagtagttccttagtttccccaccccaacgtatttcttctactgtcaaaacccacatttctcatacatatgaatgtaattttgtggattcattattcacacaaaaagagaaagcaaatattgggacagaacactacaaatgtagtgagcgtggcaaggcctttcatcaaggcttacattttactatacatcaaataatccatactaaagagacgcaatttaaatgtgatatatgtggcaagatcttcaataaaaaatcaaaccttgcaagtcatcaaagaattcatactggagagaagccatataaatgtaatgaatgtggcaaggtcttccataatatgtcacaccttgcacagcatcgcaggattcatactggagagaaaccatataaatgtaatgaatgtggcaaggtctttaatcaaatttcacaccttgcacaacatcaaagaattcataccggagagaaaccttataaatgtaatgaatgtggaaaggtcttccatcaaatttcacaccttgcacaacatcggacaattcatactggagaaaaaccttacgaatgtaacaaatgtggcaaggtgttcagtcgcaattcctaccttgtacaacatctgatcattcatactggagagaaaccttacagatgtaatgtatgtggaaaggtcttccatcatatttcacaccttgcacaacatcagagaatccacactggagagaaaccttacaaatgtaatgagtgtggcaaggtcttcagtcacaagtcatccctagtaaatcactggagaattcatactggagagaaaccttacaaatgtaatgagtgtggcaaggtcttcagtcacaagtcatccctagtaaatcactggagaatccacactggagagaaaccttacaaatgtaatgaatgtggcaaggtcttcagtcgcaattcataccttgcccaacatctgataattcatgccggtgagaaaccttataagtgtgatgaatgtgacaaagcattcagtcaaaattcacatcttgtacaacatcacagaatccatactggagagaaaccttacaaatgtgatgaatgtggcaaagtcttcagtcaaaattcataccttgcatatcattggagaattcatactggagaaaaagcttataaatgtaatgaatgtgggaaggtcttcggtctaaactcatccctagcacatcatcggaaaattcacactggagagaaacctttcaaatgtaatgaatgtggcaaagcttttagtatgcgttcaagcctcactaatcatcatgcgatccacactggagagaaacatttcaaatgtaatgaatgtggcaaactcttccgcgacaattcatatcttgtacgtcatcagagatttcatgccggaaagaaatctaacacatgtaat

SEQ ID NO: 4571 - DNA, 1494 bp, Homo sapiens
  source 1..1494: mol_type = genomic DNA
atggccgccgccgccgccgccgcgccgagcggaggaggaggaggaggcgaggaggagagactggaagaaaagtcagaagaccaggacctccagggcctcaaggacaaacccctcaagtttaaaaaggtgaagaaagataagaaagaagagaaagagggcaagcatgagcccgtgcagccatcagcccaccactctgctgagcccgcagaggcaggcaaagcagagacatcagaagggtcaggctccgccccggctgtgccggaagcttctgcctcccccaaacagcggcgctccatcatccgtgaccggggacccatgtatgatgaccccaccctgcctgaaggctggacacggaagcttaagcaaaggaaatctggccgctctgctgggaagtatgatgtgtatttgatcaatccccagggaaaagcctttcgctctaaagtggagttgattgcgtacttcgaaaaggtaggcgacacatccctggaccctaatgattttgacttcacggtaactgggagagggagcccctcccggcgagagcagaaaccacctaagaagcccaaatctcccaaagctccaggaactggcagaggccggggacgccccaaagggagcggcaccacgagacccaaggcggccacgtcagagggtgtgcaggtgaaaagggtcctggagaaaagtcctgggaagctccttgtcaagatgccttttcaaacttcgccagggggcaaggctgaggggggtggggccaccacatccacccaggtcatggtgatcaaacgccccggcaggaagcgaaaagctgaggccgaccctcaggccattcccaagaaacggggccgaaagccggggagtgtggtggcagccgctgccgccgaggccaaaaagaaagccgtgaaggagtcttctatccgatctgtgcaggagaccgtactccccatcaagaagcgcaagacccgggagacggtcagcatcgaggtcaaggaagtggtgaagcccctgctggtgtccaccctcggtgagaagagcgggaaaggactgaagacctgtaagagccctgggcggaaaagcaaggagagcagccccaaggggcgcagcagcagcgcctcctcaccccccaagaaggagcaccaccaccatcaccaccactcagagtccccaaaggcccccgtgccactgctcccacccctgcccccacctccacctgagcccgagagctccgaggaccccaccagcccccctgagccccaggacttgagcagcagcgtctgcaaagaggagaagatgcccagaggaggctcactggagagcgacggctgccccaaggagccagctaagactcagcccgcggttgccaccgccgccacggccgcagaaaagtacaaacaccgaggggagggagagcgcaaagacattgtttcatcctccatgccaaggccaaacagagaggagcctgtggacagccggacgcccgtgaccgagagagttagc

SEQ ID NO: 4572 - DNA, 819 bp, Homo sapiens
  source 1..819: mol_type = genomic DNA
atgagccctaaacgcgatgggttggggacaggtgatggtctgcactcacaggttttacaggagcaggtctccacaggagacaatctccatgaatgtgactcccagggaccaagtaaagacactttggttcgtgaggggaagacctacaaatgcaaggaatgtgggagcgtgtttaacaaaaacagcctccttgttcgacatcagcagattcacactggggtgaagccttatgaatgccaggagtgtggaaaagcctttcctgaaaaggtcgacttcgttcgacccatgaggattcacacaggggagaagccctgtaagtgcgtggagtgcgggaaggtcttcaaccgcaggtcgcacctcctgtgctaccgccagattcacactggagagaagccctatgagtgcagcgagtgtggaaagaccttcagctatcactctgtcttcatccagcatcgtgtgacccacactggagaaaaactctttgggtgcaaagaatgtggaaaaaccttttactacaactcttccttaacccggcacatgaagattcacactggagagaagccctgcaagtgcagtgagtgcgggaagaccttcacctaccgctctgttttcttccgacatagtatgacccacactgcaggaaagccctacgagtgcaaagaatgtgggaaaggtttttactacagctattccctcactcgacatacaaggagtcacactggagagaaaccttatgagtgccttgaacatagaaaggactttggctaccactctgcttttgcccaacagagtaagatccactctggaggaaaaaacctt

SEQ ID NO: 4573 - DNA, 261 bp, Homo sapiens
  source 1..261: mol_type = genomic DNA
atgggaccattgacatttagggatgtggccatagaattctctctgaaggagtggcaatgcctggacactgcacagcggaatttatatagaaatgtgatgttagagaactacagaaacctggtcttcctgggtattactgtttctaagccagacctgatcacttgtctggagcaagggaaagaggcctggagtatgaagagacatgagatcatggtggccaaacccacagaatcttactctgtcacccagtctggaatgcag

SEQ ID NO: 4574 - DNA, 1785 bp, Homo sapiens
  source 1..1785: mol_type = genomic DNA
atgggaccattgacatttagggatgtggccatagaattctctctgaaggagtggcaatgcctggacactgcacagcggaatttatatagaaatgtgatgttagagaactacagaaacctggtcttcctgggtattactgtttctaagccagacctgatcacttgtctggagcaagggaaagaggcctggagtatgaagagacatgagatcatggtggccaaacccacagttatgtgttctcattttgcccaagacctttggccggagcagaatataaaagattctttccaaaaagtgacactgaaaagatatggaaaatgtagacatgaaaatttaccattaagaaaaggctgtgaaagtatggatgagtgtaagatgcacaaaggaggttgtaatggacttaaccaatgtctcacagctacccagagcaaaatatttcaatgtgataaatatgtaaaagtcgctcataaattttcaaattcaaacagacatgagataagacatactaaaaagaaacctttcaaatgtacaaaatgtggcaaatcatttggcatgatttcatgcctaactgaacatagcagaattcatactagagtaaatttctacaaatgtgaagaatgtggaaaagcctttaactggtcctcaacccttactaaacataagagaattcatacgggagagaaaccttacaaatgtgaagaatgtggtaaagcctttaaccagtcctcaaaccttattaaacataagaaaattcatactggagagaaaccctacaaatgtgaagaatgtggcaaaacttttaaccgattctcaactcttactacccataagataattcatactggagagaaaccctacaaatgtaaagaatgtggtaaagcttttaaccgatcttcaacccttactacccatagaaaaattcatactggagagaaaccttacaaatgtgaagaatgtggcaaagcctttaagcagtcctcaaaccttactacacataagataattcatactggagagaaaccctacaaatgtaaaaaatgtggaaaagcctttaaccagtctgcacaccttaccacacatgaggtaattcatactggagagaaaccctacaaatgtgaaaaatgtggaaaagcctttaatcatttctcacaccttactacacataagataattcatactggagagaaaccttacaaatgtaaagaatgtggtaaagcttttaaacactcttcaacccttactaaacataagataattcatactggagagaagccttacaaatgtaaagaatgtgaaaaagcttttaaccaatcctcaaaacttactgaacataagaaaattcatactggagagaaaccctatgaatgtgaaaaatgtggcaaagcttttaaccagtcctcaaatcttactagacataagaaaagtcatacagaagagaaaccttacaaatgtgaagaatgtggcaaaggttttaaatggccctcaacccttactatccataagataattcatactggagagaaaccatacaaatgtgaagaatgtggcaaagcttttaaccaatcctcaaaacttaccaaacataagaaaattcatactggagagaaaccctacacatgtgaagaatgtggcaaagcctttaaccagtcctcaaaccttactaaacataagagaattcatactggagaaaaaccttacaaatgtgaagaatgtgacaaagcttttaaatggtcctcagtccttactaaacataagataattcataccggagaaaaattacaaata

SEQ ID NO: 4575 - DNA, 2214 bp, Homo sapiens
  source 1..2214: mol_type = genomic DNA
atgaccatgttacaggagtcattctcatttgacgatttatctgtggacttcacccaaaaggagtggcagctactggatccctctcagaagaatttatacaaggatgtgatgttggagaactatagcagcctagtgtcactggggtatgaagttatgaaaccagatgtcatcttcaaattggagcaaggagaagagccgtgggtaggagatggagaaattccaagttcagattctccagaagtctggaaagtagatggtaacatgatgtggcaccaggataaccaagacaagcttaaaattataaaaagaggtcatgaatgtgatgcatttggaaaaaatttcaatctgaacatgaactttgttcctttaaggaaatcaaacagtgaaggtgacttagatggattgattttaaaacatcatttagatttgcttattccaaaaggagattatggaaaagcagaatcagatgactttaatgtgtttgataatttttttctccattccaagcctgaggatactgatacctggttaaaatactatgactgtgataaatataaagagagctataaaaagtcacagattatcatatatcatagaaatcgtttaggggagaaactctatgaatgcagtgaatgtaggaagcgcttcagtaagaaaccaagtctcattaaacatcagagcagacatataagagacatagcctttggctgtggtaattgtggcaaaacctttccccagaagtctcagtttattacacatcacagaactcatacaggagaaaaaccttataattgtagccagtgtgggaaagccttctcccaaaagtcacagctcacatcccatcagcggacacatacaggagagaaaccttatgagtgtggtgaatgtgggaaagccttctcccggaagtcacatctcatatcgcattggagaacacacacaggagagaaaccctatggatgcaatgaatgtgggagggcctttagtgaaaagtccaatctcattaaccatcagagaattcataccggtgagaagccttttgaatgcagggaatgtgggaaagccttcagcaggaagtcacaactcgttacacatcacagaactcacacaggaacaaaaccctttggatgtagtgattgtagaaaagcattctttgagaagtcagagcttattagacatcagacaattcatactggagagaaaccctatgaatgcagcgagtgtaggaaagcatttagagagaggtcgagtctcattaatcatcagagaacacatacaggagagaaacctcatggatgcattcagtgtgggaaggccttctcccagaagtcacatctcatatcacatcagatgacacacacaggagaaaaaccctttatatgcagtaaatgtgggaaagccttcagcaggaaatcacagctcgttagacatcagagaactcatacgggagaaaaaccgtatgaatgcagtgagtgtgggaaagctttcagtgaaaaattaagtctcactaatcatcaaagaattcatacaggagaaaaaccatatgtatgcagtgaatgtgggaaagccttttgtcagaagtcacatctcatatcacatcagaggacacatacaggggagaaaccctatgaatgcagtgaatgtgggaaggcctttggtgagaagtcaagtcttgcaactcatcagagaactcatactggagaaaaaccgtatgaatgcagggactgtgaaaaagctttctcccagaaatcacagctaaatacccatcagagaattcacactggagagaaaccctatgaatgcagtctttgtaggaaagctttttttgagaagtcggagctaattagacatctgagaactcatacaggagaaaaaccttatgaatgcaatgaatgtagaaaagccttcagggagaagtcaagtctcatcaatcatcagagaatacatacaggagagaagccttttgaatgcagtgagtgtggcaaagctttctctcggaagtcacaccttataccacatcaaaggacacatacgggtgagaaaccctatggatgcagtgaatgtaggaaggccttctctcagaagtcacagctggttaatcatcagagaattcatacaggagagaagccttatcgatgcattgaatgtgggaaagctttctcacagaagtcacagctcatcaatcatcagagaactcatacagtaaaaaaatcc

SEQ ID NO: 4576 - DNA, 1161 bp, Homo sapiens
  source 1..1161: mol_type = genomic DNA
atgtctgtggctttcgcggccccgaggcagcgaggcaagggggagatcactcccgctgcgattcagaagatgttggatgacaataaccatcttattcagtgtataatggactctcagaataaaggaaagacctcagagtgttctcagtatcagcagatgttgcacacaaacttggtataccttgctacaatagcagattctaatcaaaatatgcagtctcttttaccagcaccacccacacagaatatgcctatgggtcctggagggatgaatcagagcggccctcccccacctccacgctctcacaacatgccttcagatggaatggtaggtgggggtcctcctgcaccgcacatgcagaaccagatgaacggccagatgcctgggcctaaccatatgcctatgcagggacctggacccaatcaactcaatatgacaaacagttccatgaatatgccttcaagtagccatggatccatgggaggttacaaccattctgtgccatcatcacagagcatgccagtacagaatcagatgacaatgagtcagggacaaccaatgggaaactatggtcccagaccaaatatgagtatgcagccaaaccaaggtccaatgatgcatcagcagcctccttctcagcaatacaatatgccacagggaggcggacagcattaccaaggacagcagccacctatgggaatgatgggtcaagttaaccaaggcaatcatatgatgggtcagagacagattcctccctatagacctcctcaacagggcccaccacagcagtactcaggccaggaagactattacggggaccaatacagtcatggtggacaaggtcctccagaaggcatgaaccagcaatattaccctgatggaaattcacagtatggccaacagcaagatgcataccagggaccacctccacaacagggatatccaccccagcagcagcagtacccagggcagcaaggttacccaggacagcagcagggctacggtccttcacagggtggtccaggtcctcagtatcctaactacccacagggacaaggtcagcagtatggaggatatagaccaacacagcctggaccaccacagccaccccagcagaggccttatggatatgaccagggacagtatggaaattaccagcag

SEQ ID NO: 4577 - DNA, 1185 bp, Homo sapiens
  source 1..1185: mol_type = genomic DNA
atgttggatgacaataaccatcttattcagtgtataatggactctcagaataaaggaaagacctcagagtgttctcagtatcagcagatgttgcacacaaacttggtataccttgctacaatagcagattctaatcaaaatatgcagtctcttttaccagcaccacccacacagaatatgcctatgggtcctggagggatgaatcagagcggccctcccccacctccacgctctcacaacatgccttcagatggaatggtaggtgggggtcctcctgcaccgcacatgcagaaccagatgaacggccagatgcctgggcctaaccatatgcctatgcagggacctggacccaatcaactcaatatgacaaacagttccatgaatatgccttcaagtagccatggatccatgggaggttacaaccattctgtgccatcatcacagagcatgccagtacagaatcagatgacaatgagtcagggacaaccaatgggaaactatggtcccagaccaaatatgagtatgcagccaaaccaaggtccaatgatgcatcagcagcctccttctcagcaatacaatatgccacagggaggcggacagcattaccaaggacagcagccacctatgggaatgatgggtcaagttaaccaaggcaatcatatgatgggtcagagacagattcctccctatagacctcctcaacagggcccaccacagcagtactcaggccaggaagactattacggggaccaatacagtcatggtggacaaggtcctccagaaggcatgaaccagcaatattaccctgatggtcataatgattacggttatcagcaaccgtcgtatcctgaacaaggctacgataggccttatgaggattcctcacaacattactacgaaggaggaaattcacagtatggccaacagcaagatgcataccagggaccacctccacaacagggatatccaccccagcagcagcagtacccagggcagcaaggttacccaggacagcagcagggctacggtccttcacagggtggtccaggtcctcagtatcctaactacccacagggacaaggtcagcagtatggaggatatagaccaacacagcctggaccaccacagccaccccagcagaggccttatggatatgaccagggacagtatggaaattaccagcag

SEQ ID NO: 4578 - DNA, 1254 bp, Homo sapiens
  source 1..1254: mol_type = genomic DNA
atgtctgtggctttcgcggccccgaggcagcgaggcaagggggagatcactcccgctgcgattcagaagatgttggatgacaataaccatcttattcagtgtataatggactctcagaataaaggaaagacctcagagtgttctcagtatcagcagatgttgcacacaaacttggtataccttgctacaatagcagattctaatcaaaatatgcagtctcttttaccagcaccacccacacagaatatgcctatgggtcctggagggatgaatcagagcggccctcccccacctccacgctctcacaacatgccttcagatggaatggtaggtgggggtcctcctgcaccgcacatgcagaaccagatgaacggccagatgcctgggcctaaccatatgcctatgcagggacctggacccaatcaactcaatatgacaaacagttccatgaatatgccttcaagtagccatggatccatgggaggttacaaccattctgtgccatcatcacagagcatgccagtacagaatcagatgacaatgagtcagggacaaccaatgggaaactatggtcccagaccaaatatgagtatgcagccaaaccaaggtccaatgatgcatcagcagcctccttctcagcaatacaatatgccacagggaggcggacagcattaccaaggacagcagccacctatgggaatgatgggtcaagttaaccaaggcaatcatatgatgggtcagagacagattcctccctatagacctcctcaacagggcccaccacagcagtactcaggccaggaagactattacggggaccaatacagtcatggtggacaaggtcctccagaaggcatgaaccagcaatattaccctgatggtcataatgattacggttatcagcaaccgtcgtatcctgaacaaggctacgataggccttatgaggattcctcacaacattactacgaaggaggaaattcacagtatggccaacagcaagatgcataccagggaccacctccacaacagggatatccaccccagcagcagcagtacccagggcagcaaggttacccaggacagcagcagggctacggtccttcacagggtggtccaggtcctcagtatcctaactacccacagggacaaggtcagcagtatggaggatatagaccaacacagcctggaccaccacagccaccccagcagaggccttatggatatgaccagggacagtatggaaattaccagcag

SEQ ID NO: 4579 - DNA, 2577 bp, Homo sapiens
  source 1..2577: mol_type = genomic DNA
atggacttcaccttgggagactgggagcagctcgggctggaacagggggacacgttctgggacacagcgttggacaattgccaggacctcttcctgctggaccccccaagacccaacctgacctcccacccagatggcagtgaagatctggagcctctggcaggaggaagcccagaagcaacaagccctgatgtgactgagaccaagaactctcctctgatggaggatttcttcgaagaaggattctcccaggagattatagagatgttatccaaggatggcttctggaactccaatttcggagaagcctgtatagaggacacctggttagatagtttgctaggcgatccagaaagtcttctgaggtctgatattgccaccaacggggaaagtcccacggaatgcaagagtcatgaattaaagagaggactcagtcctgtgtccaccgtttccacgggagaagattccatggtgcataatgtttctgaaaagaccctcacaccagctaagtctaaggaatataggggtgagtttttctcctactccgaccacagccagcaggattctgttcaggaaggggagaaaccatatcaatgtagtgaatgtgggaaaagcttcagtgggagttaccgtcttacccagcactggatcactcatactagggagaaacccactgtccatcaagagtgtgagcaaggttttgaccggaatgcttccctttctgtgtatccgaaaactcacacgggctacaaattctatgtgtgtaatgaatatgggacaacttttagtcagagtacatacctgtggcatcagaaaactcacactggagaaaaaccatgtaagagtcaagatagtgaccacccacccagtcatgacacacagcctggtgagcatcagaaaactcacacagatagtaagtcctacaactgtaacgaatgcggcaaggcttttacccggatcttccaccttactcggcaccagaagatccacactcggaaacgctatgagtgttccaagtgccaggcgaccttcaacttgagaaaacacctcatccaacatcagaaaactcacgctgcaaaaactacctctgagtgtcaggagtgtgggaagatttttaggcacagttcgctgctcattgaacaccaggctcttcatgctggagaggagccttataagtgtaacgaacgtgggaaatccttcaggcataactctaccctaaagatccatcagagggttcacagtggagagaagccttacaaatgcagtgagtgtgggaaggccttccaccggcacactcaccttaatgaacatcggcgaattcatacaggctacagaccccacaaatgtcaggaatgcgtcaggagtttcagccggccctcacatctgatgcgacatcaggccattcacaccgcagaaaagccctatagctgtgctgaatgcaaggagactttcagcgataacaatcgccttgtgcaacaccagaaaatgcacactgtcaaaaccccatatgaatgtcaggagtgcggagaacgcttcatttgcggctcaaccctgaagtgccacgagagtgttcacgccagagaaaaacaaggattttttgtgagtgggaagatcttggatcagaacccagaacagaaagagaagtgctttaagtgtaacaaatgtgagaaaacctttagctgcagcaaatacctaactcagcacgagaggattcacaccaggggagtgaagccctttgaatgtgaccagtgtgggaaagcctttggccaaagtactcggctcattcaccatcaaagaatccactctagagtgaggctgtataaatggggtgagcaagggaaagccatcagcagtgcctcccttatcaaacttcagtccttccacacaaaggagcacccttttaaatgtaacgaatgcggaaagaccttcagccacagtgcacacctctcaaaacatcagttaattcacgctggagagaatccctttaaatgtagtaagtgtgacagagtcttcacccagagaaactaccttgttcagcatgagcgaactcatgccagaaagaagccgttggtgtgtaacgaatgcgggaaaacgttccgtcagagctcatgcctttctaagcatcagagaattcactcaggtgagaagccctatgtatgtgattactgcgggaaggccttcggcctgagtgctgagcttgtccgccaccagagaattcacactggagaaaagccttatgtttgtcaggaatgcgggaaagccttcacccagagctcatgcctttctattcaccggagagttcacactggggagaagccctacagatgtggtgaatgtgggaaagcctttgcccagaaagcaaatctaacacagcaccagagaattcacacaggggagaagccttactcctgtaatgtgtgtggcaaagcttttgtcctcagtgcccatctcaaccagcacctgagagttcacacccaggagacactttatcagtgtcaacgttgccagaaagcctttcggtgccactcgagcctcagccgccatcagcgtgtacacaacaagcagcaatactgcctg

SEQ ID NO: 4580 - DNA, 1455 bp, Homo sapiens
  source 1..1455: mol_type = genomic DNA
atgaatgagtatcctaaaaaaagaaaaaggaagactctacacccttctcgttattcagattcctctggaataagcagaattgcagatggattcaatggaattttctctgatcattgttacagtgtctgttctatgagacagccagatttaaaatattttgacaacaaagatgatgattctgataccgagacgtcaaatgacttgccaaaatttgcagatggaatcaaggccagaaacagaaatcagaactacctggttcccagtcctgtacttagaattctagaccacactgccttttctacagaaaaatctgctgatattgtaatttgtgatgaagagtgtgactcacctgaatcagtcaaccagcaaacccaagaggagagtcctatagaagttcacactgctgaagatgttccaattgctgtagaagtgcatgcgatttctgaggattatgatatagagacagaaaacaattcctctgagagtctccaagaccaaactgatgaagaaccgccagctaaactttgtaaaattcttgacaagagccaagctttgaatgtgactgcccagcagaaatggcctttactgagagctaatagcagtggcctctataaatgtgaactttgtgagtttaacagcaaatatttttctgacttaaagcagcatatgatcctgaagcataaacgtactgattcaaatgtgtgtcgagtatgcaaggaaagtttctctaccaatatgcttctgatagaacatgccaaactgcatgaagaggatccctacatttgtaaatactgtgattataagacagtaatttttgagaacctcagccagcacattgcagacacccattttagtgatcacctctattggtgtgaacagtgtgatgtacagttctcctcaagcagtgaactctacctacatttccaggagcacagctgtgatgaacagtacttgtgtcagttctgtgaacatgaaactaatgatccagaagacttgcatagccatgtggtaaatgagcatgcatgtaaattaatagagttaagtgataagtataacaatggtgaacatggacagtatagcctcttaagcaaaattacctttgacaaatgtaaaaacttctttgtatgtcaagtatgtggttttcggagtagacttcacacaaatgttaacaggcatgttgctattgaacatacaaaaatttttcctcatgtttgtgatgactgtgggaaaggcttttcaagtatgctagaatattgcaagcatttaaattcacatttatctgaagggatttatttatgtcaatattgtgaatattcaacaggacaaattgaagatcttaaaattcatctagatttcaagcattcagctgacttgcctcataaatgtagtgactgcttgatgaggtttggaaatgaaagggaattaataagtcaccttccagtccatgagacaact

SEQ ID NO: 4581 - DNA, 435 bp, Homo sapiens
  source 1..435: mol_type = genomic DNA
atgctctccgtccagcccaaagggaagcagaagggctgtgcgggctgtaaccgcaagatcaaggaccgctatctgctgaaggcattggacaagtactggcacgaagactgcctcaagtgtgcctgctgtgactgccgcctgggcgaggtgggctccaccctctacaccaaggccaacctcatcctgtgccgacgcgactacctgaggctctttggcaccacagggaactgtgctgcttgcagcaagctgatcccagccttcgagatggtgatgcgggcccgggacaacgtgtatcacctcgactgcttcgcctgccagctctgcaaccagagattttgtgtgggagacaaattcttcctgaagaacaacatgatcttgtgtcagatggactatgaggaagggcagctcaatggcacctttgaatcccaagttcag

SEQ ID NO: 4582 - DNA, 465 bp, Homo sapiens
  source 1..465: mol_type = genomic DNA
atggtgttggaccaggaggacggcgtgccgatgctctccgtccagcccaaagggaagcagaagggctgtgcgggctgtaaccgcaagatcaaggaccgctatctgctgaaggcattggacaagtactggcacgaagactgcctcaagtgtgcctgctgtgactgccgcctgggcgaggtgggctccaccctctacaccaaggccaacctcatcctgtgccgacgcgactacctgaggctctttggcaccacagggaactgtgctgcttgcagcaagctgatcccagccttcgagatggtgatgcgggcccgggacaacgtgtatcacctcgactgcttcgcctgccagctctgcaaccagagattttgtgtgggagacaaattcttcctgaagaacaacatgatcttgtgtcagatggactatgaggaagggcagctcaatggcacctttgaatcccaagttcag

SEQ ID NO: 4583 - DNA, 681 bp, Homo sapiens
  source 1..681: mol_type = genomic DNA
atggaagggagcgcggtgactgtccttgagcgcggaggggcgagctcgccggcggagcgccggagcaagcggaggcgcaggagcggcggcgacggcggcggcggcggcggcgcccgagcacccgagggggtccgagccccggcagccggccagccccgcgccacaaagggagcgcccccgccgcccggcaccccgcctccctccccaatgtcctcggccatcgaaaggaagagcctggacccttcagaggaaccagtggatgaggtgctgcagatccccccatccctgctgacatgcggcggctgccagcagaacattggggaccgctacttcctgaaggccatcgaccagtactggcacgaggactgcctgagctgcgacctctgtggctgccggctgggtgaggtggggcggcgcctctactacaaactgggccggaagctctgccggagagactatctcaggctttttgggcaagacggtctctgcgcatcctgtgacaagcggattcgtgcctatgagatgacaatgcgggtgaaagacaaagtgtatcacctggaatgtttcaaatgcgccgcctgtcagaagcatttctgtgtaggtgacagatacctcctcatcaactctgacatagtgtgcgaacaggacatctacgagtggactaagatcaatgggatgata

SEQ ID NO: 4584 - DNA, 489 bp, Homo sapiens
  source 1..489: mol_type = genomic DNA
atgttgatggaaggagggagagcggctgcggcgcggaacgtctcaagtatacaaatgctctcagtccagccagacaccaagccgaaaggttgtgctggctgcaaccgaaagatcaaggaccggtatcttctaaaggcactggacaaatactggcatgaagactgcctgaagtgtgcctgctgtgactgtcgcttgggagaggtgggctccaccctgtacactaaagctaatcttatcctttgtcgcagagactatctgaggctctttggtgtaacgggaaactgcgctgcctgtagtaagctcatccctgcctttgagatggtgatgcgtgccaaggacaatgtttaccacctggactgctttgcatgtcagctttgtaatcagagattttgtgttggagacaaatttttcctaaagaataacatgatcctttgccagacggactacgaggaaggtttaatgaaagaaggttatgcaccccaggttcgc

SEQ ID NO: 4585 - DNA, 501 bp, Homo sapiens
  source 1..501: mol_type = genomic DNA
atgctctcagtccagccagacaccaagccgaaaggttgtgctggctgcaaccgaaagatcaaggaccggtatcttctaaaggcactggacaaatactggcatgaagactgcctgaagtgtgcctgctgtgactgtcgcttgggagagcatttgaagaggtgtggatctatatacatacatgctgcacatacagagattggaatctgtgtaaccttagaatggccattaccttttgtcatcattgactttagccaacaaatcaccatagcttggctctttggtgtaacgggaaactgcgctgcctgtagtaagctcatccctgcctttgagatggtgatgcgtgccaaggacaatgtttaccacctggactgctttgcatgtcagctttgtaatcagagattttgtgttggagacaaatttttcctaaagaataacatgatcctttgccagacggactacgaggaaggtttaatgaaagaaggttatgcaccccaggttcgc

SEQ ID NO: 4586 - DNA, 468 bp, Homo sapiens
  source 1..468: mol_type = genomic DNA
atgcagaaaaaggagaaaagttttggtatacaaatgctctcagtccagccagacaccaagccgaaaggttgtgctggctgcaaccgaaagatcaaggaccggtatcttctaaaggcactggacaaatactggcatgaagactgcctgaagtgtgcctgctgtgactgtcgcttgggagaggtgggctccaccctgtacactaaagctaatcttatcctttgtcgcagagactatctgaggctctttggtgtaacgggaaactgcgctgcctgtagtaagctcatccctgcctttgagatggtgatgcgtgccaaggacaatgtttaccacctggactgctttgcatgtcagctttgtaatcagagattttgtgttggagacaaatttttcctaaagaataacatgatcctttgccagacggactacgaggaaggtttaatgaaagaaggttatgcaccccaggttcgc

SEQ ID NO: 4587 - DNA, 507 bp, Homo sapiens
  source 1..507: mol_type = genomic DNA
atgttccagccggcgcccaagcgctgcttcaccatcgagtcgctggtggccaaggacagtcccctgcccgcctcgcgctccgaggaccccatccgtcccgcggcactcagctacgctaactccagccccataaatccgttcctcaacggcttccactcggccgccgccgccgccgccggtaggggcgtctactccaacccggacttggtgttcgccgaggcggtctcgcacccgcccaaccccgccgtgccagtgcacccggtgccgccgccgcacgccctggccgcccaccccctaccctcctcgcactcgccacaccccctattcgcctcgcagcagcgggatccgtccaccttctacccctggctcatccaccgctaccgatatctgggtcatcgcttccaaggtaaaagtatggtttcagaaccgaagaacaaagttcaaaaggcagaagctggaggaagaaggctcagattcgcaacaaaagaaaaaagggacgcaccatat

SEQ ID NO: 4588 - DNA, 756 bp, Homo sapiens
  source 1..756: mol_type = genomic DNA
atgttccagccggcgcccaagcgctgcttcaccatcgagtcgctggtggccaaggacagtcccctgcccgcctcgcgctccgaggaccccatccgtcccgcggcactcagctacgctaactccagccccataaatccgttcctcaacggcttccactcggccgccgccgccgccgccggtaggggcgtctactccaacccggacttggtgttcgccgaggcggtctcgcacccgcccaaccccgccgtgccagtgcacccggtgccgccgccgcacgccctggccgcccaccccctaccctcctcgcactcgccacaccccctattcgcctcgcagcagcgggatccgtccaccttctacccctggctcatccaccgctaccgatatctgggtcatcgcttccaagggaacgacactagccccgagagtttccttttgcacaacgcgctggcccgaaagcccaagcggatccgaaccgccttctccccgtcccagcttctaaggctggaacacgcctttgagaagaatcactacgtggtgggcgccgaaaggaagcagctggcacacagcctcagcctcacggaaactcaggtaaaagtatggtttcagaaccgaagaacaaagttcaaaaggcagaagctggaggaagaaggctcagattcgcaacaaaagaaaaaagggacgcaccatattaaccggtggagaatcgccaccaagcaggcgagtccggaggaaatagacgtgacctcagatgat

SEQ ID NO: 4589 - DNA, 870 bp, Homo sapiens
  source 1..870: mol_type = genomic DNA
atgtgcctggctgggtgcacaccccgcaaggcggcggcgccaggacgcggagcgctccccagagcccggctgcctcgcacagctcccgcggctgcgaccatgttccagcccgcggccaagcgcggctttaccatagagtccttggtggccaaggacggcggcaccggcgggggcactggcggcgggggcgcgggctcccatctcctggcggcggccgcctccgaggaaccgctccggcccacggcgctcaactaccctcaccccagcgcggccgaggcggccttcgtgagtggcttccctgccgcggccgccgcgggcgcgggccgctcgctctacggtgggcccgagctcgtgttccccgaggccatgaaccaccccgcgctgaccgtgcatccggcgcaccagctgggcgcctccccgctgcagcccccgcactccttcttcggcgcccagcaccgggaccctctccatttctacccctgggtcctgcggaaccgcttcttcggccaccgcttccaggccagcgacgtgccccaggacgggctgcttctgcacggccccttcgcacgcaagcccaagcggatccgcacggccttctcgccctcgcagctgctgcggctggagcgcgccttcgagaagaaccactacgtggtgggcgccgagcggaagcagctggccggcagtctcagcctctccgagacgcaggtgaaggtgtggttccagaaccggaggacaaagtacaaacggcagaagctggaggaggaagggcctgagtccgagcagaagaagaagggctcccatcacatcaaccggtggcgcattgccacgaagcaggccaatggggaggacatcgatgtcacctccaatgac

SEQ ID NO: 4590 - DNA, 4746 bp, Homo sapiens
  source 1..4746: mol_type = genomic DNA
atgggttccaagagaagaagagctacctccccttccagcagtgtcagcggggactttgatgatgggcaccattctgtgtcaacaccaggcccaagcaggaaaaggaggagactttccaatcttccaactgtagatcctattgccgtgtgccatgaactctataataccatccgagactataaggatgaacagggcagacttctctgtgagctcttcattagggcaccaaagcgaagaaatcaaccagactattatgaagtggtttctcagcccattgacttgatgaaaatccaacagaaactaaaaatggaagagtatgatgatgttaatttgctgactgctgacttccagcttctttttaacaatgcaaagtcctattataagccagattctcctgaatataaagccgcttgcaaactctgggatttgtaccttcgaacaagaaatgagtttgttcagaaaggagaagcagatgacgaagatgatgatgaagatgggcaagacaatcagggcacagtgactgaaggatcttctccagcttacttgaaggagatcctggagcagcttcttgaagccatagttgtagctacaaatccatcaggacgtctcattagcgaactttttcagaaactgccttctaaagtgcaatatccagattattatgcaataattaaggagcctatagatctcaagaccattgcccagaggatacagaatggaagctacaaaagtattcatgcaatggccaaagatatagatctcctcgcaaaaaatgccaaaacttataatgagcctggctctcaagtattcaaggatgcaaattcaattaaaaaaatattttatatgaaaaaggctgaaattgaacatcatgaaatggctaagtcaagtcttcgaatgaggactccatccaacttggctgcagccagactgacaggtccttcacacagtaaaggcagccttggtgaagagagaaatcccactagcaagtattaccgtaataaaagagcagtacaaggaggtcgtttatcagcaattacaatggcacttcaatatggctcagaaagtgaagaagatgctgctttagctgctgcacgctatgaagagggagagtcagaagcagaaagcatcacttcctttatggatgtttcaaatcctttttatcagctttatgacacagttaggagttgtcggaataaccaagggcagctaatagctgaacctttttaccatttgccttcaaagaaaaaataccctgattattaccagcaaattaaaatgcccatatcactacaacagatccgaacaaaactgaagaatcaagaatatgaaactttagatcatttggagtgtgatctgaatttaatgtttgaaaatgccaaacgctataatgtgcccaattcagccatctacaagcgagttctaaaattgcagcaagttatgcaggcaaagaagaaagagcttgccaggagagacgatatcgaggacggagacagcatgatctcttcagccacctctgatactggtagtgccaaaagaaaaagtaaaaagaacataagaaagcagcgaatgaaaatcttattcaatgttgttcttgaagctcgagagccaggttcaggcagaagactttgtgacctatttatggttaaaccatccaaaaaggactatcctgattattataaaatcatcttggagccaatggacttgaaaataattgagcataacatccgcaatgacaaatatgctggtgaagagggaatgatagaagacatgaagctgatgttccggaatgccaggcactataatgaggagggctcccaggtttataatgatgcacatatcctggagaagttactcaaggagaaaaggaaagagctgggcccactgcctgatgatgatgacatggcttctcccaaactcaagctgagtaggaagagtggcatttctcctaaaaaatcaaaatacatgactccaatgcagcagaaactaaatgaggtctatgaagctgtaaagaactatactgataagaggggtcgccgcctcagtgccatatttctgaggcttccctctagatctgagttgcctgactactatctgactattaaaaagcccatggacatggaaaaaattcgaagtcacatgatggccaacaagtaccaagatattgactctatggttgaggactttgtcatgatgtttaataatgcctgtacatacaatgagccggagtctttgatctacaaagatgctcttgttctacacaaagtcctgcttgaaacacgcagagacctggagggagatgaggactctcatgtcccaaatgtgactttgctgattcaagagcttatccacaatctttttgtgtcagtcatgagtcatcaggatgatgagggaagatgctacagcgattctttagcagaaattcctgctgtggatcccaactttcctaacaaaccaccccttacatttgacataattaggaagaatgttgaaaataatcgctaccgtcggcttgatttatttcaagagcatatgtttgaagtattggaacgagcaagaaggatgaatcggacagattcagaaatatatgaagatgcagtagaacttcagcagttttttattaaaattcgtgatgaactctgcaaaaatggagagattcttctttcaccggcactcagctataccacaaaacatttgcataatgatgtggagaaagagagaaaggaaaaattgccaaaagaaatagaggaagataaactaaaacgagaagaagaaaaaagagaagctgaaaagagtgaagattcctctggtgctgcaggcctctcaggcttacatcgcacatacagccaggactgtagctttaaaaacagcatgtaccatgttggagattacgtctatgtggaacctgcagaggccaacctacaaccacatatcgtctgtattgaaagactgtgggaggattcagctggtgaaaaatggttgtatggctgttggttttaccgaccaaatgaaacattccacctggctacacgaaaatttctagaaaaagaagtttttaagagtgactattacaacaaagttccagttagtaaaattctaggcaagtgtgtggtcatgtttgtcaaggaatactttaagttatgcccagaaaacttccgagatgaggatgtttttgtctgtgaatcacggtattctgccaaaaccaaatcttttaagaaaattaaactgtggaccatgcccatcagctcagtcaggtttgtccctcgggatgtgcctctgcctgtggttcgcgtggcctctgtatttgcaaatgcagataaaggtgatgatgagaagaatacagacaactcagaggacagtcgagctgaagacaattttaacttggaaaaggaaaaagaagatgtccctgtggaaatgtccaatggtgaaccaggttgccactactttgagcagctccattacaatgacatgtggctgaaggttggcgactgtgtcttcatcaagtcccatggcctggtgcgtcctcgtgtgggcagaattgaaaaagtatgggttcgagatggagctgcatatttttatggccccatcttcattcacccagaagaaacagagcatgagcccacaaaaatgttctacaaaaaagaagtatttctgagtaatctggaagaaacctgccccatgacatgtattctcggaaagtgtgctgtgttgtcattcaaggacttcctctcctgcaggccaactgaaataccagaaaatgacattctgctttgtgagagccgctacaatgagagcgacaagcagatgaagaaattcaaaggattgaagaggttttcactctctgctaaagtggtagatgatgaaatttactacttcagaaaaccaattgttcctcagaaggagccatcacctttgctggaaaagaagatccagttgctagaagctaaatttgccgagttagaaggtggagatgatgatattgaagagatgggagaagaagatagtgaggtcattgaacctccttctctacctcagcttcagacccccctggccagtgagctggacctcatgccctacacacccccacagtctaccccaaagtctgccaaaggcagtgcaaagaaggaaggctccaaacggaaaatcaacatgagtggctacatcctgttcagcagtgagatgagggctgtgattaaggcccaacacccagactactctttcggggagctcagccgcctggtggggacagaatggagaaatcttgagacagccaagaaagcagaatatgaaggtgtgatgaaccaaggagtggcccctatggtagggactccagcaccaggtggaagtccatatggacaacaggtgggagttttggggcctccagggcagcaggcaccacctccatatcccggcccacatccagctggaccccctgtcatacagcagccaacaacacccatgtttgtagctcccccaccaaagacccagcggcttcttcactcagaggcctacctgaaatacattgaaggactcagtgcggagtccaacagcattagcaagtgggatcagacactggcagctcgaagacgcgacgtccatttgtcgaaagaacaggagagccgcctaccctctcactggctgaaaagcaaaggggcccacaccaccatggcagatgccctctggcgccttcgagatttgatgctccgggacaccctcaacattcgccaagcatacaacctagaaaatgtt

SEQ ID NO: 4591 - DNA, 5067 bp, Homo sapiens
  source 1..5067: mol_type = genomic DNA
atgggttccaagagaagaagagctacctccccttccagcagtgtcagcggggactttgatgatgggcaccattctgtgtcaacaccaggcccaagcaggaaaaggaggagactttccaatcttccaactgtagatcctattgccgtgtgccatgaactctataataccatccgagactataaggatgaacagggcagacttctctgtgagctcttcattagggcaccaaagcgaagaaatcaaccagactattatgaagtggtttctcagcccattgacttgatgaaaatccaacagaaactaaaaatggaagagtatgatgatgttaatttgctgactgctgacttccagcttctttttaacaatgcaaagtcctattataagccagattctcctgaatataaagccgcttgcaaactctgggatttgtaccttcgaacaagaaatgagtttgttcagaaaggagaagcagatgacgaagatgatgatgaagatgggcaagacaatcagggcacagtgactgaaggatcttctccagcttacttgaaggagatcctggagcagcttcttgaagccatagttgtagctacaaatccatcaggacgtctcattagcgaactttttcagaaactgccttctaaagtgcaatatccagattattatgcaataattaaggagcctatagatctcaagaccattgcccagaggatacagaatggaagctacaaaagtattcatgcaatggccaaagatatagatctcctcgcaaaaaatgccaaaacttataatgagcctggctctcaagtattcaaggatgcaaattcaattaaaaaaatattttatatgaaaaaggctgaaattgaacatcatgaaatggctaagtcaagtcttcgaatgaggactccatccaacttggctgcagccagactgacaggtccttcacacagtaaaggcagccttggtgaagagagaaatcccactagcaagtattaccgtaataaaagagcagtacaaggaggtcgtttatcagcaattacaatggcacttcaatatggctcagaaagtgaagaagatgctgctttagctgctgcacgctatgaagagggagagtcagaagcagaaagcatcacttcctttatggatgtttcaaatcctttttatcagctttatgacacagttaggagttgtcggaataaccaagggcagctaatagctgaacctttttaccatttgccttcaaagaaaaaataccctgattattaccagcaaattaaaatgcccatatcactacaacagatccgaacaaaactgaagaatcaagaatatgaaactttagatcatttggagtgtgatctgaatttaatgtttgaaaatgccaaacgctataatgtgcccaattcagccatctacaagcgagttctaaaattgcagcaagttatgcaggcaaagaagaaagagcttgccaggagagacgatatcgaggacggagacagcatgatctcttcagccacctctgatactggtagtgccaaaagaaaaagtaaaaagaacataagaaagcagcgaatgaaaatcttattcaatgttgttcttgaagctcgagagccaggttcaggcagaagactttgtgacctatttatggttaaaccatccaaaaaggactatcctgattattataaaatcatcttggagccaatggacttgaaaataattgagcataacatccgcaatgacaaatatgctggtgaagagggaatgatagaagacatgaagctgatgttccggaatgccaggcactataatgaggagggctcccaggtttataatgatgcacatatcctggagaagttactcaaggagaaaaggaaagagctgggcccactgcctgatgatgatgacatggcttctcccaaactcaagctgagtaggaagagtggcatttctcctaaaaaatcaaaatacatgactccaatgcagcagaaactaaatgaggtctatgaagctgtaaagaactatactgataagaggggtcgccgcctcagtgccatatttctgaggcttccctctagatctgagttgcctgactactatctgactattaaaaagcccatggacatggaaaaaattcgaagtcacatgatggccaacaagtaccaagatattgactctatggttgaggactttgtcatgatgtttaataatgcctgtacatacaatgagccggagtctttgatctacaaagatgctcttgttctacacaaagtcctgcttgaaacacgcagagacctggagggagatgaggactctcatgtcccaaatgtgactttgctgattcaagagcttatccacaatctttttgtgtcagtcatgagtcatcaggatgatgagggaagatgctacagcgattctttagcagaaattcctgctgtggatcccaactttcctaacaaaccaccccttacatttgacataattaggaagaatgttgaaaataatcgctaccgtcggcttgatttatttcaagagcatatgtttgaagtattggaacgagcaagaaggatgaatcggacagattcagaaatatatgaagatgcagtagaacttcagcagttttttattaaaattcgtgatgaactctgcaaaaatggagagattcttctttcaccggcactcagctataccacaaaacatttgcataatgatgtggagaaagagagaaaggaaaaattgccaaaagaaatagaggaagataaactaaaacgagaagaagaaaaaagagaagctgaaaagagtgaagattcctctggtgctgcaggcctctcaggcttacatcgcacatacagccaggactgtagctttaaaaacagcatgtaccatgttggagattacgtctatgtggaacctgcagaggccaacctacaaccacatatcgtctgtattgaaagactgtgggaggattcagctggtgaaaaatggttgtatggctgttggttttaccgaccaaatgaaacattccacctggctacacgaaaatttctagaaaaagaagtttttaagagtgactattacaacaaagttccagttagtaaaattctaggcaagtgtgtggtcatgtttgtcaaggaatactttaagttatgcccagaaaacttccgagatgaggatgtttttgtctgtgaatcacggtattctgccaaaaccaaatcttttaagaaaattaaactgtggaccatgcccatcagctcagtcaggtttgtccctcgggatgtgcctctgcctgtggttcgcgtggcctctgtatttgcaaatgcagataaaggtgatgatgagaagaatacagacaactcagaggacagtcgagctgaagacaattttaacttggaaaaggaaaaagaagatgtccctgtggaaatgtccaatggtgaaccaggttgccactactttgagcagctccattacaatgacatgtggctgaaggttggcgactgtgtcttcatcaagtcccatggcctggtgcgtcctcgtgtgggcagaattgaaaaagtatgggttcgagatggagctgcatatttttatggccccatcttcattcacccagaagaaacagagcatgagcccacaaaaatgttctacaaaaaagaagtatttctgagtaatctggaagaaacctgccccatgacatgtattctcggaaagtgtgctgtgttgtcattcaaggacttcctctcctgcaggccaactgaaataccagaaaatgacattctgctttgtgagagccgctacaatgagagcgacaagcagatgaagaaattcaaaggattgaagaggttttcactctctgctaaagtggtagatgatgaaatttactacttcagaaaaccaattgttcctcagaaggagccatcacctttgctggaaaagaagatccagttgctagaagctaaatttgccgagttagaaggtggagatgatgatattgaagagatgggagaagaagatagtgaggtcattgaacctccttctctacctcagcttcagacccccctggccagtgagctggacctcatgccctacacacccccacagtctaccccaaagtctgccaaaggcagtgcaaagaaggaaggctccaaacggaaaatcaacatgagtggctacatcctgttcagcagtgagatgagggctgtgattaaggcccaacacccagactactctttcggggagctcagccgcctggtggggacagaatggagaaatcttgagacagccaagaaagcagaatatgaagagcgggcagctaaagttgctgagcagcaggagagagagcgagcagcacagcaacagcagccgagtgcttctccccgagcaggcacccctgtgggggctctcatgggggtggtgccaccaccaacaccaatggggatgctcaatcagcagttgacacctgttgcaggcatgatgggtggctatccgccaggccttccacctttgcagggcccagttgatggccttgttagcatgggcagcatgcagccacttcaccctggggggcctccaccccaccatcttccgccaggtgtgcctggcctcccgggcatcccaccaccgggtgtgatgaaccaaggagtggcccctatggtagggactccagcaccaggtggaagtccatatggacaacaggtgggagttttggggcctccagggcagcaggcaccacctccatatcccggcccacatccagctggaccccctgtcatacagcagccaacaacacccatgtttgtagctcccccaccaaagacccagcggcttcttcactcagaggcctacctgaaatacattgaaggactcagtgcggagtccaacagcattagcaagtgggatcagacactggcagctcgaagacgcgacgtccatttgtcgaaagaacaggagagccgcctaccctctcactggctgaaaagcaaaggggcccacaccaccatggcagatgccctctggcgccttcgagatttgatgctccgggacaccctcaacattcgccaagcatacaacctagaaaatgtt

SEQ ID NO: 4592 - DNA, 4746 bp, Homo sapiens
  source 1..4746: mol_type = genomic DNA
atgggttccaagagaagaagagctacctccccttccagcagtgtcagcggggactttgatgatgggcaccattctgtgtcaacaccaggcccaagcaggaaaaggaggagactttccaatcttccaactgtagatcctattgccgtgtgccatgaactctataataccatccgagactataaggatgaacagggcagacttctctgtgagctcttcattagggcaccaaagcgaagaaatcaaccagactattatgaagtggtttctcagcccattgacttgatgaaaatccaacagaaactaaaaatggaagagtatgatgatgttaatttgctgactgctgacttccagcttctttttaacaatgcaaagtcctattataagccagattctcctgaatataaagccgcttgcaaactctgggatttgtaccttcgaacaagaaatgagtttgttcagaaaggagaagcagatgacgaagatgatgatgaagatgggcaagacaatcagggcacagtgactgaaggatcttctccagcttacttgaaggagatcctggagcagcttcttgaagccatagttgtagctacaaatccatcaggacgtctcattagcgaactttttcagaaactgccttctaaagtgcaatatccagattattatgcaataattaaggagcctatagatctcaagaccattgcccagaggatacagaatggaagctacaaaagtattcatgcaatggccaaagatatagatctcctcgcaaaaaatgccaaaacttataatgagcctggctctcaagtattcaaggatgcaaattcaattaaaaaaatattttatatgaaaaaggctgaaattgaacatcatgaaatggctaagtcaagtcttcgaatgaggactccatccaacttggctgcagccagactgacaggtccttcacacagtaaaggcagccttggtgaagagagaaatcccactagcaagtattaccgtaataaaagagcagtacaaggaggtcgtttatcagcaattacaatggcacttcaatatggctcagaaagtgaagaagatgctgctttagctgctgcacgctatgaagagggagagtcagaagcagaaagcatcacttcctttatggatgtttcaaatcctttttatcagctttatgacacagttaggagttgtcggaataaccaagggcagctaatagctgaacctttttaccatttgccttcaaagaaaaaataccctgattattaccagcaaattaaaatgcccatatcactacaacagatccgaacaaaactgaagaatcaagaatatgaaactttagatcatttggagtgtgatctgaatttaatgtttgaaaatgccaaacgctataatgtgcccaattcagccatctacaagcgagttctaaaattgcagcaagttatgcaggcaaagaagaaagagcttgccaggagagacgatatcgaggacggagacagcatgatctcttcagccacctctgatactggtagtgccaaaagaaaaagtaaaaagaacataagaaagcagcgaatgaaaatcttattcaatgttgttcttgaagctcgagagccaggttcaggcagaagactttgtgacctatttatggttaaaccatccaaaaaggactatcctgattattataaaatcatcttggagccaatggacttgaaaataattgagcataacatccgcaatgacaaatatgctggtgaagagggaatgatagaagacatgaagctgatgttccggaatgccaggcactataatgaggagggctcccaggtttataatgatgcacatatcctggagaagttactcaaggagaaaaggaaagagctgggcccactgcctgatgatgatgacatggcttctcccaaactcaagctgagtaggaagagtggcatttctcctaaaaaatcaaaatacatgactccaatgcagcagaaactaaatgaggtctatgaagctgtaaagaactatactgataagaggggtcgccgcctcagtgccatatttctgaggcttccctctagatctgagttgcctgactactatctgactattaaaaagcccatggacatggaaaaaattcgaagtcacatgatggccaacaagtaccaagatattgactctatggttgaggactttgtcatgatgtttaataatgcctgtacatacaatgagccggagtctttgatctacaaagatgctcttgttctacacaaagtcctgcttgaaacacgcagagacctggagggagatgaggactctcatgtcccaaatgtgactttgctgattcaagagcttatccacaatctttttgtgtcagtcatgagtcatcaggatgatgagggaagatgctacagcgattctttagcagaaattcctgctgtggatcccaactttcctaacaaaccaccccttacatttgacataattaggaagaatgttgaaaataatcgctaccgtcggcttgatttatttcaagagcatatgtttgaagtattggaacgagcaagaaggatgaatcggacagattcagaaatatatgaagatgcagtagaacttcagcagttttttattaaaattcgtgatgaactctgcaaaaatggagagattcttctttcaccggcactcagctataccacaaaacatttgcataatgatgtggagaaagagagaaaggaaaaattgccaaaagaaatagaggaagataaactaaaacgagaagaagaaaaaagagaagctgaaaagagtgaagattcctctggtgctgcaggcctctcaggcttacatcgcacatacagccaggactgtagctttaaaaacagcatgtaccatgttggagattacgtctatgtggaacctgcagaggccaacctacaaccacatatcgtctgtattgaaagactgtgggaggattcagctgaaaaagaagtttttaagagtgactattacaacaaagttccagttagtaaaattctaggcaagtgtgtggtcatgtttgtcaaggaatactttaagttatgcccagaaaacttccgagatgaggatgtttttgtctgtgaatcacggtattctgccaaaaccaaatcttttaagaaaattaaactgtggaccatgcccatcagctcagtcaggtttgtccctcgggatgtgcctctgcctgtggttcgcgtggcctctgtatttgcaaatgcagataaaggtgatgatgagaagaatacagacaactcagaggacagtcgagctgaagacaattttaacttggaaaaggaaaaagaagatgtccctgtggaaatgtccaatggtgaaccaggttgccactactttgagcagctccattacaatgacatgtggctgaaggttggcgactgtgtcttcatcaagtcccatggcctggtgcgtcctcgtgtgggcagaattgaaaaagtatgggttcgagatggagctgcatatttttatggccccatcttcattcacccagaagaaacagagcatgagcccacaaaaatgttctacaaaaaagaagtatttctgagtaatctggaagaaacctgccccatgacatgtattctcggaaagtgtgctgtgttgtcattcaaggacttcctctcctgcaggccaactgaaataccagaaaatgacattctgctttgtgagagccgctacaatgagagcgacaagcagatgaagaaattcaaaggattgaagaggttttcactctctgctaaagtggtagatgatgaaatttactacttcagaaaaccaattgttcctcagaaggagccatcacctttgctggaaaagaagatccagttgctagaagctaaatttgccgagttagaaggtggagatgatgatattgaagagatgggagaagaagatagtgagtctaccccaaagtctgccaaaggcagtgcaaagaaggaaggctccaaacggaaaatcaacatgagtggctacatcctgttcagcagtgagatgagggctgtgattaaggcccaacacccagactactctttcggggagctcagccgcctggtggggacagaatggagaaatcttgagacagccaagaaagcagaatatgaaggcatgatgggtggctatccgccaggccttccacctttgcagggcccagttgatggccttgttagcatgggcagcatgcagccacttcaccctggggggcctccaccccaccatcttccgccaggtgtgcctggcctcccgggcatcccaccaccgggtgtgatgaaccaaggagtggcccctatggtagggactccagcaccaggtggaagtccatatggacaacaggtgggagttttggggcctccagggcagcaggcaccacctccatatcccggcccacatccagctggaccccctgtcatacagcagccaacaacacccatgtttgtagctcccccaccaaagacccagcggcttcttcactcagaggcctacctgaaatacattgaaggactcagtgcggagtccaacagcattagcaagtgggatcagacactggcagctcgaagacgcgacgtccatttgtcgaaagaacaggagagccgcctaccctctcactggctgaaaagcaaaggggcccacaccaccatggcagatgccctctggcgccttcgagatttgatgctccgggacaccctcaacattcgccaagcatacaacctagaaaatgtt

SEQ ID NO: 4593 - DNA, 4902 bp, Homo sapiens
  source 1..4902: mol_type = genomic DNA
atgggttccaagagaagaagagctacctccccttccagcagtgtcagcggggactttgatgatgggcaccattctgtgtcaacaccaggcccaagcaggaaaaggaggagactttccaatcttccaactgtagatcctattgccgtgtgccatgaactctataataccatccgagactataaggatgaacagggcagacttctctgtgagctcttcattagggcaccaaagcgaagaaatcaaccagactattatgaagtggtttctcagcccattgacttgatgaaaatccaacagaaactaaaaatggaagagtatgatgatgttaatttgctgactgctgacttccagcttctttttaacaatgcaaagtcctattataagccagattctcctgaatataaagccgcttgcaaactctgggatttgtaccttcgaacaagaaatgagtttgttcagaaaggagaagcagatgacgaagatgatgatgaagatgggcaagacaatcagggcacagtgactgaaggatcttctccagcttacttgaaggagatcctggagcagcttcttgaagccatagttgtagctacaaatccatcaggacgtctcattagcgaactttttcagaaactgccttctaaagtgcaatatccagattattatgcaataattaaggagcctatagatctcaagaccattgcccagaggatacagaatggaagctacaaaagtattcatgcaatggccaaagatatagatctcctcgcaaaaaatgccaaaacttataatgagcctggctctcaagtattcaaggatgcaaattcaattaaaaaaatattttatatgaaaaaggctgaaattgaacatcatgaaatggctaagtcaagtcttcgaatgaggactccatccaacttggctgcagccagactgacaggtccttcacacagtaaaggcagccttggtgaagagagaaatcccactagcaagtattaccgtaataaaagagcagtacaaggaggtcgtttatcagcaattacaatggcacttcaatatggctcagaaagtgaagaagatgctgctttagctgctgcacgctatgaagagggagagtcagaagcagaaagcatcacttcctttatggatgtttcaaatcctttttatcagctttatgacacagttaggagttgtcggaataaccaagggcagctaatagctgaacctttttaccatttgccttcaaagaaaaaataccctgattattaccagcaaattaaaatgcccatatcactacaacagatccgaacaaaactgaagaatcaagaatatgaaactttagatcatttggagtgtgatctgaatttaatgtttgaaaatgccaaacgctataatgtgcccaattcagccatctacaagcgagttctaaaattgcagcaagttatgcaggcaaagaagaaagagcttgccaggagagacgatatcgaggacggagacagcatgatctcttcagccacctctgatactggtagtgccaaaagaaaaagtaaaaagaacataagaaagcagcgaatgaaaatcttattcaatgttgttcttgaagctcgagagccaggttcaggcagaagactttgtgacctatttatggttaaaccatccaaaaaggactatcctgattattataaaatcatcttggagccaatggacttgaaaataattgagcataacatccgcaatgacaaatatgctggtgaagagggaatgatagaagacatgaagctgatgttccggaatgccaggcactataatgaggagggctcccaggtttataatgatgcacatatcctggagaagttactcaaggagaaaaggaaagagctgggcccactgcctgatgatgatgacatggcttctcccaaactcaagctgagtaggaagagtggcatttctcctaaaaaatcaaaatacatgactccaatgcagcagaaactaaatgaggtctatgaagctgtaaagaactatactgataagaggggtcgccgcctcagtgccatatttctgaggcttccctctagatctgagttgcctgactactatctgactattaaaaagcccatggacatggaaaaaattcgaagtcacatgatggccaacaagtaccaagatattgactctatggttgaggactttgtcatgatgtttaataatgcctgtacatacaatgagccggagtctttgatctacaaagatgctcttgttctacacaaagtcctgcttgaaacacgcagagacctggagggagatgaggactctcatgtcccaaatgtgactttgctgattcaagagcttatccacaatctttttgtgtcagtcatgagtcatcaggatgatgagggaagatgctacagcgattctttagcagaaattcctgctgtggatcccaactttcctaacaaaccaccccttacatttgacataattaggaagaatgttgaaaataatcgctaccgtcggcttgatttatttcaagagcatatgtttgaagtattggaacgagcaagaaggatgaatcggacagattcagaaatatatgaagatgcagtagaacttcagcagttttttattaaaattcgtgatgaactctgcaaaaatggagagattcttctttcaccggcactcagctataccacaaaacatttgcataatgatgtggagaaagagagaaaggaaaaattgccaaaagaaatagaggaagataaactaaaacgagaagaagaaaaaagagaagctgaaaagagtgaagattcctctggtgctgcaggcctctcaggcttacatcgcacatacagccaggactgtagctttaaaaacagcatgtaccatgttggagattacgtctatgtggaacctgcagaggccaacctacaaccacatatcgtctgtattgaaagactgtgggaggattcagctggtgaaaaatggttgtatggctgttggttttaccgaccaaatgaaacattccacctggctacacgaaaatttctagaaaaagaagtttttaagagtgactattacaacaaagttccagttagtaaaattctaggcaagtgtgtggtcatgtttgtcaaggaatactttaagttatgcccagaaaacttccgagatgaggatgtttttgtctgtgaatcacggtattctgccaaaaccaaatcttttaagaaaattaaactgtggaccatgcccatcagctcagtcaggtttgtccctcgggatgtgcctctgcctgtggttcgcgtggcctctgtatttgcaaatgcagataaaggtgatgatgagaagaatacagacaactcagaggacagtcgagctgaagacaattttaacttggaaaaggaaaaagaagatgtccctgtggaaatgtccaatggtgaaccaggttgccactactttgagcagctccattacaatgacatgtggctgaaggttggcgactgtgtcttcatcaagtcccatggcctggtgcgtcctcgtgtgggcagaattgaaaaagtatgggttcgagatggagctgcatatttttatggccccatcttcattcacccagaagaaacagagcatgagcccacaaaaatgttctacaaaaaagaagtatttctgagtaatctggaagaaacctgccccatgacatgtattctcggaaagtgtgctgtgttgtcattcaaggacttcctctcctgcaggccaactgaaataccagaaaatgacattctgctttgtgagagccgctacaatgagagcgacaagcagatgaagaaattcaaaggattgaagaggttttcactctctgctaaagtggtagatgatgaaatttactacttcagaaaaccaattgttcctcagaaggagccatcacctttgctggaaaagaagatccagttgctagaagctaaatttgccgagttagaaggtggagatgatgatattgaagagatgggagaagaagatagtgaggtcattgaacctccttctctacctcagcttcagacccccctggccagtgagctggacctcatgccctacacacccccacagtctaccccaaagtctgccaaaggcagtgcaaagaaggaaggctccaaacggaaaatcaacatgagtggctacatcctgttcagcagtgagatgagggctgtgattaaggcccaacacccagactactctttcggggagctcagccgcctggtggggacagaatggagaaatcttgagacagccaagaaagcagaatatgaaggcatgatgggtggctatccgccaggccttccacctttgcagggcccagttgatggccttgttagcatgggcagcatgcagccacttcaccctggggggcctccaccccaccatcttccgccaggtgtgcctggcctcccgggcatcccaccaccgggtgtgatgaaccaaggagtggcccctatggtagggactccagcaccaggtggaagtccatatggacaacaggtgggagttttggggcctccagggcagcaggcaccacctccatatcccggcccacatccagctggaccccctgtcatacagcagccaacaacacccatgtttgtagctcccccaccaaagacccagcggcttcttcactcagaggcctacctgaaatacattgaaggactcagtgcggagtccaacagcattagcaagtgggatcagacactggcagctcgaagacgcgacgtccatttgtcgaaagaacaggagagccgcctaccctctcactggctgaaaagcaaaggggcccacaccaccatggcagatgccctctggcgccttcgagatttgatgctccgggacaccctcaacattcgccaagcatacaacctagaaaatgtt

SEQ ID NO: 4594 - DNA, 507 bp, Homo sapiens
  source 1..507: mol_type = genomic DNA
atgtccagcgagcctccccctccttatcctgggggccccacagccccacttctggaagagaaaagtggagccccgcccaccccaggccgttcctccccagctgtgatgcagccccctccaggcatgccactgccccctgcggacattggccccccaccctatgagccgccgggtcacccaatgccccagcctggcttcatcccaccacacatgagtgcagatggcacctacatgcctccgggagctgccaccacggtgacagtgctgcagggagagatctttgagggagcgcctgtgcagacggtgtgtccccactgccagcaggccatcaccaccaagatctcctacgagattggcttgatgaatttcgtgctgggtttcttctgttgcttcatgggatgtgatctgggctgctgcctgatcccctgcctcatcaatgacttcaaggatgtgacgcacacatgccccagctgcaaagcctacatctacacgtacaagcgcctgtgc

SEQ ID NO: 4595 - DNA, 387 bp, Homo sapiens
  source 1..387: mol_type = genomic DNA
atgtccagcgagcctccccctccttatcctgggggccccacagccccacttctggaagagaaaagtggagccccgcccaccccaggccgttcctccccagctgtgatgcagccccctccaggagctgccaccacggtgacagtgctgcagggagagatctttgagggagcgcctgtgcagacggtgtgtccccactgccagcaggccatcaccaccaagatctcctacgagattggcttgatgaatttcgtgctgggtttcttctgttgcttcatgggatgtgatctgggctgctgcctgatcccctgcctcatcaatgacttcaaggatgtgacgcacacatgccccagctgcaaagcctacatctacacgtacaagcgcctgtgc

SEQ ID NO: 4596 - DNA, 765 bp, Homo sapiens
  source 1..765: mol_type = genomic DNA
atggacgtgatggatggctgccagttctcaccttctgagtacttctacgacggctcctgcataccgtcccccgagggtgaatttggggacgagtttgtgccgcgagtggctgccttcggagcgcacaaagcagagctgcagggctcagatgaggacgagcacgtgcgagcgcctaccggccaccaccaggctggtcactgcctcatgtgggcctgcaaagcctgcaagaggaagtccaccaccatggatcggcggaaggcagccactatgcgcgagcggaggcgcctgaagaaggtcaaccaggctttcgaaaccctcaagaggtgtaccacgaccaaccccaaccagaggctgcccaaggtggagatcctcaggaatgccatccgctacatcgagagcctgcaggagttgctgagagagcaggtggagaactactatagcctgccgggacagagctgctcggagcccaccagccccacctccaactgctctgatggcatgcccgaatgtaacagtcctgtctggtccagaaagagcagtacttttgacagcatctactgtcctgatgtatcaaatgtatatgccacagataaaaactccttatccagcttggattgcttatccaacatagtggaccggatcacctcctcagagcaacctgggttgcctctccaggatctggcttctctctctccagttgccagcaccgattcacagcctgcaactccaggggcttctagttccaggcttatctatcatgtgcta

SEQ ID NO: 4597 - DNA, 1494 bp, Homo sapiens
  source 1..1494: mol_type = genomic DNA
atggagtccccaagagggtggaccctgcaggtggccccagaggaaggccaggtcctctgcaatgtgaagactgccacgaggggcctctctgagggggctgtgtctggaggctggggggcctgggaaaactccacggaggttccgagggaggcaggggacggccagcggcagcaagccacactgggggcggcggacgaacagggaggccccggcagggagctgggccccgcagacggtgggcgggacggggctgggcccaggagcgagcctgcagaccgggcgttgcgcccttcgcctctcccagaggagccgggctgccggtgcggggagtgcggcaaggcgttcagccagggctcttacttgctgcagcatcggcgcgtgcacacaggcgagaagccgtacacgtgccccgagtgcggcaaggccttcgcctggagctccaacctcagccagcaccagcgcatccacagcggcgagaagccctacgcttgcagggagtgcggcaaggccttccgcgcgcactcgcagctcatccaccaccaggagacacacagcggcctgaagcccttccgctgcccggactgcggcaagtccttcggccgaagcaccacgctggtgcagcaccgacgcacgcacacgggcgagaagccctacgagtgcccggagtgcggcaaggccttcagctggaactccaatttcctggagcaccggcgcgtgcacacgggcgcgcggccgcacgcctgccgggactgtggcaaggccttcagccagagctccaacctggccgagcacctgaagatccacgcgggcgcacggccacacgcctgtcccgactgcggcaaggccttcgtgcgtgtggcggggctgcggcagcaccggcgcacgcacagcagcgagaagcccttcccctgcgccgagtgcggaaaggctttccgcgagagctcgcagctcctgcagcaccagcgcacgcacactggtgagcggcccttcgagtgcgccgagtgcggccaggctttcgtcatgggctcctacctggcggagcaccggcgcgtgcacacgggcgagaagcctcatgcgtgcgcccagtgcggcaaggccttcagccagcgctccaacctactgagccaccggcgcacgcactcgggcgccaagcccttcgcctgcgccgactgcggcaaggccttccgcggcagttccggcctggcgcaccaccggctttcgcacacgggagagcgacccttcgcctgcgcagaatgcggcaaggccttccgcggcagctccgagctgcgccagcaccagcgcctgcactctggcgagaggccgttcgtctgcgcccactgcagcaaggccttcgtgcgcaagtcggagctcttaagccaccggcgcacgcacacgggcgagaggccctacgcttgcggcgagtgcgggaagcctttcagccaccgttgcaacctcaacgagcaccagaagcggcacgggggccgcgctgcgccc

SEQ ID NO: 4598 - DNA, 1761 bp, Homo sapiens
  source 1..1761: mol_type = genomic DNA
atgcccacagccctgtgcccccgagtcttggctccgaaggaaagtgaggagcccaggaaaatgaggagcccacctggagagaaccctagcccccagggggagcttcccagccccgagtcctctcggcgtctcttccgccgtttccgctaccaggaggcggcgggcccccgggaggccctgcagcgcctctgggacctgtgcgggggctggctgcggcctgagaggcacaccaaggagcagattctggagctgctggtgctggagcagttcctggccatcctgccccgggagatccagagctgggtgcgggcgcaggagcctgagagcggagagcaggctgtggccgcggtggaggcactggaacgggagcccgggagaccctggcagtggctcaagcactgtgaagaccctgtggtgattgatgatggggacagccctctggaccaggagcaggagcagctgccggtagagccccacagcgaccttgcaaagaaccaggatgcccagcccataaccctggcacagtgcctggggctcccaagcagaccaccaagccagctcagcggggacccagttctgcaagatgctttccttcttcaggaagagaatgtgcgggacacacagcaggtgaccaccctccagctacccccgagtcgggtttctccattcaaggacatgattttatgcttctctgaagaggattggtcccttctagatcctgcccagactggcttctatggagagttcatcattggggaggattacggggtctcaatgcctccaaacgacctagctgcccagccagatctctcccagggagaggagaatgagccacgcgttccagagttgcaggatctccagggcaaagaagtgccccaggtctcctacttggactctccaagtctccagccattccaggtagaagaaagaaggaaacgtgaggagctgcaggtgccagagttccaggcctgcccacagacggtggtgcctcaaaacacctacccagctggcggcaacccgcgatctctagagaacagcctggatgaagaagtgaccatcgagatcgttctctccagctctggggacgaggactcccagcatggcccgtactgcacagaagagctggggagccccacagagaagcagcgcagcctccccgcctcccaccggagcagcaccgaggccggaggcgaggtgcagacctccaagaagtcctacgtgtgtccgaactgtgggaaaatcttccgctggagggtcaacttcatccggcatctgcggagccgcagggagcaggagaagccgcacgagtgctcggtgtgcggggagctgttcagcgacagcgaggacctggatgggcacctagagagccacgaggcccagaagccttaccggtgtggtgcctgcgggaagagcttccgcctgaactcccacctgctctcccaccggcggatacacctgcagccggacagactccagccggtggagaagagagagcaggcggcatccgaggacgcggacaagggtcccaaagagccgctggaaaacggcaaggccaaactgagcttccagtgctgtgagtgtgggaaggccttccagcggcacgaccacctggctcggcaccgcagccactttcacctgaaggacaaagcccggcccttccagtgccggtactgcgtcaagagcttcacgcagaactatgacctcctccgccacgagcgcctgcacatgaagcgccgttccaagcaggctctgaactcctac

SEQ ID NO: 4599 - DNA, 1419 bp, Homo sapiens
  source 1..1419: mol_type = genomic DNA
atgaattacgacaagctgagccgggccctgcgctattactataacaagcgcattctgcacaagaccaaggggaaacggttcacctacaagttcaatttcaacaaactggtgctggtcaattacccattcattgatgtggggttggctgggggtgcagtgccccagagtgccccgccagtgccgtcgggtggtagccacttccgcttccctccctcaacgccctccgaggtgctgtcccccaccgaggacccccgctcaccaccagcctgctcttcatcttcatcttccctcttctcggctgtggtggcccgccgcctgggccgaggctcagtcagtgactgtagtgatggcacgtcagagctggaggaaccgctgggagaggatccccgcgcccgaccacccggccctccggatctgggtgccttccgagggcccccgctggcccgcctgccccatgaccctggtgtcttccgagtctatccccggcctcggggtggccctgaacccctcagccccttccctgtgtcgcctctggccggtcctggatccctgctgccccctcagctctccccggctctgcccatgacgcccacccacctggcctacactccctcgcccacgctgagcccgatgtaccccagtggtggcggggggcccagcggctcagggggaggctcccacttctccttcagccctgaggacatgaaacggtacctgcaggcccacacccaaagcgtctacaactaccacctcagcccccgcgccttcctgcactaccctgggctggtggtgccccagccccagcgccctgacaagtgcccgctgccgcccatggcacccgagaccccaccggtcccctcctcggcctcgtcatcctcttcttcttcttcctccccattcaagtttaagctccagccgcccccactcggacgccggcagcgggcagctggggagaaggccgtagccggtgctgacaagagcggtggcagtgcaggcgggctggctgagggggcaggggcgctagccccaccgcccccgccaccacagatcaaggtggagcccatctcggaaggcgagtcggaggaggtagaggtgactgacatcagtgatgaggatgaggaagacggggaggtgttcaagacgccccgtgccccacctgcaccccctaagcctgagcccggcgaggcacccggggcatcccagtgcatgcccctcaagctacgctttaagcggcgctggagtgaagactgtcgcctcgaagggggtgggggccccgctgggggctttgaggatgagggtgaggacaagaaggtgcgtggggaggggcctggggaggctggggggcccctcaccccaaggcgggtgagctctgacctccagcatgccacggcccagctctccctggagcaccgagactcc

SEQ ID NO: 4600 - DNA, 1458 bp, Homo sapiens
  source 1..1458: mol_type = genomic DNA
atgattcagactgtcccggacccagcagctcatatcaaggaagccttatcagttgtgagtgaggaccagtcgttgtttgagtgtgcctacggaacgccacacctggctaagacagagatgaccgcgtcctcctccagcgactatggacagacttccaagatgagcccacgcgtccctcagcaggattggctgtctcaacccccagccagggtcaccatcaaaatggaatgtaaccctagccaggtgaatggctcaaggaactctcctgatgaatgcagtgtggccaaaggcgggaagatggtgggcagcccagacaccgttgggatgaactacggcagctacatggaggagaagcacatgccacccccaaacatgaccacgaacgagcgcagagttatcgtgccagcagatcctacgctatggagtacagaccatgtgcggcagtggctggagtgggcggtgaaagaatatggccttccagacgtcaacatcttgttattccagaacatcgatgggaaggaactgtgcaagatgaccaaggacgacttccagaggctcacccccagctacaacgccgacatccttctctcacatctccactacctcagagagactcctcttccacatttgacttcagatgatgttgataaagccttacaaaactctccacggttaatgcatgctagaaacacagggggtgcagcttttattttcccaaatacttcagtatatcctgaagctacgcaaagaattacaactaggccagatttaccatatgagccccccaggagatcagcctggaccggtcacggccaccccacgccccagtcgaaagctgctcaaccatctccttccacagtgcccaaaactgaagaccagcgtcctcagttagatccttatcagattcttggaccaacaagtagccgccttgcaaatccaggcagtggccagatccagctttggcagttcctcctggagctcctgtcggacagctccaactccagctgcatcacctgggaaggcaccaacggggagttcaagatgacggatcccgacgaggtggcccggcgctggggagagcggaagagcaaacccaacatgaactacgataagctcagccgcgccctccgttactactatgacaagaacatcatgaccaaggtccatgggaagcgctacgcctacaagttcgacttccacgggatcgcccaggccctccagccccaccccccggagtcatctctgtacaagtacccctcagacctcccgtacatgggctcctatcacgcccacccacagaagatgaactttgtggcgccccaccctccagccctccccgtgacatcttccagtttttttgctgccccaaacccatactggaattcaccaactgggggtatataccccaacactaggctccccaccagccatatgccttctcatctgggcacttactac

SEQ ID NO: 4601 - DNA, 1089 bp, Homo sapiens
  source 1..1089: mol_type = genomic DNA
atggtgggcagcccagacaccgttgggatgaactacggcagctacatggaggagaagcacatgccacccccaaacatgaccacgaacgagcgcagagttatcgtgccagcagatcctacgctatggagtacagaccatgtgcggcagtggctggagtgggcggtgaaagaatatggccttccagacgtcaacatcttgttattccagaacatcgatgggaaggaactgtgcaagatgaccaaggacgacttccagaggctcacccccagctacaacgccgacatccttctctcacatctccactacctcagagagactcctcttccacatttgacttcagatgatgttgataaagccttacaaaactctccacggttaatgcatgctagaaacacagatttaccatatgagccccccaggagatcagcctggaccggtcacggccaccccacgccccagtcgaaagctgctcaaccatctccttccacagtgcccaaaactgaagaccagcgtcctcagttagatccttatcagattcttggaccaacaagtagccgccttgcaaatccaggcagtggccagatccagctttggcagttcctcctggagctcctgtcggacagctccaactccagctgcatcacctgggaaggcaccaacggggagttcaagatgacggatcccgacgaggtggcccggcgctggggagagcggaagagcaaacccaacatgaactacgataagctcagccgcgccctccgttactactatgacaagaacatcatgaccaaggtccatgggaagcgctacgcctacaagttcgacttccacgggatcgcccaggccctccagccccaccccccggagtcatctctgtacaagtacccctcagacctcccgtacatgggctcctatcacgcccacccacagaagatgaactttgtggcgccccaccctccagccctccccgtgacatcttccagtttttttgctgccccaaacccatactggaattcaccaactgggggtatataccccaacactaggctccccaccagccatatgccttctcatctgggcacttactac

SEQ ID NO: 4602 - DNA, 1386 bp, Homo sapiens
  source 1..1386: mol_type = genomic DNA
atgattcagactgtcccggacccagcagctcatatcaaggaagccttatcagttgtgagtgaggaccagtcgttgtttgagtgtgcctacggaacgccacacctggctaagacagagatgaccgcgtcctcctccagcgactatggacagacttccaagatgagcccacgcgtccctcagcaggattggctgtctcaacccccagccagggtcaccatcaaaatggaatgtaaccctagccaggtgaatggctcaaggaactctcctgatgaatgcagtgtggccaaaggcgggaagatggtgggcagcccagacaccgttgggatgaactacggcagctacatggaggagaagcacatgccacccccaaacatgaccacgaacgagcgcagagttatcgtgccagcagatcctacgctatggagtacagaccatgtgcggcagtggctggagtgggcggtgaaagaatatggccttccagacgtcaacatcttgttattccagaacatcgatgggaaggaactgtgcaagatgaccaaggacgacttccagaggctcacccccagctacaacgccgacatccttctctcacatctccactacctcagagagactcctcttccacatttgacttcagatgatgttgataaagccttacaaaactctccacggttaatgcatgctagaaacacagatttaccatatgagccccccaggagatcagcctggaccggtcacggccaccccacgccccagtcgaaagctgctcaaccatctccttccacagtgcccaaaactgaagaccagcgtcctcagttagatccttatcagattcttggaccaacaagtagccgccttgcaaatccaggcagtggccagatccagctttggcagttcctcctggagctcctgtcggacagctccaactccagctgcatcacctgggaaggcaccaacggggagttcaagatgacggatcccgacgaggtggcccggcgctggggagagcggaagagcaaacccaacatgaactacgataagctcagccgcgccctccgttactactatgacaagaacatcatgaccaaggtccatgggaagcgctacgcctacaagttcgacttccacgggatcgcccaggccctccagccccaccccccggagtcatctctgtacaagtacccctcagacctcccgtacatgggctcctatcacgcccacccacagaagatgaactttgtggcgccccaccctccagccctccccgtgacatcttccagtttttttgctgccccaaacccatactggaattcaccaactgggggtatataccccaacactaggctccccaccagccatatgccttctcatctgggcacttactac

SEQ ID NO: 4603 - DNA, 1161 bp, Homo sapiens
  source 1..1161: mol_type = genomic DNA
atggtgggcagcccagacaccgttgggatgaactacggcagctacatggaggagaagcacatgccacccccaaacatgaccacgaacgagcgcagagttatcgtgccagcagatcctacgctatggagtacagaccatgtgcggcagtggctggagtgggcggtgaaagaatatggccttccagacgtcaacatcttgttattccagaacatcgatgggaaggaactgtgcaagatgaccaaggacgacttccagaggctcacccccagctacaacgccgacatccttctctcacatctccactacctcagagagactcctcttccacatttgacttcagatgatgttgataaagccttacaaaactctccacggttaatgcatgctagaaacacagggggtgcagcttttattttcccaaatacttcagtatatcctgaagctacgcaaagaattacaactaggccagatttaccatatgagccccccaggagatcagcctggaccggtcacggccaccccacgccccagtcgaaagctgctcaaccatctccttccacagtgcccaaaactgaagaccagcgtcctcagttagatccttatcagattcttggaccaacaagtagccgccttgcaaatccaggcagtggccagatccagctttggcagttcctcctggagctcctgtcggacagctccaactccagctgcatcacctgggaaggcaccaacggggagttcaagatgacggatcccgacgaggtggcccggcgctggggagagcggaagagcaaacccaacatgaactacgataagctcagccgcgccctccgttactactatgacaagaacatcatgaccaaggtccatgggaagcgctacgcctacaagttcgacttccacgggatcgcccaggccctccagccccaccccccggagtcatctctgtacaagtacccctcagacctcccgtacatgggctcctatcacgcccacccacagaagatgaactttgtggcgccccaccctccagccctccccgtgacatcttccagtttttttgctgccccaaacccatactggaattcaccaactgggggtatataccccaacactaggctccccaccagccatatgccttctcatctgggcacttactac

SEQ ID NO: 4604 - DNA, 1365 bp, Homo sapiens
  source 1..1365: mol_type = genomic DNA
atggccagcactattaaggaagccttatcagttgtgagtgaggaccagtcgttgtttgagtgtgcctacggaacgccacacctggctaagacagagatgaccgcgtcctcctccagcgactatggacagacttccaagatgagcccacgcgtccctcagcaggattggctgtctcaacccccagccagggtcaccatcaaaatggaatgtaaccctagccaggtgaatggctcaaggaactctcctgatgaatgcagtgtggccaaaggcgggaagatggtgggcagcccagacaccgttgggatgaactacggcagctacatggaggagaagcacatgccacccccaaacatgaccacgaacgagcgcagagttatcgtgccagcagatcctacgctatggagtacagaccatgtgcggcagtggctggagtgggcggtgaaagaatatggccttccagacgtcaacatcttgttattccagaacatcgatgggaaggaactgtgcaagatgaccaaggacgacttccagaggctcacccccagctacaacgccgacatccttctctcacatctccactacctcagagagactcctcttccacatttgacttcagatgatgttgataaagccttacaaaactctccacggttaatgcatgctagaaacacagatttaccatatgagccccccaggagatcagcctggaccggtcacggccaccccacgccccagtcgaaagctgctcaaccatctccttccacagtgcccaaaactgaagaccagcgtcctcagttagatccttatcagattcttggaccaacaagtagccgccttgcaaatccaggcagtggccagatccagctttggcagttcctcctggagctcctgtcggacagctccaactccagctgcatcacctgggaaggcaccaacggggagttcaagatgacggatcccgacgaggtggcccggcgctggggagagcggaagagcaaacccaacatgaactacgataagctcagccgcgccctccgttactactatgacaagaacatcatgaccaaggtccatgggaagcgctacgcctacaagttcgacttccacgggatcgcccaggccctccagccccaccccccggagtcatctctgtacaagtacccctcagacctcccgtacatgggctcctatcacgcccacccacagaagatgaactttgtggcgccccaccctccagccctccccgtgacatcttccagtttttttgctgccccaaacccatactggaattcaccaactgggggtatataccccaacactaggctccccaccagccatatgccttctcatctgggcacttactac

SEQ ID NO: 4605 - DNA, 1938 bp, Homo sapiens
  source 1..1938: mol_type = genomic DNA
atgaatgagtgtaatgtgcacaaagaaggttataatgaactaaaccagtatttgacaactacccagagcaaaatatttcaatgtgataaatatgtgaaagtctttcataaacttttaaattcaaatagacataacacaaaacatactggaaagaaacctttcaaatgtaaaaaatgtggcaaatcattttgcatgcttttacacctatgtcagcataaaagaattcatattagagagaattcttaccgatgtgaagaatgtggcaaagcctttatctggttttcaacccttactagacacaggagagttcatactggagagaaatcctacaaatatgaatgtggcaaatcttttaaccaggactcaaaccttactacacataagagaattcatactggacagaaaccctacaaatgtgaagaatgtggcacatctttctaccaattctcataccttactaggcataagctaattcatactagagagaaaccctataaatgtgaacaatatggcaaaacttttaaccaatcttcaacccttactggacataagataattcataatggagaaaaaccctataaatgtgaagaatgtggcaaagcctttagtattttctcaacccctactaaacataagataattcacactgaagagaaatcccacagatgtgaagaatattgcaaagcttataaggagtcctcacaccttactacacataaaagaattcatactggagagaaaccctacaaatgtgaagaatgtggcaaagcctttagtattttctcaacccttactaaacataagataattcacactgaagagaaatcccacagatgtgaagaatgtggcaaagcttataaggagtcttcacaccttactacacataaaagaattcatactggagagaaaccctacaaatgtgaagaatgtggcaaaacctttagtgtattctcaattcttactaaacataaaataattcatacagaagagaaaccctacaaatgtgaagaatgtggcaaagcttttaaacgatcttcaacccttactaaacataggataattcatactgaagagaaaccctacaaatgtgaagaatgtggcaaagcttttaaccaatcttcaacccttagtatacataaaataattcatactggagaaaaaccctacaaatgtgaagaatgtggcaaagcttttaaacgatcttcaacccttactatacataaaatgattcacactggagaaaaaccctacaaatgtgaagaatgtggcaaagcttttaatcggtcctcacaccttactacacataagagaattcatactggacacaaaccctacaaatgtaaagaatgtggcaaatcctttagtgtattctcaacccttactaaacacaagataattcatactgataagaaaccctacaaatgtgaagaatgtggcaaagcttttaaccgatcttcaatccttagtatacataagaaaattcatactggagaaaaaccctacaaatgtgaagaatgtggcaaagcttttaagcggtcctcacacctcgctgggcacaagcaaattcatagtgtacaaaaaccctacaaatgtgaagaatgtggcaaagcctttagtatattctcaacccttactaaacataagataattcatactgaagagaaaccctacaaatgtgaaaaatgtggcaaaactttctaccgattctcaaaccttaatacgcataagataattcatactggagagaaaccttgcaaatgtgaagaatgtggcaaagcttttaaccattcctcaaaccttattaaacataagctaattcatactggagacaaaccctacaaatgtgaagcatgtggcaaagcttttaggcggtcttcacatcttagtagacataagataattcatattggaattcatactgaagagactgtacaaaag

SEQ ID NO: 4606 - DNA, 309 bp, Homo sapiens
  source 1..309: mol_type = genomic DNA
atgccaggaccccctgaaagcctagacatggggccgttgacatttagggatgtggccatagaattctctctggaggagtggcaatgcctggacactgctcagcaggatttgtataggaaagtgatgttagagaactacagaaacctggtcttcttggcaggtattgctgtctctaagccagatctggtcacctgtctggagcaaggaaaagatccctggaatatgaagggacacagtacggtagtcaaacccccagtagagacggggtttcaccgttttagccaggatggtctctatctcctgacctcg

SEQ ID NO: 4607 - DNA, 2322 bp, Homo sapiens
  source 1..2322: mol_type = genomic DNA
atgccaggaccccctgaaagcctagacatggggccgttgacatttagggatgtggccatagaattctctctggaggagtggcaatgcctggacactgctcagcaggatttgtataggaaagtgatgttagagaactacagaaacctggtcttcttgggtattgctgtctctaagccagatctggtcacctgtctggagcaaggaaaagatccctggaatatgaagggacacagtacggtagtcaaacccccagttatatgttctcattttgctgaagacttttgcccagggccaggcattaaagattcttttcaaaaagtgatactgagagaatatgtaaaatgtggacataaggatttacagttaagaaaaggatgtaaaagtatgaatgagtgtaatgtgcacaaagaaggttataatgaactaaaccagtatttgacaactacccagagcaaaatatttcaatgtgataaatatgtgaaagtctttcataaacttttaaattcaaatagacataacacaaaacatactggaaagaaacctttcaaatgtaaaaaatgtggcaaatcattttgcatgcttttacacctatgtcagcataaaagaattcatattagagagaattcttaccgatgtgaagaatgtggcaaagcctttatctggttttcaacccttactagacacaggagagttcatactggagagaaatcctacaaatatgaatgtggcaaatcttttaaccaggactcaaaccttactacacataagagaattcatactggacagaaaccctacaaatgtgaagaatgtggcacatctttctaccaattctcataccttactaggcataagctaattcatactagagagaaaccctataaatgtgaacaatatggcaaaacttttaaccaatcttcaacccttactggacataagataattcataatggagaaaaaccctataaatgtgaagaatgtggcaaagcctttagtattttctcaacccctactaaacataagataattcacactgaagagaaatcccacagatgtgaagaatattgcaaagcttataaggagtcctcacaccttactacacataaaagaattcatactggagagaaaccctacaaatgtgaagaatgtggcaaagcctttagtattttctcaacccttactaaacataagataattcacactgaagagaaatcccacagatgtgaagaatgtggcaaagcttataaggagtcttcacaccttactacacataaaagaattcatactggagagaaaccctacaaatgtgaagaatgtggcaaaacctttagtgtattctcaattcttactaaacataaaataattcatacagaagagaaaccctacaaatgtgaagaatgtggcaaagcttttaaacgatcttcaacccttactaaacataggataattcatactgaagagaaaccctacaaatgtgaagaatgtggcaaagcttttaaccaatcttcaacccttagtatacataaaataattcatactggagaaaaaccctacaaatgtgaagaatgtggcaaagcttttaaacgatcttcaacccttactatacataaaatgattcacactggagaaaaaccctacaaatgtgaagaatgtggcaaagcttttaatcggtcctcacaccttactacacataagagaattcatactggacacaaaccctacaaatgtaaagaatgtggcaaatcctttagtgtattctcaacccttactaaacacaagataattcatactgataagaaaccctacaaatgtgaagaatgtggcaaagcttttaaccgatcttcaatccttagtatacataagaaaattcatactggagaaaaaccctacaaatgtgaagaatgtggcaaagcttttaagcggtcctcacacctcgctgggcacaagcaaattcatagtgtacaaaaaccctacaaatgtgaagaatgtggcaaagcctttagtatattctcaacccttactaaacataagataattcatactgaagagaaaccctacaaatgtgaaaaatgtggcaaaactttctaccgattctcaaaccttaatacgcataagataattcatactggagagaaaccttgcaaatgtgaagaatgtggcaaagcttttaaccattcctcaaaccttattaaacataagctaattcatactggagacaaaccctacaaatgtgaagcatgtggcaaagcttttaggcggtcttcacatcttagtagacataagataattcatattggaattcatactgaagagactgtacaaaag

SEQ ID NO: 4608 - DNA, 645 bp, Homo sapiens
  source 1..645: mol_type = genomic DNA
atgaacctcgtgggcagctacgcacaccatcaccaccatcaccacccgcaccctgcgcaccccatgctccacgaacccttcctcttcggtccggcctcgcgctgtcatcaggaaaggccctacttccagagctggctgctgagcccggctgacgctgccccggacttccctgcgggcgggccgccgcccgcggccgctgcagccgccaccgcctatggtcctgacgccaggcctgggcagagccccgggcggctggaggcgcttggcggccgtcttggccggcggaaaggctcaggacccaagaaggagcggagacgcactgagagcattaacagcgcattcgcggagttgcgcgagtgcatccccaacgtgccggccgacaccaagctctccaagatcaagactctgcgcctagccaccagctacatcgcctacctgatggacgtgctggccaaggatgcacagtctggcgatcccgaggccttcaaggctgaactcaagaaggcggatggcggccgtgagagcaagcggaaaagggagctgcagcagcacgaaggttttcctcctgccctgggcccagtcgagaagaggattaaaggacgcaccggctggccgcagcaagtctgggcgctggagttaaaccag

SEQ ID NO: 4609 - DNA, 651 bp, Homo sapiens
  source 1..651: mol_type = genomic DNA
atgagtctggtaggtggttttccccaccacccggtggtgcaccacgagggctacccgtttgccgccgccgccgccgcagctgccgccgccgccgccagccgctgcagccatgaggagaacccctacttccatggctggctcatcggccaccccgagatgtcgccccccgactacagcatggccctgtcctacagccccgagtatgccagcggcgccgccggcctggaccactcccattacgggggggtgccgccgggcgccgggcccccgggcctgggggggccgcgcccggtgaagcgccgaggcaccgccaaccgcaaggagcggcgcaggactcagagcatcaacagcgccttcgccgaactgcgcgagtgcatccccaacgtacccgccgacaccaaactctccaaaatcaagaccctgcgcctggccaccagctacatcgcctacctcatggacctgctggccaaggacgaccagaatggcgaggcggaggccttcaaggcagagatcaagaagaccgacgtgaaagaggagaagaggaagaaggagctgaacgaaatcttgaaaagcacagtgagcagcaacgacaagaaaaccaaaggccggacgggctggccgcagcacgtctgggccctggagctcaagcag

SEQ ID NO: 4610 - DNA, 219 bp, Homo sapiens
  source 1..219: mol_type = genomic DNA
atgtcgggacaccccggaagctgggaaatgaactcggttgcctttgaggatgtggctgtgaacttcacccaggaggagtgggctttgttggatccttcccagaagaatctctatagagacgtgatgcaggaaaccttcaggaatctggcttccataggaaacaaaggggaagaccagagcattgaagatcagtacaaaaattcttcaagaaatctaaga

SEQ ID NO: 4611 - DNA, 867 bp, Homo sapiens
  source 1..867: mol_type = genomic DNA
atgtcgggacaccccggaagctgggaaatgaactcggttgcctttgaggatgtggctgtgaacttcacccaggaggagtgggctttgttggatccttcccagaagaatctctatagagacgtgatgcaggaaaccttcaggaatctggcttccataggaaacaaaggggaagaccagagcattgaagatcagtacaaaaattcttcaagaaatctaagttcatttcagatacatcagagaaatcacactggagagaaaccctatgaatgtatggaatgtgggaaagccttaggtttttcccgttctcttaatagacataaaaggattcacactggagaaaaacgctatgaatgtaagcaatgtgggaaagccttcagtcgttccagtcaccttcgtgaccatgaaagaactcatactggagagaaaccctatgaatgtaagcactgtgggaaagccttccgttactccaattgccttcattaccatgaaagaactcacactggagagaaaccttatgtgtgcatggaatgtggcaaagctttcagttgtctcagttccttgcaaggacatataaaggctcatgctggtgaagaaccctatccatgtaagcaatgtgggaaagccttcagatacgccagttcccttcagaaacacgagaaaactcatattgcacagaaaccctatgtatgtaacaattgtggtaaaggcttcagatgttccagttcccttcgtgaccatgaaaggactcatactggagagaaaccctatgaatgtcagaaatgtggcaaagcctttagtcgtgctagtaccctttggaagcataaaaaaactcatactggagaaaagccctataaatgtaaaaaaatg

SEQ ID NO: 4612 - DNA, 231 bp, Homo sapiens
  source 1..231: mol_type = genomic DNA
atgtcgggacaccccggaagctgggaaatgaactcggttgcctttgaggatgtggctgtgaacttcacccaggaggagtgggctttgttggatccttcccagaagaatctctatagagacgtgatgcaggaaaccttcaggaatctggcttccataggaaacaaaggggaagaccagagcattgaagatcagtacaaaaattcttcaagaaatctaagatgtactggttca

SEQ ID NO: 4613 - DNA, 1053 bp, Homo sapiens
  source 1..1053: mol_type = genomic DNA
atgtcgggacaccccggaagctgggaaatgaactcggttgcctttgaggatgtggctgtgaacttcacccaggaggagtgggctttgttggatccttcccagaagaatctctatagagacgtgatgcaggaaaccttcaggaatctggcttccataggaaacaaaggggaagaccagagcattgaagatcagtacaaaaattcttcaagaaatctaaggcacatcatatctcattctggaaacaacccatatgggtgtgaggaatgcggaaagaagccatgtacatgtaaacaatgtcagaaaacttccctttctgtcacaagggttcacagagacacagtaatgcacactggaaatggacattatggttgtacaatatgtgagaaagtttttaatattcccagttcatttcagatacatcagagaaatcacactggagagaaaccctatgaatgtatggaatgtgggaaagccttaggtttttcccgttctcttaatagacataaaaggattcacactggagaaaaacgctatgaatgtaagcaatgtgggaaagccttcagtcgttccagtcaccttcgtgaccatgaaagaactcatactggagagaaaccctatgaatgtaagcactgtgggaaagccttccgttactccaattgccttcattaccatgaaagaactcacactggagagaaaccttatgtgtgcatggaatgtggcaaagctttcagttgtctcagttccttgcaaggacatataaaggctcatgctggtgaagaaccctatccatgtaagcaatgtgggaaagccttcagatacgccagttcccttcagaaacacgagaaaactcatattgcacagaaaccctatgtatgtaacaattgtggtaaaggcttcagatgttccagttcccttcgtgaccatgaaaggactcatactggagagaaaccctatgaatgtcagaaatgtggcaaagcctttagtcgtgctagtaccctttggaagcataaaaaaactcatactggagaaaagccctataaatgtaaaaaaatg

SEQ ID NO: 4614 - DNA, 1056 bp, Homo sapiens
  source 1..1056: mol_type = genomic DNA
atgccacgctccttcctggtgaagagcaagaaggctcacacctaccaccagccccgtgtgcaggaagatgaaccgctctggcctcctgcccttaccccggtgcccagagaccaggctccaagcaacagccctgtccttagcactctattcccaaaccagtgcctggactggaccaacctcaaacgagagccggagctggagcaggaccagaacttggccaggatggccccggcaccagagggccccattgtgctgtcccgaccccaggatggggactctccactgtccgactcacccccattctacaagcctagcttctcctgggacaccttggccacaacctatggccacagctaccggcaggccccctccaccatgcagtcagccttcctggagcactccgtcagcctgtacggcagtcctcttgtgcccagcactgagcccgccttggacttcagcctccgctactccccaggcatggatgcgtaccactgtgtgaagtgcaacaaggtcttctccacccctcacgggctcgaagtgcatgtgcgacgctcccatagtgggacccggcccttcgcctgtgacatctgcggcaaaaccttcggccacgctgtgagcctggagcagcacacgcacgtccactcccaggggatcccggccgggtccagtcctgagcctgcacctgaccccccggggcctcatttcctccggcaggagcgcagcttcgagtgccgcatgtgcggcaaggccttcaagcgctcgtccacgctgtccacccacctgctcatccactcagacacgcggccctacccctgccagttctgcggcaagcgtttccaccagaagtccgacatgaagaagcacacctacatccacacaggtgagaagccgcacaagtgccaggtgtgcggaaaggccttcagccagagctccaacctcatcacccacagccgcaagcacacaggcttcaagcccttcagctgtgagctgtgcaccaaaggcttccagcgcaaggtggacctgcggcggcaccgcgagagccagcacaatctcaag

SEQ ID NO: 4615 - DNA, 990 bp, Homo sapiens
  source 1..990: mol_type = genomic DNA
atgccacgctccttcctggtgaagagcaagaaggctcacacctaccaccagccccgtgtgcaggaagatgaaccgctctggcctcctgcccttaccccggtgcccagagaccaggctccaagcaacagccctgtccttagcactctattcccaaaccagtgcctggactggaccaacctcaaacgagagccggagctggagcaggaccagaacttggccaggatggccccggcaccagagggccccattgtgctgtcccgaccccaggatggggactctccactgtccgactcacccccattctacaagcctagcttctcctgggacaccttggccacaacctatggccacagctaccggcaggccccctccaccatgcagtcagccttcctggagcactccgtcagcctgtacggcagtcctcttgtgcccagcactgagcccgccttggacttcagcctccgctactccccaggcatggatgcgtaccactgtgtgaagtgcaacaaggtcttctccacccctcacgggctcgaagtgcatgtgcgacgctcccatagtgggacccggcccttcgcctgtgacatctgcggcaaaaccttcggccacgctgtgagcctggagcagcacacgcacgtccactcccaggagcgcagcttcgagtgccgcatgtgcggcaaggccttcaagcgctcgtccacgctgtccacccacctgctcatccactcagacacgcggccctacccctgccagttctgcggcaagcgtttccaccagaagtccgacatgaagaagcacacctacatccacacaggtgagaagccgcacaagtgccaggtgtgcggaaaggccttcagccagagctccaacctcatcacccacagccgcaagcacacaggcttcaagcccttcagctgtgagctgtgcaccaaaggcttccagcgcaaggtggacctgcggcggcaccgcgagagccagcacaatctcaag

SEQ ID NO: 4616 - DNA, 852 bp, Homo sapiens
  source 1..852: mol_type = genomic DNA
atgccacgctccttcctggtgaagagcaagaaggctcacacctaccaccagccccgtgtgcaggaagatgaaccgctctggcctcctgcccttaccccggtgcccagagaccaggctccaagcaacagccctgtccttagcactctattcccaaaccagtgcctggactggaccaacctcaaacgagagccggagctggagcaggaccagaacttggccaggatggccccggcaccagagggccccattgtgctgtcccgaccccaggatggggactctccactgtccgactcacccccattctacaagcctagcttctcctgggacaccttggccacaacctatggccacagctaccggcaggccccctccaccatgcagtcagccttcctggagcactccgtcagcctgtacggcagtcctcttgtgcccagcactgagcccgccttggacttcagcctccgctactccccaggcatggatgcgtaccactgtgtgaagtgcaacaaggagcgcagcttcgagtgccgcatgtgcggcaaggccttcaagcgctcgtccacgctgtccacccacctgctcatccactcagacacgcggccctacccctgccagttctgcggcaagcgtttccaccagaagtccgacatgaagaagcacacctacatccacacaggtgagaagccgcacaagtgccaggtgtgcggaaaggccttcagccagagctccaacctcatcacccacagccgcaagcacacaggcttcaagcccttcagctgtgagctgtgcaccaaaggcttccagcgcaaggtggacctgcggcggcaccgcgagagccagcacaatctcaag

SEQ ID NO: 4617 - DNA, 1170 bp, Homo sapiens
  source 1..1170: mol_type = genomic DNA
atggcagaaatccacaatggaggggaactctgtgactttatggaaaatggagaaatcttcagtgaacactcatgccttaatgcacacatgggaactgaaaatacaggggacacttatgactgtgatgagtatggagaaaactttcccatgttacacaacagtgcccctgctggagagacactttctgtgttgaatcagtgcagaaaagccttcagcctgccaccaaatgttcaccagagaacgtggataggagacaaatcctttgaatacagtgactgtgaggaagcctttgttgatcagtcacatcttcaggcaaataggataactcacaatggagaaacactctatgaacagaagcaatgtgggagagcttttacttactccacaagccatgctgtgtctgttaaaatgcatactgtagaaaaaccctacgaatgtaaggaatgtggaaaattctttagatattcttcatatcttaatagtcacatgcgaacccatactggggagaaaccctatgaatgtaaggaatgtgggaaatgcttcactgtttcttcacacctagttgaacatgtaagaattcatactggagagaaaccttatcaatgtaaggaatgtggaagagccttcgctgggcgctcaggccttactaaacatgtacgaatacacactggagagaagccctatgaatgtaacgaatgtgggaaagcctacaataggttttatctactaactgaacattttaaaactcacacagaggagaagccctttgaatgtaaggtatgtggaaaatccttcagaagctcttcatgccttaagaatcactttagaattcacactggaataaaaccctataaatgtaaggagtgtgggaaagcattcactgtttcctcaagcttacataatcatgtaaaaatccatactggagagaagccctatgaatgtaaggactgtgggaaagcctttgctacatcttcacaactcattgaacatataagaactcacactggagagaaaccgtatatatgtaaggaatgtgggaaaaccttccgtgcttcttcacatctacagaaacatgttagaattcacactggagagaaaccctatatatgtaacgaatgtgggaaagcctacaatagattttatttacttactaaacatttaaaaacacac

SEQ ID NO: 4618 - DNA, 822 bp, Homo sapiens
  source 1..822: mol_type = genomic DNA
atgttcccgtcttggccaacatgccttgaattggaacgctacctacagacggagccccggaggatctcagagacctttggtgaggacttggactgtttcctccacgcttcccctcccccgtgcattgaggaaagcttccgtcgcttagaccccctgctgctccccgtggaagcggccatctgtgagaagagctcggcagtggacatcttgctctctcgggacaagttgctatctgagacctgcctcagcctccagccggccagctcttctctagacagctacacagccgtcaaccaggcccagctcaacgcagtgacctcattaacgcccccatcgtcccctgagctcagccgccatctggtcaaaacctcacaaactctctctgccgtggatggcacggtgacgttgaaactggtggccaagaaggctgctctcagctccgtaaaggtgggaggggtcgcaacagctgcagcagccgtgacggctgcgggggccgttaagagtggacagagcgacagtgaccaaggagggctgggggctgaagcatgtcccgaaaacaagaagagggttcaccgctgtcagtttaacgggtgccggaaagtttatacaaaaagctcccacttaaaggcccaccagaggactcacacaggtgagaagccttataagtgctcatgggagggatgtgagtggcgttttgcacgaagcgatgagctcacgaggcactacaggaaacacacaggtgcaaagcccttcaaatgcaaccactgcgacaggtgtttttccaggtctgaccatcttgccctccacatgaagagacatatc

SEQ ID NO: 4619 - DNA, 906 bp, Homo sapiens
  source 1..906: mol_type = genomic DNA
atggacgtgttggctagttatagtatattccaggagctacaacttgtccacgacaccggctacttctcagctttaccatccctggaggagacctggcagcagacatgccttgaattggaacgctacctacagacggagccccggaggatctcagagacctttggtgaggacttggactgtttcctccacgcttcccctcccccgtgcattgaggaaagcttccgtcgcttagaccccctgctgctccccgtggaagcggccatctgtgagaagagctcggcagtggacatcttgctctctcgggacaagttgctatctgagacctgcctcagcctccagccggccagctcttctctagacagctacacagccgtcaaccaggcccagctcaacgcagtgacctcattaacgcccccatcgtcccctgagctcagccgccatctggtcaaaacctcacaaactctctctgccgtggatggcacggtgacgttgaaactggtggccaagaaggctgctctcagctccgtaaaggtgggaggggtcgcaacagctgcagcagccgtgacggctgcgggggccgttaagagtggacagagcgacagtgaccaaggagggctgggggctgaagcatgtcccgaaaacaagaagagggttcaccgctgtcagtttaacgggtgccggaaagtttatacaaaaagctcccacttaaaggcccaccagaggactcacacaggtgagaagccttataagtgctcatgggagggatgtgagtggcgttttgcacgaagcgatgagctcacgaggcactacaggaaacacacaggtgcaaagcccttcaaatgcaaccactgcgacaggtgtttttccaggtctgaccatcttgccctccacatgaagagacatatc

SEQ ID NO: 4620 - DNA, 807 bp, Homo sapiens
  source 1..807: mol_type = genomic DNA
atgacatgccttgaattggaacgctacctacagacggagccccggaggatctcagagacctttggtgaggacttggactgtttcctccacgcttcccctcccccgtgcattgaggaaagcttccgtcgcttagaccccctgctgctccccgtggaagcggccatctgtgagaagagctcggcagtggacatcttgctctctcgggacaagttgctatctgagacctgcctcagcctccagccggccagctcttctctagacagctacacagccgtcaaccaggcccagctcaacgcagtgacctcattaacgcccccatcgtcccctgagctcagccgccatctggtcaaaacctcacaaactctctctgccgtggatggcacggtgacgttgaaactggtggccaagaaggctgctctcagctccgtaaaggtgggaggggtcgcaacagctgcagcagccgtgacggctgcgggggccgttaagagtggacagagcgacagtgaccaaggagggctgggggctgaagcatgtcccgaaaacaagaagagggttcaccgctgtcagtttaacgggtgccggaaagtttatacaaaaagctcccacttaaaggcccaccagaggactcacacaggtgagaagccttataagtgctcatgggagggatgtgagtggcgttttgcacgaagcgatgagctcacgaggcactacaggaaacacacaggtgcaaagcccttcaaatgcaaccactgcgacaggtgtttttccaggtctgaccatcttgccctccacatgaagagacatatc

SEQ ID NO: 4621 - DNA, 849 bp, Homo sapiens
  source 1..849: mol_type = genomic DNA
atggacgtgctccccatgtgcagcatcttccaggagctccagatcgtgcacgagaccggctacttctcggcgctgccgtctctggaggagtactggcaacagacctgcctagagctggaacgttacctccagagcgagccctgctatgtttcagcctcagaaatcaaatttgacagccaggaagatctgtggaccaaaatcattctggctcgggagaaaaaggaggaatccgaactgaagatatcttccagtcctccagaggacactctcatcagcccgagcttttgttacaacttagagaccaacagcctgaactcagatgtcagcagcgaatcctctgacagctccgaggaactttctcccacggccaagtttacctccgaccccattggcgaagttttggtcagctcgggaaaattgagctcctctgtcacctccacgcctccatcttctccggaactgagcagggaaccttctcaactgtggggttgcgtgcccggggagctgccctcgccagggaaggtgcgcagcgggacttcggggaagccaggtgacaagggaaatggcgatgcctcccccgacggcaggaggagggtgcaccggtgccactttaacggctgcaggaaagtttacaccaaaagctcccacttgaaagcacaccagcggacgcacacaggagaaaagccttacagatgctcatgggaagggtgtgagtggcgttttgcaagaagtgatgagttaaccaggcacttccgaaagcacaccggggccaagccttttaaatgctcccactgtgacaggtgtttttccaggtctgaccacctggccctgcacatgaagaggcacctc

SEQ ID NO: 4622 - DNA, 711 bp, Homo sapiens
  source 1..711: mol_type = genomic DNA
atggacgtgctccccatgtgcagcatcttccaggagctccagatcgtgcacgagaccggctacttctcggcgctgccgtctctggaggagtactggcaacagacctgcctagagctggaacgttacctccagagcgagccctgctatgtttcagcctcagaaatcaaatttgacagccaggaagatctgtggaccaaaatcattctggctcgggagaaaaaggaggaatccgaactgaagatatcttccagtcctccagaggacactctcatcagcccgagcttttgttacaacttagagaccaacagcctgaactcagatgtcagcagcgaatcctctgacagctccgaggaactttctcccacggccaagtttacctccgaccccattggcgaagttttggtcagctcgggaaaattgagctcctctgtcacctccacgcctccatcttctccggaactgagcagggaaccttctcaactgtggggttgcgtgcccggggagctgccctcgccagggaaggtgcgcagcgggacttcggggaagccaggtgacaagggaaatggcgatgcctcccccgacggcaggaggagggtgcaccggtgccactttaacggctgcaggaaagtttacaccaaaagctcccacttgaaagcacaccagcggacgcacacaggtgtttttccaggtctgaccacctggccctgcaca

SEQ ID NO: 4623 - DNA, 1371 bp, Homo sapiens
  source 1..1371: mol_type = genomic DNA
atggctacaagggtgctgagcatgagcgcccgcctgggacccgtgccccagccgccggcgccgcaggacgagccggtgttcgcgcagctcaagccggtgctgggcgccgcgaatccggcccgcgacgcggcgctcttccccggcgaggagctgaagcacgcgcaccaccgcccgcaggcgcagcccgcgcccgcgcaggccccgcagccggcccagccgcccgccaccggcccgcggctgcctccagaggacctggtccagacaagatgtgaaatggagaagtatctgacacctcagcttcctccagttcctataattccagagcataaaaagtatagacgagacagtgcctcagtcgtagaccagttcttcactgacactgaagggttaccttacagtatcaacatgaacgtcttcctccctgacatcactcacctgagaactggcctctacaaatcccagagaccgtgcgtaacacacatcaagacagaacctgttgccattttcagccaccagagtgaaacgactgcccctcctccggccccgacccaggccctccctgagttcaccagtatattcagctcacaccagaccgcagctccagaggtgaacaatattttcatcaaacaagaacttcctacaccagatcttcatctttctgtccctacccagcagggccacctgtaccagctactgaatacaccggatctagatatgcccagttctacaaatcagacagcagcaatggacactcttaatgtttctatgtcagctgccatggcaggccttaacacacacacctctgctgttccgcagactgcagtgaaacaattccagggcatgcccccttgcacatacacaatgccaagtcagtttcttccacaacaggccacttactttcccccgtcaccaccaagctcagagcctggaagtccagatagacaagcagagatgctccagaatttaaccccacctccatcctatgctgctacaattgcttctaaactggcaattcacaatccaaatttacccaccaccctgccagttaactcacaaaacatccaacctgtcagatacaatagaaggagtaaccccgatttggagaaacgacgcatccactactgcgattaccctggttgcacaaaagtttataccaagtcttctcatttaaaagctcacctgaggactcacactggtgaaaagccatacaagtgtacctgggaaggctgcgactggaggttcgcgcgatcggatgagctgacccgccactaccggaagcacacaggcgccaagcccttccagtgcggggtgtgcaaccgcagcttctcgcgctctgaccacctggccctgcatatgaagaggcaccagaac

SEQ ID NO: 4624 - DNA, 1098 bp, Homo sapiens
  source 1..1098: mol_type = genomic DNA
atggagaagtatctgacacctcagcttcctccagttcctataattccagagcataaaaagtatagacgagacagtgcctcagtcgtagaccagttcttcactgacactgaagggttaccttacagtatcaacatgaacgtcttcctccctgacatcactcacctgagaactggcctctacaaatcccagagaccgtgcgtaacacacatcaagacagaacctgttgccattttcagccaccagagtgaaacgactgcccctcctccggccccgacccaggccctccctgagttcaccagtatattcagctcacaccagaccgcagctccagaggtgaacaatattttcatcaaacaagaacttcctacaccagatcttcatctttctgtccctacccagcagggccacctgtaccagctactgaatacaccggatctagatatgcccagttctacaaatcagacagcagcaatggacactcttaatgtttctatgtcagctgccatggcaggccttaacacacacacctctgctgttccgcagactgcagtgaaacaattccagggcatgcccccttgcacatacacaatgccaagtcagtttcttccacaacaggccacttactttcccccgtcaccaccaagctcagagcctggaagtccagatagacaagcagagatgctccagaatttaaccccacctccatcctatgctgctacaattgcttctaaactggcaattcacaatccaaatttacccaccaccctgccagttaactcacaaaacatccaacctgtcagatacaatagaaggagtaaccccgatttggagaaacgacgcatccactactgcgattaccctggttgcacaaaagtttataccaagtcttctcatttaaaagctcacctgaggactcacactggtgaaaagccatacaagtgtacctgggaaggctgcgactggaggttcgcgcgatcggatgagctgacccgccactaccggaagcacacaggcgccaagcccttccagtgcggggtgtgcaaccgcagcttctcgcgctctgaccacctggccctgcatatgaagaggcaccagaac

SEQ ID NO: 4625 - DNA, 1437 bp, Homo sapiens
  source 1..1437: mol_type = genomic DNA
atgaggcagccacctggcgagtctgacatggctgtcagcgacgcgctgctcccatctttctccacgttcgcgtctggcccggcgggaagggagaagacactgcgtcaagcaggtgccccgaataaccgctggcgggaggagctctcccacatgaagcgacttcccccagtgcttcccggccgcccctatgacctggcggcggcgaccgtggccacagacctggagagcggcggagccggtgcggcttgcggcggtagcaacctggcgcccctacctcggagagagaccgaggagttcaacgatctcctggacctggactttattctctccaattcgctgacccatcctccggagtcagtggccgccaccgtgtcctcgtcagcgtcagcctcctcttcgtcgtcgccgtcgagcagcggccctgccagcgcgccctccacctgcagcttcacctatccgatccgggccgggaacgacccgggcgtggcgccgggcggcacgggcggaggcctcctctatggcagggagtccgctccccctccgacggctcccttcaacctggcggacatcaacgacgtgagcccctcgggcggcttcgtggccgagctcctgcggccagaattggacccggtgtacattccgccgcagcagccgcagccgccaggtggcgggctgatgggcaagttcgtgctgaaggcgtcgctgagcgcccctggcagcgagtacggcagcccgtcggtcatcagcgtcagcaaaggcagccctgacggcagccacccggtggtggtggcgccctacaacggcgggccgccgcgcacgtgccccaagatcaagcaggaggcggtctcttcgtgcacccacttgggcgctggaccccctctcagcaatggccaccggccggctgcacacgacttccccctggggcggcagctccccagcaggactaccccgaccctgggtcttgaggaagtgctgagcagcagggactgtcaccctgccctgccgcttcctcccggcttccatccccacccggggcccaattacccatccttcctgcccgatcagatgcagccgcaagtcccgccgctccattaccaagagctcatgccacccggttcctgcatgccagaggagcccaagccaaagaggggaagacgatcgtggccccggaaaaggaccgccacccacacttgtgattacgcgggctgcggcaaaacctacacaaagagttcccatctcaaggcacacctgcgaacccacacaggtgagaaaccttaccactgtgactgggacggctgtggatggaaattcgcccgctcagatgaactgaccaggcactaccgtaaacacacggggcaccgcccgttccagtgccaaaaatgcgaccgagcattttccaggtcggaccacctcgccttacacatgaagaggcatttt

SEQ ID NO: 4626 - DNA, 2133 bp, Homo sapiens
  source 1..2133: mol_type = genomic DNA
atggaaagcggtgcagttctgctggaatccaaatcctccccatttaacctactgcatgagatgcatgagcttcgcctcctgggtcacctgtgtgacgtgacagtcagcgtggagtatcagggtgtccgcaaagacttcatggcccacaaggcagtgctggctgccaccagcaagttttttaaggaagtgttccttaatgagaagagtgtggatggtactaggactaatgtctacttaaatgaagtgcaggttgctgactttgcttcatttcttgagtttgtctacactgcaaaggtacaggtggaagaagatcgggtgcagcgaatgctggaagtggctgaaaagctgaaatgtttggatttatcagaaacttgttttcaattaaagaaacagatgttagagtcagtacttttggagttgcaaaatttctcagagtctcaggaggtggaggtgagcagtggctcccaagttagtgctgctcctgcccccagggcaagtgtggccaccgatggccctcaccccagtggtctcacggattccttggactacccaggagagagagccagcaatggcatgtcttcagatttgccaccgaagaagtccaaggacaaactagacaagaagaaagaggtagttaaacctccctaccctaaaatcaggagagctagtggaaggctggctgggaggaaggtctttgtggagatccctaaaaagaaatatacgagaagactccgagagcagcagaaaactgctgagggtgatgtgggggactacaggtgtccccaggaccaaagcccggacagggtgggcacggagatggagcaggtttccaaaaatgagggttgccaggcaggtgctgagttggaggaattgtcaaagaaagcagggccggaggaggaagaggaggaggaggaggaggacgaagaaggggagaagaagaagagcaactttaagtgcagcatttgcgagaaggcgtttctgtatgagaagagcttcctgaagcacagcaagcaccgccacggcgtggccaccgaggtggtgtaccgctgcgacacctgcggccagaccttcgccaaccgctgcaacctgaagagccaccagcgccacgtgcacagcagcgagcgccatttcccatgcgagctgtgcgggaagaagttcaagcgcaagaaggacgtgaagcggcacgtgctgcaggtgcatgagggcggcggcgagcggcaccgctgcggccagtgcggcaagggcctgagttccaagacagcgctgcggctgcacgagcgcacacacacgggagaccggccctacggctgcaccgagtgcggcgccaggttctcgcagccgtccgcgctcaagacgcacatgagaattcatacaggggaaaaaccttttgtctgtgatgaatgtggtgcaagattcactcagaaccacatgctgatttatcataaaaggtgtcacacaggtgaaagaccttttatgtgtgaaacatgtggcaagagttttgcttctaaggagtacttaaaacaccacaatagaatccatactggatccaaaccctttaaatgtgaagtatgtttcaggacttttgcccagcggaattcactgtaccagcatattaaagtccacacaggggagcgtccctactgctgtgaccagtgcggcaagcagttcacccagctcaacgccctccagcgccaccgccgcatccacacaggggagaggccattcatgtgcaatgcgtgcggacggacattcaccgacaagtccactcttcggcggcacacctcaatacacgataagaatactccatggaagtctttccttgtcattgtagatggctcgcccaagaacgatgacggacacaagactgaacagcctgacgaagagtatgtgtcatccaagctttcggataaattgctgtcttttgcagaaaatggccatttccacaacctggctgcagtccaagacactgtacctaccatgcaggagaacagttctgctgacacagcctgcaaggcagatgactccgtggtgtcccaggacaccctcctggccaccaccatcagtgagcttagcgagctgaccccacagacagactcgatgcccacacagcttcactctttgagcaacatggaa

SEQ ID NO: 4627 - DNA, 1065 bp, Homo sapiens
  source 1..1065: mol_type = genomic DNA
atggcgctgagtgaacccatcctgccgtccttctccactttcgccagcccgtgccgcgagcgcggcctgcaggagcgctggccgcgcgccgaacccgagtccggcggcaccgacgacgacctcaacagcgtgctggacttcatcctgtccatggggctggatggcctgggcgccgaggccgccccggagccgccgccgccgcccccgccgcctgcgttctattaccccgaacccggcgcgcccccgccctacagcgcccccgcgggtggcctggtgtctgagctgctgcgacccgagctggatgcgccgctggggcccgcactgcacggccgctttctgctggcgccgcccggccgcctggtcaaggccgagccccctgaagcggacggcggcggcggctacggctgcgcccccgggctgacccgtggaccgcgcggcctcaagcgcgagggcgccccgggcccggcggcttcgtgcatgcgaggtcccgggggccgccccccgccgccgcccgacacaccgccgctcagccccgacggccccgcgcgcctgcccgcgcccggtccgcgcgcctccttcccgccgcctttcggtggccctggtttcggcgcgcccgggcccggcctgcattacgcgccgcctgcgcccccagccttcggtctcttcgacgacgcggccgccgccgcggcagccctgggcctggcgccccccgccgcccgcggtctcctcacgccgcctgcgtccccgctggagctgctggaggccaagccaaagcgcggccgccgctcttggccccgcaaacgcaccgccactcacacctgcagctacgcgggctgcggcaagacctacaccaagagttcgcatctgaaggcgcatctgcgcacgcacacaggtgagaagccctaccactgcaactgggacggctgcggctggaagtttgcgcgctcagacgagctcacgcgccactaccgaaagcacacgggccaccggccattccagtgccatctgtgcgatcgtgccttctcgcgctccgatcacctggcgctgcacatgaaacggcacatg

SEQ ID NO: 4628 - DNA, 1086 bp, Homo sapiens
  source 1..1086: mol_type = genomic DNA
atggccacagccgagaccgccttgccctccatcagcacactgaccgccctgggccccttcccggacacacaggatgacttcctcaagtggtggcgctccgaagaggcgcaggacatgggcccgggtcctcctgaccccacggagccgcccctccacgtgaagtctgaggaccagcccggggaggaagaggacgatgagaggggcgcggacgccacctgggacctggatctcctcctcaccaacttctcgggcccggagcccggtggcgcgccccagacctgcgctctggcgcccagcgaggcctccggggcgcaatatccgccgccgcccgagactctgggcgcatatgctggcggcccggggctggtggctgggcttttgggttcggaggatcactcgggttgggtgcgccctgccctgcgagcccgggctcccgacgccttcgtgggcccagccctggctccagccccggcccccgagcccaaggcgctggcgctgcaaccggtgtacccggggcccggcgccggctcctcgggtggctacttcccgcggaccgggctttcagtgcctgcggcgtcgggcgccccctacgggctactgtccgggtaccccgcgatgtacccggcgcctcagtaccaagggcacttccagctcttccgcgggctccagggacccgcgcccggtcccgccacgtccccctccttcctgagttgtttgggacccgggacggtgggcactggactcggggggactgcagaggatccaggtgtgatagccgagaccgcgccatccaagcgaggccgacgttcgtgggcgcgcaagaggcaggcagcgcacacgtgcgcgcacccgggttgcggcaagagctacaccaagagctcccacctgaaggcgcatctgcgcacgcacacaggggagaagccatacgcctgcacgtgggaaggctgcggctggagattcgcgcgctcggacgagctgacccgccactaccggaaacacacggggcagcgccccttccgctgccagctctgcccacgtgctttttcgcgctctgaccacctggccttgcacatgaagcgccacctt

SEQ ID NO: 4629 - DNA, 732 bp, Homo sapiens
  source 1..732: mol_type = genomic DNA
atgtccgcggccgcctacatggacttcgtggctgcccagtgtctggtttccatttcgaaccgcgctgcggtgccggagcatggggtcgctccggacgccgagcggctgcgactacctgagcgcgaggtgaccaaggagcacggtgacccgggggacacctggaaggattactgcacactggtcaccatcgccaagagcttgttggacctgaacaagtaccgacccatccagaccccctccgtgtgcagcgacagtctggaaagtccagatgaggatatgggatccgacagcgacgtgaccaccgaatctgggtcgagtccttcccacagcccggaggagagacaggatcctggcagcgcgcccagcccgctctccctcctccatcctggagtggctgcgaaggggaaacacgcctccgaaaagaggcacaagtgcccctacagtggctgtgggaaagtctatggaaaatcctcccatctcaaagcccattacagagtgcatacaggtgaacggccctttccctgcacgtggccagactgccttaaaaagttctcccgctcagacgagctgacccgccactaccggacccacactggggaaaagcagttccgctgtccgctgtgtgagaagcgcttcatgaggagtgaccacctcacaaagcacgcccggcggcacaccgagttccaccccagcatgatcaagcgatcgaaaaaggcgctggccaacgctttg

SEQ ID NO: 4630 - DNA, 684 bp, Homo sapiens
  source 1..684: mol_type = genomic DNA
atggtcgatatggataaactcataaacaacttggaggtccaacttaattcagaaggtggctcaatgcaggtattcaagcaggtcactgcttctgttcggaacagagatccccctgagatagaatacagaagtaatatgacttctccaacactcctggatgccaaccccatggagaacccagcactgtttaatgacatcaagattgagcccccagaagaacttttggctagtgatttcagcctgccccaagtggaaccagttgacctctcctttcacaagcccaaggctcctctccagcctgctagcatgctacaagctccaatacgtccccccaagccacagtcttctccccagacccttgtggtgtccacgtcaacatctgacatgagcacttcagcaaacattcctactgttctgaccccaggctctgtcctgacctcctctcagagcactggtagccagcagatcttacatgtcattcacactatcccctcagtcagtctgccaaataagatgggtggcctgaagaccatcccagtggtagtgcagtctctgcccatggtgtatactactttgcctgcagatgggggccctgcagccattacagtcccactcattggaggagatggtaaaaatgctggatcaggagcacaaaggccaaggtggatgttctcacatctggac

SEQ ID NO: 4631 - DNA, 1077 bp, Homo sapiens
  source 1..1077: mol_type = genomic DNA
atggtcgatatggataaactcataaacaacttggaggtccaacttaattcagaaggtggctcaatgcaggtattcaagcaggtcactgcttctgttcggaacagagatccccctgagatagaatacagaagtaatatgacttctccaacactcctggatgccaaccccatggagaacccagcactgtttaatgacatcaagattgagcccccagaagaacttttggctagtgatttcagcctgccccaagtggaaccagttgacctctcctttcacaagcccaaggctcctctccagcctgctagcatgctacaagctccaatacgtccccccaagccacagtcttctccccagacccttgtggtgtccacgtcaacatctgacatgagcacttcagcaaacattcctactgttctgaccccaggctctgtcctgacctcctctcagagcactggtagccagcagatcttacatgtcattcacactatcccctcagtcagtctgccaaataagatgggtggcctgaagaccatcccagtggtagtgcagtctctgcccatggtgtatactactttgcctgcagatgggggccctgcagccattacagtcccactcattggaggagatggtaaaaatgctggatcagtgaaagttgaccccacctccatgtctccactggaaattccaagtgacagtgaggagagtacaattgagagtggatcctcagccttgcagagtctgcagggactacagcaagaaccagcagcaatggcccaaatgcagggagaagagtcgcttgacttgaagagaagacggattcaccaatgtgactttgcaggatgcagcaaagtgtacaccaaaagctctcacctgaaagctcaccgcagaatccatacaggagagaagccttataaatgcacctgggatggctgctcctggaaatttgctcgctcagatgagctcactcgccatttccgcaagcacacaggcatcaagccttttcggtgcacagactgcaaccgcagcttttctcgttctgaccacctgtccctgcatcgccgtcgccatgacaccatg

SEQ ID NO: 4632 - DNA, 756 bp, Homo sapiens
  source 1..756: mol_type = genomic DNA
atgagcctcccggaggacggcatgagttctggacacttcaggagtcctcagctagtgacatggtcggtcactgcttctgttcggaacagagatccccctgagatagaatacagaagtaatatgacttctccaacactcctggatgccaaccccatggagaacccagcactgtttaatgacatcaagattgagcccccagaagaacttttggctagtgatttcagcctgccccaagtggaaccagttgacctctcctttcacaagcccaaggctcctctccagcctgctagcatgctacaagctccaatacgtccccccaagccacagtcttctccccagacccttgtggtgtccacgtcaacatctgacatgagcacttcagcaaacattcctactgttctgaccccaggctctgtcctgacctcctctcagagcactggtagccagcagatcttacatgtcattcacactatcccctcagtcagtctgccaaataagatgggtggcctgaagaccatcccagtggtagtgcagtctctgcccatggtgtatactactttgcctgcagatgggggccctgcagccattacagtcccactcattggaggagatggtaaaaatgctggatcagtgaaagttgaccccacctccatgtctccactggaaattccaagtgacagtgaggagagtacaattgagagtggatcctcagccttgcagagtctgcagggactacagcaagagagagaagcctta

SEQ ID NO: 4633 - DNA, 771 bp, Homo sapiens
  source 1..771: mol_type = genomic DNA
atggtcgatatggataaactcataaacaacttggaggtccaacttaattcagaaggtggctcaatgcaggtattcaagcaggtcactgcttctgttcggaacagagatccccctgagatagaatacagaagtaatatgacttctccaacactcctggatgccaaccccatggagaacccagcactgtttaatgacatcaagattgagcccccagaagaacttttggctagtgatttcagcctgccccaagtggaaccagttgacctctcctttcacaagcccaaggctcctctccagcctgctagcatgctacaagctccaatacgtccccccaagccacagtcttctccccagacccttgtggtgtccacgtcaacatctgacatgagcacttcagcaaacattcctactgttctgaccccaggctctgtcctgacctcctctcagagcactggtagccagcagatcttacatgtcattcacactatcccctcagtcagtctgccaaataagatgggtggcctgaagaccatcccagtggtagtgcagtctctgcccatggtgtatactactttgcctgcagatgggggccctgcagccattacagtcccactcattggaggagatggtaaaaatgctggatcagtgaaagttgaccccacctccatgtctccactggaaattccaagtgacagtgaggagagtacaattgagagtggatcctcagccttgcagagtctgcagggactacagcaagagagagaagcctta

SEQ ID NO: 4634 - DNA, 1977 bp, Homo sapiens
  source 1..1977: mol_type = genomic DNA
atggcagcggcggtgctgatggaccgggttcagagttgtgtgaccttcgaggatgtgttcgtgtacttctctcgggaggagtgggaactccttgaggaggcacagagattcctgtaccgtgatgtgatgctggagaactttgcacttgtggctacactaggtttttggtgtgaagcagaacatgaggcaccttctgagcagagcgtttctgtagaaggagtgtcacaggtcaggactgctgagtcaggtcttttccagaaagcacacccatgtgagatgtgtgacccactcttgaaagacattttgcacctggctgaacaccagggatcacaccttacacagaaactgtgcacacgtgggctgtgtaggagaagattctcgttcagtgcaaacttttaccagcaccagaagcaacataatggagagaattgcttcagaggggatgatggaggggcctcatttgtgaagagctgtacagtccacatgttagggagatcctttacgtgcagggaggaagggatggacttaccagatagctctggccttttccagcaccagaccacttacaatagggtgagtccatgcagaaggactgaatgcatggagtctttcccacacagctccagtctcaggcaacaccaaggagactatgatggacagatgcttttcagttgcggtgatgaagggaaagccttcctggacacctttactcttcttgacagccagatgactcatgctgaggtgagacccttcagatgcctaccatgtggaaatgtgttcaaggagaaatcagctcttattaatcacagaaaaatccacagtggagaaatatctcatgtgtgtaaggagtgtggaaaagccttcattcacttgcaccacctaaaaatgcaccagaaatttcacactggaaaaagacactatacatgcagtgaatgtgggaaggccttcagccgcaaggacacacttgttcagcatcagagagttcacactggagaaagatcttatgactgcagtgaatgtggaaaagcctacagcagaagctcccaccttgttcagcaccagagaattcacacaggagaaaggccttataagtgcaacaaatgtgggaaagcctttagccgtaaagacacacttgttcagcaccagagatttcatactggagaaaggccttatgagtgcagtgaatgtggaaaattctttagccaaagctcccaccttattgagcactggagaattcataccggggcaaggccctatgaatgcatagaatgtggaaaattctttagccataactctagcctcattaaacatcggagagtccacacaggagcaagatcctacgtgtgcagcaaatgtgggaaggcctttggctgcaaagacacacttgttcagcaccagataattcacactggagcaaggccttatgagtgcagtgaatgtgggaaggccttcagccgtaaagacacacttgtgcaacaccaaaaaatccacactggagaaaggccttatgagtgtggtgaatgtggtaaattcttcagccatagctccaaccttattgtacaccagagaattcacactggagcaaagccttatgagtgcaatgaatgtgggaaatgctttagccacaactccagcctcattttgcaccagagagttcacacaggagcaaggccttatgtgtgcagtgaatgtgggaaggcttacattagtagctcccaccttgttcaacacaagaaagttcacactggagcaagaccttatgagtgcagtgaatgtgggaaattctttagccgcaactctggcctcattctgcaccagagggttcacactggagaaaagccttacgtatgcagcgaatgtgggaaagcctatagcagaagctcccatcttgttcgtcaccagaaagctcacactggagaaagagctcacgagtgcaacagttttggtggccctttagctgcatctcttaaacttgtt

SEQ ID NO: 4635 - DNA, 2118 bp, Homo sapiens
  source 1..2118: mol_type = genomic DNA
atggcagcggcggtgctgatggaccgggttcagagttgtgtgaccttcgaggatgtgttcgtgtacttctctcgggaggagtgggaactccttgaggaggcacagagattcctgtaccgtgatgtgatgctggagaactttgcacttgtggctacactagctttcattttcccagtcccatgcagttgcgcagttggagggggcagaaaaccttgggtgcctgacagggcagacatcactgcagccacagtaaaggagacctacagagggcatggccctgctgaatgggagctggaagagggtttttggtgtgaagcagaacatgaggcaccttctgagcagagcgtttctgtagaaggagtgtcacaggtcaggactgctgagtcaggtcttttccagaaagcacacccatgtgagatgtgtgacccactcttgaaagacattttgcacctggctgaacaccagggatcacaccttacacagaaactgtgcacacgtgggctgtgtaggagaagattctcgttcagtgcaaacttttaccagcaccagaagcaacataatggagagaattgcttcagaggggatgatggaggggcctcatttgtgaagagctgtacagtccacatgttagggagatcctttacgtgcagggaggaagggatggacttaccagatagctctggccttttccagcaccagaccacttacaatagggtgagtccatgcagaaggactgaatgcatggagtctttcccacacagctccagtctcaggcaacaccaaggagactatgatggacagatgcttttcagttgcggtgatgaagggaaagccttcctggacacctttactcttcttgacagccagatgactcatgctgaggtgagacccttcagatgcctaccatgtggaaatgtgttcaaggagaaatcagctcttattaatcacagaaaaatccacagtggagaaatatctcatgtgtgtaaggagtgtggaaaagccttcattcacttgcaccacctaaaaatgcaccagaaatttcacactggaaaaagacactatacatgcagtgaatgtgggaaggccttcagccgcaaggacacacttgttcagcatcagagagttcacactggagaaagatcttatgactgcagtgaatgtggaaaagcctacagcagaagctcccaccttgttcagcaccagagaattcacacaggagaaaggccttataagtgcaacaaatgtgggaaagcctttagccgtaaagacacacttgttcagcaccagagatttcatactggagaaaggccttatgagtgcagtgaatgtggaaaattctttagccaaagctcccaccttattgagcactggagaattcataccggggcaaggccctatgaatgcatagaatgtggaaaattctttagccataactctagcctcattaaacatcggagagtccacacaggagcaagatcctacgtgtgcagcaaatgtgggaaggcctttggctgcaaagacacacttgttcagcaccagataattcacactggagcaaggccttatgagtgcagtgaatgtgggaaggccttcagccgtaaagacacacttgtgcaacaccaaaaaatccacactggagaaaggccttatgagtgtggtgaatgtggtaaattcttcagccatagctccaaccttattgtacaccagagaattcacactggagcaaagccttatgagtgcaatgaatgtgggaaatgctttagccacaactccagcctcattttgcaccagagagttcacacaggagcaaggccttatgtgtgcagtgaatgtgggaaggcttacattagtagctcccaccttgttcaacacaagaaagttcacactggagcaagaccttatgagtgcagtgaatgtgggaaattctttagccgcaactctggcctcattctgcaccagagggttcacactggagaaaagccttacgtatgcagcgaatgtgggaaagcctatagcagaagctcccatcttgttcgtcaccagaaagctcacactggagaaagagctcacgagtgcaacagttttggtggccctttagctgcatctcttaaacttgtt

SEQ ID NO: 4636 - DNA, 1851 bp, Homo sapiens
  source 1..1851: mol_type = genomic DNA
atgctggagaactttgcacttgtggctacactaggtttttggtgtgaagcagaacatgaggcaccttctgagcagagcgtttctgtagaaggagtgtcacaggtcaggactgctgagtcaggtcttttccagaaagcacacccatgtgagatgtgtgacccactcttgaaagacattttgcacctggctgaacaccagggatcacaccttacacagaaactgtgcacacgtgggctgtgtaggagaagattctcgttcagtgcaaacttttaccagcaccagaagcaacataatggagagaattgcttcagaggggatgatggaggggcctcatttgtgaagagctgtacagtccacatgttagggagatcctttacgtgcagggaggaagggatggacttaccagatagctctggccttttccagcaccagaccacttacaatagggtgagtccatgcagaaggactgaatgcatggagtctttcccacacagctccagtctcaggcaacaccaaggagactatgatggacagatgcttttcagttgcggtgatgaagggaaagccttcctggacacctttactcttcttgacagccagatgactcatgctgaggtgagacccttcagatgcctaccatgtggaaatgtgttcaaggagaaatcagctcttattaatcacagaaaaatccacagtggagaaatatctcatgtgtgtaaggagtgtggaaaagccttcattcacttgcaccacctaaaaatgcaccagaaatttcacactggaaaaagacactatacatgcagtgaatgtgggaaggccttcagccgcaaggacacacttgttcagcatcagagagttcacactggagaaagatcttatgactgcagtgaatgtggaaaagcctacagcagaagctcccaccttgttcagcaccagagaattcacacaggagaaaggccttataagtgcaacaaatgtgggaaagcctttagccgtaaagacacacttgttcagcaccagagatttcatactggagaaaggccttatgagtgcagtgaatgtggaaaattctttagccaaagctcccaccttattgagcactggagaattcataccggggcaaggccctatgaatgcatagaatgtggaaaattctttagccataactctagcctcattaaacatcggagagtccacacaggagcaagatcctacgtgtgcagcaaatgtgggaaggcctttggctgcaaagacacacttgttcagcaccagataattcacactggagcaaggccttatgagtgcagtgaatgtgggaaggccttcagccgtaaagacacacttgtgcaacaccaaaaaatccacactggagaaaggccttatgagtgtggtgaatgtggtaaattcttcagccatagctccaaccttattgtacaccagagaattcacactggagcaaagccttatgagtgcaatgaatgtgggaaatgctttagccacaactccagcctcattttgcaccagagagttcacacaggagcaaggccttatgtgtgcagtgaatgtgggaaggcttacattagtagctcccaccttgttcaacacaagaaagttcacactggagcaagaccttatgagtgcagtgaatgtgggaaattctttagccgcaactctggcctcattctgcaccagagggttcacactggagaaaagccttacgtatgcagcgaatgtgggaaagcctatagcagaagctcccatcttgttcgtcaccagaaagctcacactggagaaagagctcacgagtgcaacagttttggtggccctttagctgcatctcttaaacttgtt

SEQ ID NO: 4637 - DNA, 396 bp, Homo sapiens
  source 1..396: mol_type = genomic DNA
atgtctcaggtgacatttagtgatgtggctatagacttctctcatgaagagtgggcatgcctagattctgctcagagggacttatacaaggatgtgatggtccagaattatgagaacctggtctctgtagcaggtctttccgtaactaagccatatgtgatcatgttattggaggatggaaaagagccctggatgatggagaaaaaactgtcaaaagcttacccatttcctttatcacactctgttcctgcttctgtgaactttggattctctgctctatttgagcattgttcagaagtcactgaaatatttgagttgtcagaactatgtgttttctgggtgcttcatttcttatccaattctcctaattccactgtagaagcttttttcaagaag

SEQ ID NO: 4638 - DNA, 393 bp, Homo sapiens
  source 1..393: mol_type = genomic DNA
atgtctcaggtgacatttagtgatgtggctatagacttctctcatgaagagtgggcatgcctagattctgctcagagggacttatacaaggatgtgatggtccagaattatgagaacctggtctctgtaggtctttccgtaactaagccatatgtgatcatgttattggaggatggaaaagagccctggatgatggagaaaaaactgtcaaaagcttacccatttcctttatcacactctgttcctgcttctgtgaactttggattctctgctctatttgagcattgttcagaagtcactgaaatatttgagttgtcagaactatgtgttttctgggtgcttcatttcttatccaattctcctaattccactgtagaagcttttttcaagaag

SEQ ID NO: 4639 - DNA, 1200 bp, Homo sapiens
  source 1..1200: mol_type = genomic DNA
atgtctcaggtgacatttagtgatgtggctatagacttctctcatgaagagtgggcatgcctagattctgctcagagggacttatacaaggatgtgatggtccagaattatgagaacctggtctctgtagcaggtctttccgtaactaagccatatgtgatcatgttattggaggatggaaaagagccctggatgatggagaaaaaactgtcaaaagattgggaatcaagatgggaaaacaaggaattatcaacaaagaaggatatttatgatgaagattcaccccaaccagtaacaatggaaaaagttgtaaaacaaagttatgaattttcaaattctaataagaatttggaatatacagaatgcgacacatttagaagcacctttcattcaaagtctactctttctgaaccacaaaacaattctgctgaagggaattcacacaaatatgatatattaaagaagaatttatcaaaaaagtcagttataaaaagtgagagaataaatggtggaaagaaacttttaaattctaataaaagtggggcagccttcaaccagagcaaatctcttacccttccccagacttgtaatagagagaaaatctatacatgcagtgaatgtgggaaagcctttggcaaacagtcaatcctcagtcgccactggagaattcatacaggagagaagccctatgaatgtcgtgaatgtgggaagacttttagccatggttcatcccttacacgacatcagataagccatagtggagagaaaccttacaaatgcattgaatgtgggaaggcctttagccatggctcatcacttactaaccatcagagcactcacacgggagagaaaccgtatgaatgtatgaactgtggaaagtcttttagtcgtgtgtcccttctcattcagcatctaagaattcatacgcaagaaaaacgctatgagtgtcgtatatgtggaaaggccttcattcatagttcgtctctcattcaccatcagaaaagccatactggagagaagccttatgaatgtagagaatgtgggaaagctttctgctgtagctcacaccttactcaacatcaaagaattcacagtatgaagaaaaaatatgaatgcaacaaatgtctcaaggtctttagtagcttctcatttcttgttcaacatcagagtattcatactgaagaaaaaccgtttgaagtt

SEQ ID NO: 4640 - DNA, 1329 bp, Homo sapiens
  source 1..1329: mol_type = genomic DNA
atgtctcagcgtcagtacccagagtgttacctggcaccaaatggatgcttagtaagtaattgtggagtgaataagatgagtaatgaagaactggtggggcagaatcatggcatggaaggtgaagcttgcacaggaggggatgtgacatttagtgatgtggctatagacttctctcatgaagagtgggcatgcctagattctgctcagagggacttatacaaggatgtgatggtccagaattatgagaacctggtctctgtaggtctttccgtaactaagccatatgtgatcatgttattggaggatggaaaagagccctggatgatggagaaaaaactgtcaaaagattgggaatcaagatgggaaaacaaggaattatcaacaaagaaggatatttatgatgaagattcaccccaaccagtaacaatggaaaaagttgtaaaacaaagttatgaattttcaaattctaataagaatttggaatatacagaatgcgacacatttagaagcacctttcattcaaagtctactctttctgaaccacaaaacaattctgctgaagggaattcacacaaatatgatatattaaagaagaatttatcaaaaaagtcagttataaaaagtgagagaataaatggtggaaagaaacttttaaattctaataaaagtggggcagccttcaaccagagcaaatctcttacccttccccagacttgtaatagagagaaaatctatacatgcagtgaatgtgggaaagcctttggcaaacagtcaatcctcagtcgccactggagaattcatacaggagagaagccctatgaatgtcgtgaatgtgggaagacttttagccatggttcatcccttacacgacatcagataagccatagtggagagaaaccttacaaatgcattgaatgtgggaaggcctttagccatggctcatcacttactaaccatcagagcactcacacgggagagaaaccgtatgaatgtatgaactgtggaaagtcttttagtcgtgtgtcccttctcattcagcatctaagaattcatacgcaagaaaaacgctatgagtgtcgtatatgtggaaaggccttcattcatagttcgtctctcattcaccatcagaaaagccatactggagagaagccttatgaatgtagagaatgtgggaaagctttctgctgtagctcacaccttactcaacatcaaagaattcacagtatgaagaaaaaatatgaatgcaacaaatgtctcaaggtctttagtagcttctcatttcttgttcaacatcagagtattcatactgaagaaaaaccgtttgaagtt

SEQ ID NO: 4641 - DNA, 3291 bp, Homo sapiens
  source 1..3291: mol_type = genomic DNA
atggccacccaggtaatggggcagtcttctggaggaggagggctgtttaccagcagtggcaacattggaatggccctgcctaacgacatgtatgacttgcatgacctttccaaagctgaactggccgcacctcagcttattatgctggcaaatgtggccttaactggggaagtaaatggcagctgctgtgattacctggtcggtgaagaaagacagatggcagaactgatgccggttggggataacaacttttcagatagtgaagaaggagaaggacttgaagagtctgctgatataaaaggtgaacctcatggactggaaaacatggaactgagaagtttggaactcagcgtcgtagaacctcagcctgtatttgaggcatcaggtgctccagatatttacagttcaaataaagatcttccccctgaaacacctggagcggaggacaaaggcaagagctcgaagaccaaaccctttcgctgtaagccatgccaatatgaagcagaatctgaagaacagtttgtgcatcacatcagagttcacagtgctaagaaattttttgtggaagagagtgcagagaagcaggcaaaagccagggaatctggctcttccactgcagaagagggagatttctccaagggccccattcgctgtgaccgctgcggctacaatactaatcgatatgatcactatacagcacacctgaaacaccacaccagagctggggataatgagcgagtctacaagtgtatcatttgcacatacacaacagtgagcgagtatcactggaggaaacatttaagaaaccattttccaaggaaagtatacacatgtggaaaatgcaactatttttcagacagaaaaaacaattatgttcagcatgttagaactcatacaggagaacgcccatataaatgtgaactttgtccttactcaagttctcagaagactcatctaactagacatatgcgtactcattcaggtgagaagccatttaaatgtgatcagtgcagttatgtggcctctaatcaacatgaagtaacccgccatgcaagacaggttcacaatgggcctaaacctcttaattgcccacactgtgattacaaaacagcagatagaagcaacttcaaaaaacatgtagagctacatgtgaacccacggcagttcaattgccctgtatgtgactatgcagcttccaagaagtgtaatctacagtatcacttcaaatctaagcatcctacttgtcctaataaaacaatggatgtctcaaaagtgaaactaaagaaaaccaaaaaacgagaggctgacttgcctgataatattaccaatgaaaaaacagaaatagaacaaacaaaaataaaaggggatgtggctggaaagaaaaatgaaaagtccgtcaaagcagagaaaagagatgtctcaaaagagaaaaagccttctaataatgtgtcagtgatccaggtgactaccagaactcgaaaatcagtaacagaggtgaaagagatggatgtgcatacaggaagcaattcagaaaaattcagtaaaactaagaaaagcaaaaggaagctggaagttgacagccattctttacatggtcctgtgaatgatgaggaatcttcaacaaaaaagaaaaagaaggtagaaagcaaatccaaaaataatagtcaggaagtgccaaagggtgacagcaaagtggaggagaataaaaagcaaaatacttgcatgaaaaaaagtacaaagaagaaaactctgaaaaataaatcaagtaagaaaagcagtaagcctcctcagaaggaacctgttgagaagggatctgctcagatggaccctcctcagatggggcctgctcccacagaggcggttcagaaggggcccgttcaggtggagccgccacctcccatggagcatgctcagatggagggtgcccagatacggcctgctcctgacgagcctgttcagatggaggtggttcaggaggggcctgctcagaaggagctgctgcctcccgtggagcctgctcagatggtgggtgcccaaattgtacttgctcacatggagctgcctcctcccatggagactgctcagacggaggttgcccaaatggggcctgctcccatggaacctgctcagatggaggttgcccaggtagaatctgctcccatgcaggtggtccagaaggagcctgttcagatggagctgtctcctcccatggaggtggtccagaaggagcctgttcagatagagctgtctcctcccatggaggtggtccagaaggaacctgttaagatagagctgtctcctcccatagaggtggtccagaaggagcctgttcagatggagttgtctcctcccatgggggtggttcagaaggagcctgctcagagggagccacctcctcccagagagcctccccttcacatggagccaatttccaaaaagcctcctctccgaaaagataaaaaggaaaagtctaacatgcagagtgaaagggcacggaaggagcaagtccttattgaagttggcttagtgcctgttaaagatagctggcttctaaaggaaagtgtaagcacagaggatctctcaccaccatcaccaccactgccaaaggaaaatttaagagaagaggcatcaggagaccaaaaattactcaacacaggtgaaggaaataaagaagcccctcttcagaaagtaggagcagaagaggcagatgagagcctacctggtcttgctgctaatatcaacgaatctacccatatttcatcctctggacaaaacttgaatacgccagagggtgaaactttaaatggtaaacatcagactgacagtatagtttgtgaaatgaaaatggacactgatcagaacacaagagagaatctcactggtataaattcaacagttgaagaaccagtttcaccaatgcttcccccttcagcagtagaagaacgtgaagcagtgtccaaaactgcactggcatcacctcctgctacaatggcagcaaatgagtctcaggaaattgatgaagatgaaggcatccacagccatgaaggaagtgacctaagtgacaacatgtcagagggtagtgatgattctggattgcatggggctcggccagttccacaagaatctagcagaaaaaatgcaaaggaagccttggcagtcaaagcggctaagggagattttgtttgtatcttctgtgatcgttctttcagaaagggaaaagattacagcaaacacctcaatcgccatttggttaatgtgtactatcttgaagaagcagctcaagggcaggag

SEQ ID NO: 4642 - DNA, 1704 bp, Homo sapiens
  source 1..1704: mol_type = genomic DNA
atgctggagaactacagccacctggtctcaatggggtatccagtttccaaaccagatgtcatctccaagttggaacaaggagaagagccatggatcataaagggagacatatcaaattggatctatccagatgaatatcaggcagatgggagacaagacaggaagagtaaccttcacaactcccagtcatgtattttggggacagtttccttccatcataagatactgaaaggagtcacaagggatggttcattgtgctccattttaaaagtctgtcaaggtgatggtcagctgcagagatttctagagaatcaagacaaactcttcaggcaggtcacatttgttaacagcaaaacagtgactgaggcatcagggcataaatataatccactggggaaaatatttcaagagtgcatagaaacagatatatcaatacagagattccataaatatgatgcttttaaaaagaacttaaaaccaaatattgacctaccgagttgttataagagcaattcaagaaaaaaacctgatcagagttttggaggtggaaaatcatctagccagagtgagcccaattctaatcttgagaagattcacaatggagtaataccttttgatgataatcagtgtggaaacgtttttagaaatacacaatcccttattcaatatcagaatgtggaaactaaagagaaaagctgtgtatgtgttacatgtggaaaagcctttgctaagaagtcacaactcattgtacatcaaagaattcatactggaaagaaaccatatgattgtggtgcatgcggaaaagccttcagtgagaagtttcatcttgttgtacatcagagaactcatactggggagaaaccttatgattgttctgaatgtggaaaagccttctctcagaaatcgtcccttattatacatcagagagttcacactggggaaaaaccctatgaatgtagtgaatgcgggaaagccttctcccagaaatcacccctcattatacatcagagaatacatactggggaaaaaccctatgaatgtagagagtgtgggaaggccttttcccagaagtcacagctgattatacaccacagagctcatactggagagaagccgtatgagtgtaccgaatgtgggaaagccttctgtgagaagtcccacctcattatacataaaagaattcacactggtgagaaaccctacaaatgtgctcaatgtgaggaagccttcagcaggaagacagaactcattacacatcagttagttcatactggggaaaaaccttatgaatgtactgaatgtggaaagacattctcccgcaagtcacagctcatcatacatcagagaacacatactggagaaaaaccctataaatgtagtgaatgtggcaaagccttctgccagaagtcacatctcattggacatcagagaattcacacaggagaaaaaccttatatatgtactgaatgtgggaaagccttctctcagaagtcccaccttccgggacaccagcgaattcatacaggagagaaaccttacatatgtgctgaatgtggaaaggccttttctcagaagtcagaccttgttttacatcagaggattcatactggggaaagaccctatcaatgtgctatatgtgggaaggccttcatccagaagtcacaactaactgtacaccagagaattcacacagtggtaaaatca

SEQ ID NO: 4643 - DNA, 1860 bp, Homo sapiens
  source 1..1860: mol_type = genomic DNA
atggtgcctgctgagacttcttcatctggccttttggaagagcaaaaaatgatgaagtcccaggggttagtatcattcaaggatgtggctgtggatttcacccaggaggagtggcagcaacttgacccttctcagaggaccctgtacagggatgtgatgctggagaactacagccacctggtctcaatggggtatccagtttccaaaccagatgtcatctccaagttggaacaaggagaagagccatggatcataaagggagacatatcaaattggatctatccagatgaatatcaggcagatgggagacaagacaggaagagtaaccttcacaactcccagtcatgtattttggggacagtttccttccatcataagatactgaaaggagtcacaagggatggttcattgtgctccattttaaaagtctgtcaaggtgatggtcagctgcagagatttctagagaatcaagacaaactcttcaggcaggtcacatttgttaacagcaaaacagtgactgaggcatcagggcataaatataatccactggggaaaatatttcaagagtgcatagaaacagatatatcaatacagagattccataaatatgatgcttttaaaaagaacttaaaaccaaatattgacctaccgagttgttataagagcaattcaagaaaaaaacctgatcagagttttggaggtggaaaatcatctagccagagtgagcccaattctaatcttgagaagattcacaatggagtaataccttttgatgataatcagtgtggaaacgtttttagaaatacacaatcccttattcaatatcagaatgtggaaactaaagagaaaagctgtgtatgtgttacatgtggaaaagcctttgctaagaagtcacaactcattgtacatcaaagaattcatactggaaagaaaccatatgattgtggtgcatgcggaaaagccttcagtgagaagtttcatcttgttgtacatcagagaactcatactggggagaaaccttatgattgttctgaatgtggaaaagccttctctcagaaatcgtcccttattatacatcagagagttcacactggggaaaaaccctatgaatgtagtgaatgcgggaaagccttctcccagaaatcacccctcattatacatcagagaatacatactggggaaaaaccctatgaatgtagagagtgtgggaaggccttttcccagaagtcacagctgattatacaccacagagctcatactggagagaagccgtatgagtgtaccgaatgtgggaaagccttctgtgagaagtcccacctcattatacataaaagaattcacactggtgagaaaccctacaaatgtgctcaatgtgaggaagccttcagcaggaagacagaactcattacacatcagttagttcatactggggaaaaaccttatgaatgtactgaatgtggaaagacattctcccgcaagtcacagctcatcatacatcagagaacacatactggagaaaaaccctataaatgtagtgaatgtggcaaagccttctgccagaagtcacatctcattggacatcagagaattcacacaggagaaaaaccttatatatgtactgaatgtgggaaagccttctctcagaagtcccaccttccgggacaccagcgaattcatacaggagagaaaccttacatatgtgctgaatgtggaaaggccttttctcagaagtcagaccttgttttacatcagaggattcatactggggaaagaccctatcaatgtgctatatgtgggaaggccttcatccagaagtcacaactaactgtacaccagagaattcacacagtggtaaaatca

SEQ ID NO: 4644 - DNA, 951 bp, Homo sapiens
  source 1..951: mol_type = genomic DNA
atgagttgccaagcttttacttcggctgatacctttatacctctgaattctgacgcctctgcaactctgcctctgataatgcatcacagtgctgccgagtgtctaccagtctccaaccatgccaccaatgtgatgtctacagtcccatctattttgtctttgatccaaactcctaaatgtttgtgcacacatttctcggtgacaacgttgggaaacacagcaacaggacttcattattctgttccttcctgtcattatggaaaccagccatcaacctatggagtgatggcaggtagtttaaccccttgtctttataaatttcctgaccacaccttgagtcatggatttcctcctatacaccagcctcttctggcagaggaccccacagctgctgatttcaagcaggaactcaggcggaaaagtaaattggtggaagagccaatagacatggattctccagaaatcagagaacttgaaaagtttgccaatgaatttaaagtgagacgaattaaattaggatacacccagacaaatgttggggaggccctggcagctgtgcatggctctgaattcagtcaaacaacaatctgccgatttgaaaatctgcagctcagctttaaaaatgcatgcaaactgaaagcaatattatccaaatggctggaggaagctgagcaagtaggagctttgtacaatgaaaaagtgggagcaaatgaaaggaaaagaaaacgaagaacaactataagcattgctgctaaagatgctctggagagacactttggagaacagaataaaccttcttctcaagagatcatgaggatggctgaagaactgaatctggagaaagaagtagtaagagtttggttttgcaaccggaggcagagagaaaaacgggtgaaaacaagtctgaatcagagtttattttctatttctaaggaacatcttgagtgcaga

SEQ ID NO: 4645 - DNA, 873 bp, Homo sapiens
  source 1..873: mol_type = genomic DNA
atgagttgccaagcttttacttcggctgatacctttatacctctgaattctgacgcctctgcaactctgcctctgataatgcatcacagtgctgccgagtgtctaccagtctccaaccatgccaccaatgtgatgtctacagcaacaggacttcattattctgttccttcctgtcattatggaaaccagccatcaacctatggagtgatggcaggtagtttaaccccttgtctttataaatttcctgaccacaccttgagtcatggatttcctcctatacaccagcctcttctggcagaggaccccacagctgctgatttcaagcaggaactcaggcggaaaagtaaattggtggaagagccaatagacatggattctccagaaatcagagaacttgaaaagtttgccaatgaatttaaagtgagacgaattaaattaggatacacccagacaaatgttggggaggccctggcagctgtgcatggctctgaattcagtcaaacaacaatctgccgatttgaaaatctgcagctcagctttaaaaatgcatgcaaactgaaagcaatattatccaaatggctggaggaagctgagcaagtaggagctttgtacaatgaaaaagtgggagcaaatgaaaggaaaagaaaacgaagaacaactataagcattgctgctaaagatgctctggagagacactttggagaacagaataaaccttcttctcaagagatcatgaggatggctgaagaactgaatctggagaaagaagtagtaagagtttggttttgcaaccggaggcagagagaaaaacgggtgaaaacaagtctgaatcagagtttattttctatttctaaggaacatcttgagtgcaga

SEQ ID NO: 4646 - DNA, 1659 bp, Homo sapiens
  source 1..1659: mol_type = genomic DNA
atggactcagtggcctctgaggatgtggctgtgaacttcacacttgaggagtgggctttgctggatccttcccagaagaaactctacagagatgtgatgcgggaaacctttagaaacctggcctgtgtaggaaaaaaatgggaagaccagagcattgaagattggtacaaaaatcaggggagaattttaagaaatcatatggaagagggactcagtgaaagtaaagaatatgatcaatgtggagaagccttcagtcagattctcaatcttaatctgaacaagaaaattcctactatagtaagaccatgtgaatgtagtttgtgtgggaaagtcttcatgcatcattcatcccttagtaggcacatcagatctcaccttggacacaaaccatatgactatcaggaatatggagagaaaccatataaatgtaagcagtgtgggaaagccttcagttcttgtcaatcctttcgaagacatgaaagaactcacactggtgagaaaccctatgcatgtccggaatgtgggaaagccttcatttctctcccaagtgttcgaagacacatgattaagcacactggagatggaccatataaatgtcaggaatgtgggaaagcctttgatcgcccaagtttatttcagatacatgaaagaactcacactggagagaaaccctatgaatgtcaggaatgtgcaaaagctttcatttctcttccaagttttcaaagacacatgattaggcacactggagatggaccttataaatgtcaggaatgtggaaaagcctttgaccgccccagtttatttcgaatacatgaaagaactcatactggagagaaaccccatgaatgtaaacagtgtgggaaggccttcatttctttcacaaattttcaaagtcatatgattaggcacactggggatggaccttataaatgtaaagtatgtgggagagcctttatttttcccagttatgttcgaaagcatgaaagaactcatactggggagaaaccctatgaatgtaataaatgtggtaaaaccttcagttcttccagtaatgttcgaacacatgaaaggactcacactggagagaagccctatgaatgtaaggaatgcgggaaagccttcatttctctcccaagtgtccgaagacacatgataaagcacactggagatggaccttataaatgtcaggtatgtggtagagcctttgactgtcccagttcatttcaaatacacgaaagaactcacactggagagaaaccctatgaatgtcaggtatgtgggaaagccttcatttctcttaaaaggattagaaaacatatgatactgcacactggagatggaccttataaatgtcaggtatgtggtaaagcctttgactgtcctagttctgtccgaacacatgaaagaactcatactggagaaaaaccctatgaatgtaaagaatgtgggaaagcattcaattatgccagttccattagaatacatgaaagaactcataccggagaaaaaccctatgaatgtaagcaatgtggaaaaacgttcagttattccagttcctttcaaagacatgaaagagctcataatggagataaaccttacgtaaagaatgtgggaaagctttcatttatcacacaaccttcgaatacctgtgaaaatgaa

SEQ ID NO: 4647 - DNA, 2061 bp, Homo sapiens
  source 1..2061: mol_type = genomic DNA
atggaagcacgttctatgctggttccaccccaggcatctgtgtgcttcgaggatgtggctatggcattcacacaggaggagtgggaacagctggacctggcccagaggacactgtaccgagaggtgacactggagacctgggagcatattgtctccctggactggaaagctacccttgaggagaataggttgaattctgaaaaagatcgagctagggaagaactatcccaccacgtggaagtgtacaggagtggaccggaggagccaccctctttggtattaggaaaagtgcaagatcagagcaaccagttaagggaacaccaggagaactccttgaggttcatggtactcacctcagagagactgtttgctcaaagggaacattgtgagcttgaacttgggggaggttattctctaccttctactttaagccttctacctacaacattacctacaagtacaggtttccctaagcccaactcacaagttaaagagttgaaacaaaattcagctttcattaatcatgagaaaaatggagcagatgggaagcactgtgagagtcatcagtgtgctagagctttctgtcagagtatttacttgagtaaacttggaaacgttgaaacaggaaagaaaaacccttatgaatatattgtcagtggtgactctctcaactatggttcctccctttgttttcatggtagaactttttcagtgaagaaaagtgatgactgtaaggattatggaaacctcttcagtcacagtgtgtctctgaatgaacagaagccagtgcattttgggaaaagtcagtatgagtgtgatgagtgcagggaaacctgttctgagagtctgtgccttgtacaaacagaaagaagtggccctggagagacccccttcagatgtgaggaacgctgtgctgccttccccatggcctcatctttttctgactgtaacatcattcagactacagagaagccatctgtgtgtaatcagtgtggaaaatctttcagctgttgtaagctcatacaccagagaacacacactggagaaaagcccttcgaatgtactcagtgtgggaaatcttttagccagagctatgaccttgtcatacatcagaggacacacactggagagaagccctatgagtgtgacctgtgtgggaaatccttcacccagagatccaaacttattacacatcagcgaattcacactggagaaaaaccgtatcagtgtattgaatgcagaaaatccttcaggtggaactctaacctcattgtacatcagagaattcatactggagagaaaccgtatgagtgcactcactgtggaaagtccttcagccaaagctatgagttagttacacataaaagaacgcacactggagaaaaacccttcaaatgtactcagtgtgggaaatctttcagccagaagtatgaccttgttgtacatcagaggacacacactggagagaagccctatgagtgcaacctgtgtgggaaatccttctcccagagttccaaacttattacgcatcagcgaattcacactggagaaaaaccgtatcagtgtattgaatgtgggaaatccttcagatggaactctaacctcgtcatacatcagagaattcatactggagagaaaccgtacgattgcactcactgtggaaagtccttcagccaaagctatcagttagttgcacataaaagaactcacactggagaaaagccctatgaatgtaacgagtgtggaaaagccttcaatcgaagcactcagctcatcaggcatctgcaaattcacactggggagaagccgtacaaatgcaatcagtgcaataaagcctttgcaaggagctcctaccttgtgatgcatcagagaactcacactggtgagaaaccttttgagtgtagtcagtgtgggaaagccttttcagggagctctaaccttctttcccatcacagaattcattctggagagaaaccctatgaatgtagtgactgtgggaaatccttccggcagcaatctcaacttgtagtgcatcggcggacacatactggagagaaacct

SEQ ID NO: 4648 - DNA, 225 bp, Homo sapiens
  source 1..225: mol_type = genomic DNA
atggaagcacgttctatgctggttccaccccaggcatctgtgtgcttcgaggatgtggctatggcattcacacaggaggagtgggaacagctggacctggcccagaggacactgtaccgagaggtgacactggagacctgggagcatattgtctccctggctggagcaagaagaggacctgtgcagggcagagcaggaggccccccgagactggaaagctaccct

SEQ ID NO: 4649 - DNA, 291 bp, Homo sapiens
  source 1..291: mol_type = genomic DNA
atggaagcacgttctatgctggttccaccccaggcatctgtgtgcttcgaggatgtggctatggcattcacacaggaggagtgggaacagctggacctggcccagaggacactgtaccgagaggtgacactggagacctgggagcatattgtctccctggggcttttcctttccaaatctgatgtgatctctcagctggagcaagaagaggacctgtgcagggcagagcaggaggccccccgaggaacgaggcccagcaaaaagcagagacggtacagggccagaaggatc

SEQ ID NO: 4650 - DNA, 1206 bp, Homo sapiens
  source 1..1206: mol_type = genomic DNA
atggcagaaatgaaccctgcacagggtcatgtggtttttgaagacgtggccatatatttctcccaggaggagtgggggcatctcgatgaggctcagagattgctgtaccgtgatgtgatgctggagaatttggcccttttgtcctcactaggttgttgccatggagctgaggatgaggaggcacctttagagccaggtgtttctgtaggagtgtcacaggtcatggctccaaagccctgtctatctacccagaatacccagccctgtgagacatgtagctcacttctgaaggacattctgcgtctggctgagcatgacggaacacaccccgagcagggactgtacacgtgtccagcacatcttcaccagcaccaaaaggagcagattagagagaaactttctagaggggatggaggaagaccgacatttgtgaagaaccacagagttcacatggcagggaagaccttcttgtgcagtgaatgtgggaaagcctttagccacaaacataaactttctgaccatcagaaaatccacactggagaaagaacttataagtgcagcaaatgtgggatattgtttatggaaaggtccacactcaatagacatcagagaactcacactggagaaaggccttatgagtgcaatgaatgtgggaaagcctttctttgtaagtctcaccttgttcgtcaccagacaatccactctggagaaaggccttatgagtgcagtgaatgtgggaaattgtttatgtggagttccacactcattacacatcagagggttcacactggaaagaggccttatggttgcagtgaatgtgggaagttctttaagtgcaactcaaacctctttaggcattacagaattcatacaggaaaaaggtcttatggttgcagtgaatgtgggaaattctttatggaaaggtctacactcagtagacatcagagagttcacactggagaaaggccttatgagtgcaatgaatgtgggaaattcttcagcttgaaatccgtcctcattcaacaccaaagagttcacactggagaacggccttatgaatgcagtgagtgtgggaaggccttccttacaaagtcccacctcatttgtcatcagacagttcacactgcagcaaagcagtgcagtgaatgtgggaaattctttaggtataactctacacttctcagacatcagaaagtccacactgga

SEQ ID NO: 4651 - DNA, 2508 bp, Homo sapiens
  source 1..2508: mol_type = genomic DNA
atgcaggtggaccctcctcttcacgggcctccaaatgactttctcatttttcaaatcattcctctgcactcactttctataatgccccggtttctctggattctgtgcttctccatggaggaaactcaaggagaactgacaagttcttgtggttctaaaaccatggccaatgtatctttggcatttagggatgtgtccatagacctctcccaagaggagtgggagtgcctggacgctgtgcagagggacttgtacaaggatgtgatgttggagaactacagcaacctggtctcactgggatataccattcctaagccagatgtgattactttattggagcaagagaaagagccctggatagtaatgagggaagggacaaggaattggttcacagatttggaatacaagtatattaccaagaatttgctttcagaaaagaatgtttgcaaaatctatttatctcaattgcagacaggggaaaaaagtaaaaacaccatccatgaggacaccattttcagaaatggtttgcagtgtaaacatgaatttgagagacaagagagacatcagatgggatgcgttagtcaaatgctaatccaaaaacaaatatctcatcctctacatccaaaaattcatgctagagagaaatcatatgaatgtaaggaatgtagaaaggcctttagacaacagtcataccttattcaacatctgagaattcacactggtgagagaccctataaatgtatggaatgtggaaaggccttttgtcgagtgggagaccttagagtacatcacacaatccatgctggggagagaccctatgaatgtaaagaatgtgggaaggcctttagacttcattatcaccttactgaacatcagagaatacattctggtgtgaaaccctacgagtgtaaggaatgtgggaaagcctttagtcgtgttagagaccttagagtacatcagacaattcatgctggagagagaccttatgaatgtaaagaatgtgggaaggcctttagacttcattatcaactaactgaacatcaaagaattcatactggtgagaggccttatgaatgtaaggtttgtggcaagacctttagggtacaacgacatattagtcaacatcagaaaattcatactggtgtcaaaccctataaatgtaatgaatgtgggaaggcctttagtcatggctcataccttgttcaacatcagaaaattcatactggtgaaaaaccctacgaatgtaaagaatgtggtaagtcctttagttttcatgcagaacttgctcgacatcgtagaattcatactggtgagaaaccctatgaatgtagagaatgtggaaaagcctttcgtcttcaaacggaacttactcggcatcatagaactcatactggtgagaaaccctatgaatgtaaggaatgtgggaaggcctttatttgtggttatcaacttactttacatctgagaactcacaccggtgagattccctatgaatgtaaggaatgtggaaaaaccttcagtagtcgctatcatctcactcaacactacagaattcatactggtgagaaaccctacatatgtaacgaatgtggaaaagcctttcgtcttcaaggagaacttacccgacatcacagaattcatacatgtgagaaaccctatgaatgtaaggaatgtgggaaggcttttattcatagcaatcaatttatttcacaccagcgaattcacaccagtgagagcacctacatatgtaaagaatgtgggaagatttttagtcgtcgctataatcttactcaacattttaaaattcatactggtgaaaaaccctacatatgtaatgaatgtgggaaagcctttcgatttcaaacagaacttactcagcatcacagaattcatactggtgaaaaaccctataaatgtacagaatgtgggaaggcctttattcgtagcactcatctcacgcaacatcacagaattcatactggtgagaaaccctacgaatgtacggaatgtgggaagacgtttagtcggcactatcatcttactcaacatcacagaggccatactggtgagaagccctacatatgtaatgaatgtgggaatgcttttatttgcagttatcgacttacattacatcaaagaattcacactggtgagcttccatatgaatgtaaggaatgtggaaagacctttagtcgtcggtatcatcttactcaacattttagacttcatactggtgagaaaccttatagctgtaaagaatgtgggaatgcctttcgtcttcaagcagaacttactcgacatcacatagttcacacgggtgagaaaccctataaatgtaaagaatgtgggaaagccttcagtgttaattcagaacttactcgacatcacagaattcatactggtgaaaaaccctatcaatgtaaagaatgtggaaaagcctttattcgtagtgatcaacttactttacatcagagaaatcatattagtgaggaagtcctatgcataatg

SEQ ID NO: 4652 - DNA, 2430 bp, Homo sapiens
  source 1..2430: mol_type = genomic DNA
atgcagccccggtttctctggattctgtgcttctccatggaggaaactcaaggagaactgacaagttcttgtggttctaaaaccatggccaatgtatctttggcatttagggatgtgtccatagacctctcccaagaggagtgggagtgcctggacgctgtgcagagggacttgtacaaggatgtgatgttggagaactacagcaacctggtctcactgggatataccattcctaagccagatgtgattactttattggagcaagagaaagagccctggatagtaatgagggaagggacaaggaattggttcacagatttggaatacaagtatattaccaagaatttgctttcagaaaagaatgtttgcaaaatctatttatctcaattgcagacaggggaaaaaagtaaaaacaccatccatgaggacaccattttcagaaatggtttgcagtgtaaacatgaatttgagagacaagagagacatcagatgggatgcgttagtcaaatgctaatccaaaaacaaatatctcatcctctacatccaaaaattcatgctagagagaaatcatatgaatgtaaggaatgtagaaaggcctttagacaacagtcataccttattcaacatctgagaattcacactggtgagagaccctataaatgtatggaatgtggaaaggccttttgtcgagtgggagaccttagagtacatcacacaatccatgctggggagagaccctatgaatgtaaagaatgtgggaaggcctttagacttcattatcaccttactgaacatcagagaatacattctggtgtgaaaccctacgagtgtaaggaatgtgggaaagcctttagtcgtgttagagaccttagagtacatcagacaattcatgctggagagagaccttatgaatgtaaagaatgtgggaaggcctttagacttcattatcaactaactgaacatcaaagaattcatactggtgagaggccttatgaatgtaaggtttgtggcaagacctttagggtacaacgacatattagtcaacatcagaaaattcatactggtgtcaaaccctataaatgtaatgaatgtgggaaggcctttagtcatggctcataccttgttcaacatcagaaaattcatactggtgaaaaaccctacgaatgtaaagaatgtggtaagtcctttagttttcatgcagaacttgctcgacatcgtagaattcatactggtgagaaaccctatgaatgtagagaatgtggaaaagcctttcgtcttcaaacggaacttactcggcatcatagaactcatactggtgagaaaccctatgaatgtaaggaatgtgggaaggcctttatttgtggttatcaacttactttacatctgagaactcacaccggtgagattccctatgaatgtaaggaatgtggaaaaaccttcagtagtcgctatcatctcactcaacactacagaattcatactggtgagaaaccctacatatgtaacgaatgtggaaaagcctttcgtcttcaaggagaacttacccgacatcacagaattcatacatgtgagaaaccctatgaatgtaaggaatgtgggaaggcttttattcatagcaatcaatttatttcacaccagcgaattcacaccagtgagagcacctacatatgtaaagaatgtgggaagatttttagtcgtcgctataatcttactcaacattttaaaattcatactggtgaaaaaccctacatatgtaatgaatgtgggaaagcctttcgatttcaaacagaacttactcagcatcacagaattcatactggtgaaaaaccctataaatgtacagaatgtgggaaggcctttattcgtagcactcatctcacgcaacatcacagaattcatactggtgagaaaccctacgaatgtacggaatgtgggaagacgtttagtcggcactatcatcttactcaacatcacagaggccatactggtgagaagccctacatatgtaatgaatgtgggaatgcttttatttgcagttatcgacttacattacatcaaagaattcacactggtgagcttccatatgaatgtaaggaatgtggaaagacctttagtcgtcggtatcatcttactcaacattttagacttcatactggtgagaaaccttatagctgtaaagaatgtgggaatgcctttcgtcttcaagcagaacttactcgacatcacatagttcacacgggtgagaaaccctataaatgtaaagaatgtgggaaagccttcagtgttaattcagaacttactcgacatcacagaattcatactggtgaaaaaccctatcaatgtaaagaatgtggaaaagcctttattcgtagtgatcaacttactttacatcagagaaatcatattagtgaggaagtcctatgcataatg

SEQ ID NO: 4653 - DNA, 2130 bp, Homo sapiens
  source 1..2130: mol_type = genomic DNA
atggtgaagctcgcgaaggcaggtaaaaatcaaggtgaccccaagaaaatggctcctcctccaaaggaggtagaagaagatagtgaagatgaggaaatgtcagaagatgaagaagatgatagcagtggagaagaggtcgtcatacctcagaagaaaggcaagaaggctgctgcaacctcagcaaagaaggtggtcgtttccccaacaaaaaaggttgcagttgccacaccagccaagaaagcagctgtcactccaggcaaaaaggcagcagcaacacctgccaagaagacagttacaccagccaaagcagttaccacacctggcaagaagggagccacaccaggcaaagcattggtagcaactcctggtaagaagggtgctgccatcccagccaagggggcaaagaatggcaagaatgccaagaaggaagacagtgatgaagaggaggatgatgacagtgaggaggatgaggaggatgacgaggacgaggatgaggatgaagatgaaattgaaccagcagcgatgaaagcagcagctgctgcccctgcctcagaggatgaggacgatgaggatgacgaagatgatgaggatgacgatgacgatgaggaagatgactctgaagaagaagctatggagactacaccagccaaaggaaagaaagctgcaaaagttgttcctgtgaaagccaagaacgtggctgaggatgaagatgaagaagaggatgatgaggacgaggatgacgacgacgacgaagatgatgaagatgatgatgatgaagatgatgaggaggaggaagaagaggaggaggaagagcctgtcaaagaagcacctggaaaacgaaagaaggaaatggccaaacagaaagcagctcctgaagccaagaaacagaaagtggaaggcacagaaccgactacggctttcaatctctttgttggaaacctaaactttaacaaatctgctcctgaattaaaaactggtatcagcgatgtttttgctaaaaatgatcttgctgttgtggatgtcagaattggtatgactaggaaatttggttatgtggattttgaatctgctgaagacctggagaaagcgttggaactcactggtttgaaagtctttggcaatgaaattaaactagagaaaccaaaaggaaaagacagtaagaaagagcgagatgcgagaacacttttggctaaaaatctcccttacaaagtcactcaggatgaattgaaagaagtgtttgaagatgctgcggagatcagattagtcagcaaggatgggaaaagtaaagggattgcttatattgaatttaagacagaagctgatgcagagaaaacctttgaagaaaagcagggaacagagatcgatgggcgatctatttccctgtactatactggagagaaaggtcaaaatcaagactatagaggtggaaagaatagcacttggagtggtgaatcaaaaactctggttttaagcaacctctcctacagtgcaacagaagaaactcttcaggaagtatttgagaaagcaacttttatcaaagtaccccagaaccaaaatggcaaatctaaagggtatgcatttatagagtttgcttcattcgaagacgctaaagaagctttaaattcctgtaataaaagggaaattgagggcagagcaatcaggctggagttgcaaggacccaggggatcacctaatgccagaagccagccatccaaaactctgtttgtcaaaggcctgtctgaggataccactgaagagacattaaaggagtcatttgacggctccgttcgggcaaggatagttactgaccgggaaactgggtcctccaaagggtttggttttgtagacttcaacagtgaggaggatgccaaagctgccaaggaggccatggaagacggtgaaattgatggaaataaagttaccttggactgggccaaacctaagggtgaaggtggcttcgggggtcgtggtggaggcagaggcggctttggaggacgaggtggtggtagaggaggccgaggaggatttggtggcagaggccggggaggctttggagggcgaggaggcttccgaggaggcagaggaggaggaggtgaccacaagccacaaggaaagaagacgaagtttgaa

SEQ ID NO: 4654 - DNA, 1884 bp, Homo sapiens
  source 1..1884: mol_type = genomic DNA
atggcccatgcattggtgacgttcagggatgtggctatagacttctctcagaaggaatgggagtgcctggacactacccagaggaaattgtacagagatgtgatgttggagaattataataacttggtctcactgggtttgttatccaggcataagaccaagaaattatcttcagaaaaggacattcatgaaatcagtttatccaaagagagtataatagaaaaaagtaaaactcttcgtctgaaaggatccatttttagaaatgagtggcagaacaaaagtgagtttgagggtcaacagggacttaaagaaagatctatcagtcaaaagaaaatcgtctctaaaaaaatgtcaactgatagaaaacgtccctcttttactctgaatcagagaattcacaatagtgagaaaagctgtgactcacacttggttcaacatgggaaaatagattctgatgtgaaacatgattgtaaagaatgtgggagtacttttaataatgtctatcagcttactctccatcagaaaattcatactggtgaaaaatcctgtaaatgtgagaaatgtgggaaagtttttagtcatagctatcaacttactctgcatcagagatttcatactggtgagaaaccctatgaatgtcaagaatgtgggaagacctttactctttacccacaacttaatcgacatcagaaaattcacactggtaaaaaaccctatatgtgtaagaaatgtgataagggtttttttagtagattagaacttactcaacataaaagaattcatactggtaagaaatcttatgaatgtaaagaatgtggaaaagtttttcaacttattttctactttaaagaacatgagagaattcatacaggtaagaaaccctatgaatgtaaggagtgtgggaaagcttttagtgtatgcggacaacttacccgtcatcagaaaattcatactggtgtaaaaccctacgaatgtaaggaatgtggaaagacctttagacttagtttttaccttactgaacacagaagaactcatgcaggtaagaaaccttatgaatgtaaggagtgtgggaaatcatttaatgtgcgtggacagcttaatcggcataaaacaatccatactggtataaaaccttttgcatgtaaggtgtgtgagaaggcttttagttatagtggtgacctcagagtacattctagaattcatactggagagaaaccatatgaatgtaaggaatgcgggaaagcctttatgcttcgttcagtccttactgaacatcagagacttcatactggtgtgaagccctacgaatgtaaggaatgtgggaagacctttcgagttcgttctcaaattagtctacataagaaaattcatactgatgtgaagccctacaaatgtgtacgatgtgggaagacctttagatttggtttctaccttactgaacaccagagaattcacactggtgaaaagccctataaatgtaaagaatgtggaaaggcctttattcgtagagggaatcttaaagaacatctgaaaattcattctggtttaaaaccctatgactgtaaagaatgtgggaagtcctttagtcggcgtgggcagttcactgaacatcagaaaattcatacgggtgtaaaaccatacaaatgtaaagaatgtgggaaggcctttagtcgtagtgtagaccttagaatacatcaaagaattcatactggtgagaaaccctatgagtgtaaacaatgtgggaaggcctttagacttaattcacaccttactgaacatcagagaattcacactggtgagaaaccctatgagtgtaaggtatgtagaaaggcctttagacaatattcacatctttatcaacatcagaaaactcataatgtaatt

SEQ ID NO: 4655 - DNA, 1980 bp, Homo sapiens
  source 1..1980: mol_type = genomic DNA
atggcccatgcattggtgacgttcagggatgtggctatagacttctctcagaaggaatgggagtgcctggacactacccagaggaaattgtacagagatgtgatgttggagaattataataacttggtctcactgggatattctggctcaaagccagatgtgattaccttactggagcaagggaaagagccctgcgtggtggcgagggatgtgacaggaagacagtgccccggtttgttatccaggcataagaccaagaaattatcttcagaaaaggacattcatgaaatcagtttatccaaagagagtataatagaaaaaagtaaaactcttcgtctgaaaggatccatttttagaaatgagtggcagaacaaaagtgagtttgagggtcaacagggacttaaagaaagatctatcagtcaaaagaaaatcgtctctaaaaaaatgtcaactgatagaaaacgtccctcttttactctgaatcagagaattcacaatagtgagaaaagctgtgactcacacttggttcaacatgggaaaatagattctgatgtgaaacatgattgtaaagaatgtgggagtacttttaataatgtctatcagcttactctccatcagaaaattcatactggtgaaaaatcctgtaaatgtgagaaatgtgggaaagtttttagtcatagctatcaacttactctgcatcagagatttcatactggtgagaaaccctatgaatgtcaagaatgtgggaagacctttactctttacccacaacttaatcgacatcagaaaattcacactggtaaaaaaccctatatgtgtaagaaatgtgataagggtttttttagtagattagaacttactcaacataaaagaattcatactggtaagaaatcttatgaatgtaaagaatgtggaaaagtttttcaacttattttctactttaaagaacatgagagaattcatacaggtaagaaaccctatgaatgtaaggagtgtgggaaagcttttagtgtatgcggacaacttacccgtcatcagaaaattcatactggtgtaaaaccctacgaatgtaaggaatgtggaaagacctttagacttagtttttaccttactgaacacagaagaactcatgcaggtaagaaaccttatgaatgtaaggagtgtgggaaatcatttaatgtgcgtggacagcttaatcggcataaaacaatccatactggtataaaaccttttgcatgtaaggtgtgtgagaaggcttttagttatagtggtgacctcagagtacattctagaattcatactggagagaaaccatatgaatgtaaggaatgcgggaaagcctttatgcttcgttcagtccttactgaacatcagagacttcatactggtgtgaagccctacgaatgtaaggaatgtgggaagacctttcgagttcgttctcaaattagtctacataagaaaattcatactgatgtgaagccctacaaatgtgtacgatgtgggaagacctttagatttggtttctaccttactgaacaccagagaattcacactggtgaaaagccctataaatgtaaagaatgtggaaaggcctttattcgtagagggaatcttaaagaacatctgaaaattcattctggtttaaaaccctatgactgtaaagaatgtgggaagtcctttagtcggcgtgggcagttcactgaacatcagaaaattcatacgggtgtaaaaccatacaaatgtaaagaatgtgggaaggcctttagtcgtagtgtagaccttagaatacatcaaagaattcatactggtgagaaaccctatgagtgtaaacaatgtgggaaggcctttagacttaattcacaccttactgaacatcagagaattcacactggtgagaaaccctatgagtgtaaggtatgtagaaaggcctttagacaatattcacatctttatcaacatcagaaaactcataatgtaatt

SEQ ID NO: 4656 - DNA, 1881 bp, Homo sapiens
  source 1..1881: mol_type = genomic DNA
atggccgaggcagcgctagtgattacgccgcagggccatgtgacctttgaggatattgctgtgtacttctcccaggaggagtggggcctccttgatgaagctcaaaggtgcctgtatcatgatgtgatgctggagaacttttcgcttatggcctcagtaggttgtttgcatggaatagaggctgaggaggccccttctgagcagactctttctgcgcaaggagtgtcacaggccaggactccaaagctaggtccttccatcccaaatgctcattcttgtgagatgtgtatcctggtcatgaaagacattttgtacctcagtgagcatcaggggacacttccctggcagaaaccttatacgtctgtggccagtgggaaatggttttcatttggttctaacctgcaacagcaccagaaccaggacagtggagagaaacacatcagaaaggaggagagcagtgccttgcttctgaatagctgcaaaattcctctgtcagacaatcttttcccatgcaaagatgttgagaaggattttccaaccatcctgggccttctccaacaccagaccacccacagcagacaagagtatgcacatagaagcagggagacctttcaacaaagacgttacaaatgtgagcaagttttcaatgagaaagttcatgttactgagcatcagagagtccacactggagaaaaagcttataagcgtagggaatatgggaaatccttgaactctaaatacttatttgttgaacaccagagaacccataatgcagaaaagccttatgtgtgcaatatatgtgggaaatcattcctccataaacaaacactcgttgggcaccagcagagaattcacactagagaaaggtcttatgtgtgcatcgaatgtgggaaatccttgagctccaaatactcacttgtggaacaccagagaacccataatggagaaaagccttatgtgtgcaatgtatgtgggaaatcattccgccacaaacaaacatttgttggccatcagcagagaatccacactggagagaggccttatgtgtgtatggaatgtgggaaatcttttattcattcctatgaccgcattcgacaccagagagttcacactggagaaggggcttatcagtgcagtgaatgtgggaaatccttcatatacaaacagtcacttcttgatcaccatagaatccacacgggagaaaggccttatgagtgcaaagaatgtgggaaggccttcattcacaaaaaaagacttcttgagcaccagagaattcatactggagaaaagccttatgtgtgcatcatatgtgggaaatcatttatccgctcgtctgactacatgcgacaccagagaattcacactggagaaagggcttatgaatgcagtgactgtgggaaagccttcatctccaaacaaacacttcttaagcatcacaaaatccacactagagaaaggccttatgaatgcagtgaatgtggaaaaggcttctaccttgaggttaaacttcttcagcaccaaagaatccatactagagaacaactttgtgagtgcaatgaatgtggaaaagtcttcagccaccaaaaaagacttcttgagcaccagaaagttcacactggcgaaaagccctgtgagtgcagtgaatgtgggaaatgctttagacaccgcaccagcctcattcaacaccagaaagttcacagtggagagaggccttataactgcactgcatgtgagaaggcctttatctataaaaacaaacttgttgagcatcagcgaatccacaccggagaaaagccgtatgaatgtggtaaatgtgggaaagccttcaacaaaagatattcccttgtcaggcaccagaaggtacatataacagaagagccc

SEQ ID NO: 4657 - DNA, 1635 bp, Homo sapiens
  source 1..1635: mol_type = genomic DNA
atgaacctgactgagggtcccctggcgatggcagaaatggaccctacacagggccgtgtggtctttgaggacgtggccatatatttctcccaggaggagtgggggcaccttgatgaggctcagagattgctgtaccgtgatgtgatgctggagaatttggcccttttgtcctcactaggttcttggcatggagctgaggatgaggaggcaccttcacagcaaggtttttctgtaggagtgtcagaggttacagcttcaaagccctgtctgtccagccagaaggtccaccctagtgagacatgtggcccacccttgaaagacattctgtgcctggttgagcacaatggaattcatcctgagcaacacatatatatttgtgaggcagagctttttcagcacccaaagcagcaaattggagaaaatctttccagaggggatgattggataccttcatttgggaagaaccacagagttcacatggcagaggagatcttcacatgcatggagggctggaaggacttaccagccacctcatgccttctccagcaccagggccctcaaagcgagtggaagccatacagggacacagaggacagagaagcctttcagactggacaaaatgattacaaatgtagtgaatgtgggaaaaccttcacctgcagctattcatttgttgagcaccagaaaatccacacaggagaaaggtcttatgaatgtaacaaatgtgggaaattctttaagtacagtgccaatttcatgaaacatcagacagttcacactagtgaaaggacttatgagtgcagagaatgtggaaaatcctttatgtacaactaccgactcatgagacataagcgagttcacactggagaaaggccttatgagtgcaacacatgtgggaaattctttcggtacagctccacatttgttagacatcagagagttcacaccggagaaaggccgtatgagtgcagggaatgtgggaaattctttatggacagctccacactcattaaacatcagagagttcacaccggagaaagaccttataagtgcaatgattgtgggaaattttttaggtatatctccacactcattagacatcagagaattcacactggagaaaggccttatgagtgcagtgtatgtggggaattgtttaggtacaactccagccttgttaaacattggagaaatcacactggagaaaggccttataaatgcagtgaatgtgggaaatcatttaggtaccactgcaggctcattagacaccagagagtccacacgggagaaaggccttatgagtgcagcgaatgcgggaaattctttcgttacaactccaacctcattaaacattggagaaatcacactggagaaaggccttacgagtgcagagagtgtgggaaagcctttagccacaagcatatacttgttgagcaccagaaaatccacagtggagaaagaccttatgagtgcagcgaatgccagaaggcctttattagaaagtctcacctggttcatcaccagaaaatccacagtgaagagaggcttgtgtgctccatgaatgtggggaattctttagctaaaactccaacctcattaaacatcagagatttcacaatggagaaagtttaccat

SEQ ID NO: 4658 - DNA, 1599 bp, Homo sapiens
  source 1..1599: mol_type = genomic DNA
atgaacctgactgagggccgtgtggtctttgaggacgtggccatatatttctcccaggaggagtgggggcaccttgatgaggctcagagattgctgtaccgtgatgtgatgctggagaatttggcccttttgtcctcactaggttcttggcatggagctgaggatgaggaggcaccttcacagcaaggtttttctgtaggagtgtcagaggttacagcttcaaagccctgtctgtccagccagaaggtccaccctagtgagacatgtggcccacccttgaaagacattctgtgcctggttgagcacaatggaattcatcctgagcaacacatatatatttgtgaggcagagctttttcagcacccaaagcagcaaattggagaaaatctttccagaggggatgattggataccttcatttgggaagaaccacagagttcacatggcagaggagatcttcacatgcatggagggctggaaggacttaccagccacctcatgccttctccagcaccagggccctcaaagcgagtggaagccatacagggacacagaggacagagaagcctttcagactggacaaaatgattacaaatgtagtgaatgtgggaaaaccttcacctgcagctattcatttgttgagcaccagaaaatccacacaggagaaaggtcttatgaatgtaacaaatgtgggaaattctttaagtacagtgccaatttcatgaaacatcagacagttcacactagtgaaaggacttatgagtgcagagaatgtggaaaatcctttatgtacaactaccgactcatgagacataagcgagttcacactggagaaaggccttatgagtgcaacacatgtgggaaattctttcggtacagctccacatttgttagacatcagagagttcacaccggagaaaggccgtatgagtgcagggaatgtgggaaattctttatggacagctccacactcattaaacatcagagagttcacaccggagaaagaccttataagtgcaatgattgtgggaaattttttaggtatatctccacactcattagacatcagagaattcacactggagaaaggccttatgagtgcagtgtatgtggggaattgtttaggtacaactccagccttgttaaacattggagaaatcacactggagaaaggccttataaatgcagtgaatgtgggaaatcatttaggtaccactgcaggctcattagacaccagagagtccacacgggagaaaggccttatgagtgcagcgaatgcgggaaattctttcgttacaactccaacctcattaaacattggagaaatcacactggagaaaggccttacgagtgcagagagtgtgggaaagcctttagccacaagcatatacttgttgagcaccagaaaatccacagtggagaaagaccttatgagtgcagcgaatgccagaaggcctttattagaaagtctcacctggttcatcaccagaaaatccacagtgaagagaggcttgtgtgctccatgaatgtggggaattctttagctaaaactccaacctcattaaacatcagagatttcacaatggagaaagtttaccat

SEQ ID NO: 4659 - DNA, 1044 bp, Homo sapiens
  source 1..1044: mol_type = genomic DNA
atgcccaggtccttcctggtcaagaaggtcaaacttgacgcgttctcttcggccgacctggagagcgcctacggacgcgcccgcagcgacctcggcgcgccactgcacgataaagggtacctcagcgactacgtggggccctcgtccgtctacgatggcgacgccgaggctgcgctgctcaaagggccgtcgccggagcccatgtacgcagcagctgtgcgtggagagctgggtccggcggctgcagggtctgcgccgccgcccaccccgcgcccggagctggccaccgctgcgggcggctacatcaacggcgacgcggccgtcagcgagggctacgcggcggacgccttcttcatcaccgacgggcgctcgcggcgtaaggcttccaatgccggcgctgccgccgctccctccacagcctcggcggcggcccccgacggcgacgccggaggcgggggcggggcgggcgggcgcagcttgggatccgggccggggggccggggcggcacgcgcgcgggggcaggcaccgaggcgcgcgcggggccaggggccgcaggtgctggcggccggcacgcgtgcggcgagtgcggcaaaacatacgccacgtcgtcgaacctgagccgccacaagcagacgcaccgcagcctggacagccagctggcgcggcgctgcccgacgtgcggcaaggtgtacgtgtccatgccggccatggccatgcacctgctcacgcacgacctgcgccacaagtgcggcgtgtgcggcaaagccttctcgcggccctggctgctgcagggccacatgcgctcgcacaccggcgagaaacccttcggctgcgcgcactgcggcaaggccttcgccgaccgctccaacctgcgcgcgcacatgcagacgcattcggccttcaagcacttccagtgcaagcgctgcaagaagagcttcgcgctcaagtcctatctcaacaagcactacgagtcggcctgcttcaagggcggcgccggaggccccgcggctcctgcgccgccacagctcagccctgtgcaggcc

SEQ ID NO: 4660 - DNA, 2574 bp, Homo sapiens
  source 1..2574: mol_type = genomic DNA
atggacctcccggcgctgctccccgccccgactgcgcgcggagggcaacatggcggcggccccggcccgctccgccgagccccagcgccgctcggcgcgagccccgcgcgccgccgcctgctactggtgcggggccctgaagatggcgggcccggggcgcggcccggggaggcctccgggccaagcccgccgcccgccgaggacgacagcgacggcgactctttcttggtgctgctggaagtgccgcacggcggcgctgccgccgaggctgccggatcacaggaggccgagcctggctcccgtgtcaacctggcgagccgccccgagcagggccccagcggcccggccgccccccccggccctggcgtagccccggcgggcgccgtcaccatcagcagccaggacctgctggtgcgtctcgaccgcggcgtcctcgcgctgtctgcgccgcccggccccgcaaccgcgggcgccgccgctccccgccgcgcgccccaggcctccggccccagcacgcccggctaccgctgccccgagccgcagtgcgcgctggccttcgccaagaagcaccagctcaaggtgcacctgctcacgcacggcggcggtcagggccggcggcccttcaagtgcccactggagggctgtggttgggccttcacaacgtcctacaagctcaagcggcacctgcagtcgcacgacaagctgcggcccttcggctgtccagtgggcggctgtggcaagaagttcactacggtctataacctcaaggcgcacatgaagggccacgagcaggagagcctgttcaagtgcgaggtgtgcgccgagcgcttccccacgcacgccaagctcagctcccaccagcgcagccacttcgagcccgagcgcccttacaagtgtgactttcccggctgtgagaagacatttatcacagtgagtgccctgttttcccataaccgagcccacttcagggaacaagagctcttttcctgctcctttcctgggtgcagcaagcagtatgataaagcctgtcggctgaaaattcacctgcggagccatacaggtgaaagaccatttatttgtgactctgacagctgtggctggaccttcaccagcatgtccaaacttctaaggcacagaaggaaacatgacgatgaccggaggtttacctgccctgtcgagggctgtgggaaatcattcaccagagcagagcatctgaaaggccacagcataacccacctaggcacaaagccgttcgagtgtcctgtggaaggatgttgcgcgaggttctccgctcgtagcagtctgtacattcactctaagaaacacgtgcaggatgtgggtgctccgaaaagccgttgcccagtttctacctgcaacagactcttcacctccaagcacagcatgaaggcgcacatggtcagacagcacagccggcgccaagatctcttacctcagctagaagctccgagttctcttactcccagcagtgaactcagcagcccaggccaaagtgagctcactaacatggatcttgctgcactcttctctgacacacctgccaatgctagtggttctgcaggtgggtcggatgaggctctgaactccggaatcctgactattgacgtcacttctgtgagctcctctctgggagggaacctccctgctaataatagctccctagggccgatggaacccctggtcctggtggcccacagtgatattcccccaagcctggacagccctctggttctcgggacagcagccacggttctgcagcagggcagcttcagtgtggatgacgtgcagactgtgagtgcaggagcattaggctgtctggtggctctgcccatgaagaacttgagtgacgacccactggctttgacctccaatagtaacttagcagcacatatcaccacaccgacctcttcgagcaccccccgagaaaatgccagtgtcccggaactgctggctccaatcaaggtggagccggactcgccttctcgcccaggagcagttgggcagcaggaaggaagccatgggctgccccagtccacgttgcccagtccagcagagcagcacggtgcccaggacacagagctcagtgcaggcactggcaacttctatttggaaagtgggggctcagcaagaactgattaccgagccattcaactagccaaggaaaaaaagcagagaggagcggggagcaatgcaggagcctcacagtctactcagagaaaaataaaagaaggcaaaatgagtcctccccatttccatgcaagccagaacagttggttgtgtgggagcctcgtggtgcccagcggaggacggccaggaccagctccagcagctggggtgcagtgcggggcgcagggcgtccaggtccagctggtgcaggatgacccctccggcgaaggtgtcctgccctcggcccgcggcccagccaccttcctccccttcctcactgtggacctgcccgtctacgtcctccaggaggtgctcccctcatctggaggccctgctggaccggaggccacccagttcccaggaagcactatcaacctgcaggatctgcag

SEQ ID NO: 4661 - DNA, 2130 bp, Homo sapiens
  source 1..2130: mol_type = genomic DNA
atggacctcccggcgctgctccccgccccgactgcgcgcggagggcaacatggcggcggccccggcccgctccgccgagccccagcgccgctcggcgcgagccccgcgcgccgccgcctgctactggtgcggggccctgaagatggcgggcccggggcgcggcccggggaggcctccgggccaagcccgccgcccgccgaggacgacagcgacggcgactctttcttggtgctgctggaagtgccgcacggcggcgctgccgccgaggctgccggatcacaggaggccgagcctggctcccgtgtcaacctggcgagccgccccgagcagggccccagcggcccggccgccccccccggccctggcgtagccccggcgggcgccgtcaccatcagcagccaggacctgctggtgcgtctcgaccgcggcgtcctcgcgctgtctgcgccgcccggccccgcaaccgcgggcgccgccgctccccgccgcgcgccccaggcctccggccccagcacgcccggctaccgctgccccgagccgcagtgcgcgctggccttcgccaagaagcaccagctcaaggtgcacctgctcacgcacggcggcggtcagggccggcggcccttcaagtgcccactggagggctgtggttgggccttcacaacgtcctacaagctcaagcggcacctgcagtcgcacgacaagctgcggcccttcggctgtccagtgggcggctgtggcaagaagttcactacggtctataacctcaaggcgcacatgaagggccacgagcaggagagcctgttcaagtgcgaggtgtgcgccgagcgcttccccacgcacgccaagctcagctcccaccagcgcagccacttcgagcccgagcgcccttacaagtgtgactttcccggctgtgagaagacatttatcacagtgagtgccctgttttcccataaccgagcccacttcagggaacaagagctcttttcctgctcctttcctgggtgcagcaagcagtatgataaagcctgtcggctgaaaattcacctgcggagccatacaggtgaaagaccatttatttgtgactctgacagctgtggctggaccttcaccagcatgtccaaacttctaaggcacagaaggaaacatgacgatgaccggaggtttacctgccctgtcgagggctgtgggaaatcattcaccagagcagagcatctgaaaggccacagcataacccacctaggcacaaagccgttcgagtgtcctgtggaaggatgttgcgcgaggttctccgctcgtagcagtctgtacattcactctaagaaacacgtgcaggatgtgggtgctccgaaaagccgttgcccagtttctacctgcaacagactcttcacctccaagcacagcatgaaggcgcacatggtcagacagcacagccggcgccaagatctcttacctcagctagaagctccgagttctcttactcccagcagtgaactcagcagcccaggccaaagtgagctcactaacatggatcttgctgcactcttctctgacacacctgccaatgctagtggttctgcaggtgggtcggatgaggctctgaactccggaatcctgactattgacgtcacttctgtgagctcctctctgggagggaacctccctgctaataatagctccctagggccgatggaacccctggtcctggtggcccacagtgatattcccccaagcctggacagccctctggttctcgggacagcagccacggttctgcagcagggcagcttcagtgtggatgacgtgcagactgtgagtgcaggagcattaggctgtctggtggctctgcccatgaagaacttgagtgacgacccactggctttgacctccaatagtaacttagcagcacatatcaccacaccgacctcttcgagcaccccccgagaaaatgccagtgtcccggaactgctggctccaatcaaggtggagccggactcgccttctcgcccaggagcagttgggcagcaggaaggaagccatgggctgccccagtccacgttgcccagtccagcagagcagcacggtgcccaggacacagagctcagtgcaggcactggcaacttctatttggta

SEQ ID NO: 4662 - DNA, 921 bp, Homo sapiens
  source 1..921: mol_type = genomic DNA
atgccgcgctccttcctggtaaagaagatcaaaggggacggcttccagtgcagcggggtgccggcccccacctaccaccccttggagacagcctacgtgctgcctggcgcccgggggcctcccggggacaacgggtacgccccgcaccgcctgcccccgagcagctacgatgcggaccagaagccgggcctggagctggccccggccgagcccgcgtacccgccggcggcgccggaggagtacagcgaccccgaaagcccgcagtcgagcctgtcggcgcgctacttccgaggggaggcggcagtgaccgacagctactccatggacgccttcttcatctcggacgggcgctcgcggcggcggcggggcgggggcggcggggacgcggggggctcgggagacgcggggggcgccggggggcgcgcggggcgcgcgggggcgcaggcgggcggcgggcaccggcacgcgtgcgccgagtgcggcaagacctacgccacgtcgtcgaacctgagccgccacaagcagacgcaccgcagcctggacagccagctggcgcgcaaatgcccgacgtgcggcaaggcctacgtgtccatgcccgcgctcgccatgcacctgctcacgcacaacctgcgccacaagtgcggcgtctgcggcaaggccttctcgcggccctggctgctgcagggtcacatgcgctcgcacaccggcgaaaagccgttcggctgcgcgcactgcggcaaggccttcgccgaccgctccaacctgcgcgcgcacatgcagacgcactcggccttcaagcactaccgctgccgccagtgcgacaagagcttcgcgctcaagtcctacctccacaagcactgcgaggcggcctgcgccaaggcggccgagccacccccgccgacccccgccggcccggccagc

SEQ ID NO: 4663 - DNA, 1134 bp, Homo sapiens
  source 1..1134: mol_type = genomic DNA
atgagctccttcgacctgccggcgccctccccacctcgctgcagcccccagttccccagcatcggccaggagccccccgagatgaacctctactatgagaacttcttccacccacagggcgtgcccagccctcagcggccctccttcgaggggggcggcgagtatggggccacccccaacccctacctctggttcaacgggcccaccatgaccccgccaccctacctgcccggccccaacgccagccccttcctgccccaggcctatggagtgcagaggccgctgctgcccagcgtgtcggggcttggggggagcgacctgggctggctgcccatcccctcgcaggaggagctgatgaagctggtgcggccaccctattcctactcggctctcatcgccatggccatccacggggcacccgacaagcgcctcactctcagccagatctaccagtacgtggccgacaacttccccttctacaacaagagcaaggccggctggcagaactccatccgccacaacctgtcgctcaacgactgcttcaagaaggtgccccgcgacgaggacgacccgggcaaagggaattactggaccctggaccccaactgtgagaaaatgttcgacaatggaaatttccgcaggaaaaggaagagaaaatcagatgtttcctctagcacagcctccttggccttagagaagacagagagcagtctcccggtggacagccccaagaccacggagcctcaggacatcttggatggagcctcaccagggggcaccaccagctccccagagaagcggccctcccctcccccatcaggcgccccttgccttaacagcttcctttcctctatgacagcctatgtgagcggggggagccccacgagccaccccttggtcacaccaggactgagccctgagcccagtgacaagacggggcagaactcactgaccttcaactccttctccccgctcaccaacctcagcaaccacagcggtgggggtgactgggcgaaccccatgcccaccaacatgctcagctatggaggatctgtgctcagccaattcagccctcacttctacaacagtgtcaacaccagtggtgtcctctaccccagggagggcaccgaggtc

SEQ ID NO: 4664 - DNA, 1260 bp, Homo sapiens
  source 1..1260: mol_type = genomic DNA
atggccctctactgcggcgacaacttcggagtgtattcgcagcccggcctgcccccgcccgccgccaccgccgccgccccgggcgcccccccggcagccagggcgccttacgggctggccgactacgccgcgccgccggccgccgccgccaacccctacctgtggctcaacgggcccggcgtgggaggcccgccctccgccgccgccgcagccgccgccgcgtacctgggcgctccgccgccgccgccgccccccggggccgcggccgggccctttctgcagccaccgcctgccgccggcaccttcggctgctctcagcggcccttcgcgcagcccgcgcccgccgcgcccgcctcgcccgccgcgcccgcggggcccggggagctgggctggctgtccatggccagccgcgaggacctgatgaagatggtgcggccgccctactcgtattcggcgctcatcgccatggccattcagagcgcgcccgagcgcaaactcactctcagccacatctaccagttcgtcgccgatagcttccccttctaccagcgcagcaaggccggctggcagaactccatccgccacaacctgtcgctcaacgactgcttcaagaaggtgccccgcgacgaggacgacccaggaaagggtaattattggactcttgatccgaactgcgagaaaatgtttgacaatgggaacttccgtcggaagcgaaagcgccgctctgaggccagcaatggctccacagtggctgctgggacatcaaagtccgaagaagggctctcctcaggattggggtctggagtgggtgggaagccagaagaagagagcccctccactctgctgaggccttcccactccccagagcctccggagggcaccaagagtactgcctcatctcctggaggacccatgctcacctccaccccttgtctcaacactttcttcagcagcctcagctccttgagtgtcagcagcagtgtgagtacccagcgggctctccctggcagccgccacctagggatccagggggcccagctgccctccagcggcgtgttctccccgacctccatctcagaggcctcagcagacaccttgcaactgagcaatagcaccagcaatagcaccggccagagatcttcctattacagccctttccctgccagcaccagcggggggcaaagcagccccttcagcagccctttccacaactttagcatggtgaacagcctcatctacccccgagagggctccgaggtg

SEQ ID NO: 4665 - DNA, 954 bp, Homo sapiens
  source 1..954: mol_type = genomic DNA
atggccacctactgcgacgacctgggcccctcctcggccccgcccggccaggcccaggccaccgcgcaccccccgggctatgagccaggggatctgggcgcggtgggcgggggccccctcctgtgggtgaacgcgccagcgctcagccccaagtcctacgcttcgggtcccgggcctgcgccgccctacgcggccccgagctacggggctcccggcccgctcctcggcgccccgggcggcctggcgggcgccgacctcgcctggctgagcctctccggccagcaggagctgctgaggctggtgcggccgccctactcctactcggcgctcatcgccatggccatccagagcgcgccgctgcggaagctgacgctcagccagatctaccagtacgtggctggtaacttccctttctacaagcgcagcaaggcgggctggcagaactccatccgccacaacctgtcgctcaacgactgcttcaagaaggtgccccgcgacgaggacgacccaggtaaaggcaattactggaccctggaccccaactgcgagaagatgtttgacaacgggaacttccgaaggaagaggaagaggagagctgaagccagcgcggccgtgcgctcgggagccaggagcgtgggaggggccgaggcgccagcgctggagcccccgagcgcggcttgcctggacctgcaggcctcgccctctccatccgcacccgaggccgccacctgcttctccggtttcgcttctgctatgagcgctctggctggcggccttggcaccttccccgggggcctggcgggcgacttttctttcgggaggcggccaccgacagtcgccacccacgctccccagacccttaacccctcccctggcttcgcccctggccaccagaccgcggccgccggcttccgcctcagtcacctcctctacagccgggaagggaccgaagtt

SEQ ID NO: 4666 - DNA, 1371 bp, Homo sapiens
  source 1..1371: mol_type = genomic DNA
atgtacgagagtgtagaagtggggggtcccacccctaatcccttcctagtggtggatttttataaccagaaccgggcctgtttgctcccagagaaggggctccccgccccgggtccgtactccaccccgctccggactccgctttggaatggctcaaaccactccattgagacccagagcagcagttctgaagagatagtgcccagccctccctcgccaccccctctaccccgcatctacaagccttgctttgtctgtcaggacaagtcctcaggctaccactatggggtcagcgcctgtgagggctgcaagggcttcttccgccgcagcatccagaagaacatggtgtacacgtgtcaccgggacaagaactgcatcatcaacaaggtgacccggaaccgctgccagtactgccgactgcagaagtgctttgaagtgggcatgtccaaggagtctgtgagaaacgaccgaaacaagaagaagaaggaggtgcccaagcccgagtgctctgagagctacacgctgacgccggaggtgggggagctcattgagaaggtgcgcaaagcgcaccaggaaaccttccctgccctctgccagctgggcaaatacactacgaacaacagctcagaacaacgtgtctctctggacattgacctctgggacaagttcagtgaactctccaccaagtgcatcattaagactgtggagttcgccaagcagctgcccggcttcaccaccctcaccatcgccgaccagatcaccctcctcaaggctgcctgcctggacatcctgatcctgcggatctgcacgcggtacacgcccgagcaggacaccatgaccttctcggacgggctgaccctgaaccggacccagatgcacaacgctggcttcggccccctcaccgacctggtctttgccttcgccaaccagctgctgcccctggagatggatgatgcggagacggggctgctcagcgccatctgcctcatctgcggagaccgccaggacctggagcagccggaccgggtggacatgctgcaggagccgctgctggaggcgctaaaggtctacgtgcggaagcggaggcccagccgcccccacatgttccccaagatgctaatgaagattactgacctgcgaagcatcagcgccaagggggctgagcgggtgatcacgctgaagatggagatcccgggctccatgccgcctctcatccaggaaatgttggagaactcagagggcctggacactctgagcggacagccggggggtggggggcgggacgggggtggcctggcccccccgccaggcagctgtagccccagcctcagccccagctccaacagaagcagcccggccacccactccccg

SEQ ID NO: 4667 - DNA, 1434 bp, Homo sapiens
  source 1..1434: mol_type = genomic DNA
atgatgtcacagacaatgacacaagccggtgtctcattccgacacagcgtccgagctgcacaatgtcacacccgggtgccaaacacttggccccgcgcgacccggccctacgcctcctgccgccgctctccgcgtctccgggggaggtggcccggttcggccgggcagggggctggcgggcgagccccgcgggcgggctggcgagcgggtgatgtcacgggcagcgccattgagacccagagcagcagttctgaagagatagtgcccagccctccctcgccaccccctctaccccgcatctacaagccttgctttgtctgtcaggacaagtcctcaggctaccactatggggtcagcgcctgtgagggctgcaagggcttcttccgccgcagcatccagaagaacatggtgtacacgtgtcaccgggacaagaactgcatcatcaacaaggtgacccggaaccgctgccagtactgccgactgcagaagtgctttgaagtgggcatgtccaaggagtctgtgagaaacgaccgaaacaagaagaagaaggaggtgcccaagcccgagtgctctgagagctacacgctgacgccggaggtgggggagctcattgagaaggtgcgcaaagcgcaccaggaaaccttccctgccctctgccagctgggcaaatacactacgaacaacagctcagaacaacgtgtctctctggacattgacctctgggacaagttcagtgaactctccaccaagtgcatcattaagactgtggagttcgccaagcagctgcccggcttcaccaccctcaccatcgccgaccagatcaccctcctcaaggctgcctgcctggacatcctgatcctgcggatctgcacgcggtacacgcccgagcaggacaccatgaccttctcggacgggctgaccctgaaccggacccagatgcacaacgctggcttcggccccctcaccgacctggtctttgccttcgccaaccagctgctgcccctggagatggatgatgcggagacggggctgctcagcgccatctgcctcatctgcggagaccgccaggacctggagcagccggaccgggtggacatgctgcaggagccgctgctggaggcgctaaaggtctacgtgcggaagcggaggcccagccgcccccacatgttccccaagatgctaatgaagattactgacctgcgaagcatcagcgccaagggggctgagcgggtgatcacgctgaagatggagatcccgggctccatgccgcctctcatccaggaaatgttggagaactcagagggcctggacactctgagcggacagccggggggtggggggcgggacgggggtggcctggcccccccgccaggcagctgtagccccagcctcagccccagctccaacagaagcagcccggccacccactccccg

SEQ ID NO: 4668 - DNA, 1095 bp, Homo sapiens
  source 1..1095: mol_type = genomic DNA
atggccagcaacagcagctcctgcccgacacctgggggcgggcacctcaatgggtacccggtgcctccctacgccttcttcttcccccctatgctgggtggactctccccgccaggcgctctgaccactctccagcaccagcttccagttagtggatatagcacaccatccccagccactgtgagaaacgaccgaaacaagaagaagaaggaggtgcccaagcccgagtgctctgagagctacacgctgacgccggaggtgggggagctcattgagaaggtgcgcaaagcgcaccaggaaaccttccctgccctctgccagctgggcaaatacactacgaacaacagctcagaacaacgtgtctctctggacattgacctctgggacaagttcagtgaactctccaccaagtgcatcattaagactgtggagttcgccaagcagctgcccggcttcaccaccctcaccatcgccgaccagatcaccctcctcaaggctgcctgcctggacatcctgatcctgcggatctgcacgcggtacacgcccgagcaggacaccatgaccttctcggacgggctgaccctgaaccggacccagatgcacaacgctggcttcggccccctcaccgacctggtctttgccttcgccaaccagctgctgcccctggagatggatgatgcggagacggggctgctcagcgccatctgcctcatctgcggagaccgccaggacctggagcagccggaccgggtggacatgctgcaggagccgctgctggaggcgctaaaggtctacgtgcggaagcggaggcccagccgcccccacatgttccccaagatgctaatgaagattactgacctgcgaagcatcagcgccaagggggctgagcgggtgatcacgctgaagatggagatcccgggctccatgccgcctctcatccaggaaatgttggagaactcagagggcctggacactctgagcggacagccggggggtggggggcgggacgggggtggcctggcccccccgccaggcagctgtagccccagcctcagccccagctccaacagaagcagcccggccacccactccccg

SEQ ID NO: 4669 - DNA, 1008 bp, Homo sapiens
  source 1..1008: mol_type = genomic DNA
atgatttacacttgtcaccgagataagaactgtgttattaataaagtcaccaggaatcgatgccaatactgtcgactccagaagtgctttgaagtgggaatgtccaaagaatctgtcaggaatgacaggaacaagaaaaagaaggagacttcgaagcaagaatgcacagagagctatgaaatgacagctgagttggacgatctcacagagaagatccgaaaagctcaccaggaaactttcccttcactctgccagctgggtaaatacaccacgaattccagtgctgaccatcgagtccgactggacctgggcctctgggacaaattcagtgaactggccaccaagtgcattattaagatcgtggagtttgctaaacgtctgcctggtttcactggcttgaccatcgcagaccaaattaccctgctgaaggccgcctgcctggacatcctgattcttagaatttgcaccaggtataccccagaacaagacaccatgactttctcagacggccttaccctaaatcgaactcagatgcacaatgctggatttggtcctctgactgaccttgtgttcacctttgccaaccagctcctgcctttggaaatggatgacacagaaacaggccttctcagtgccatctgcttaatctgtggagaccgccaggaccttgaggaaccgacaaaagtagataagctacaagaaccattgctggaagcactaaaaatttatatcagaaaaagacgacccagcaagcctcacatgtttccaaagatcttaatgaaaatcacagatctccgtagcatcagtgctaaaggtgcagagcgtgtaattaccttgaaaatggaaattcctggatcaatgccacctctcattcaagaaatgctggagaattctgaaggacatgaacccttgaccccaagttcaagtgggaacacagcagagcacagtcctagcatctcacccagctcagtggaaaacagtggggtcagtcagtcaccactcgtgcaa

SEQ ID NO: 4670 - DNA, 1296 bp, Homo sapiens
  source 1..1296: mol_type = genomic DNA
atgctagccctccccctccccccctgctggagcggggcgccgccgggggaggagggggaatcggctgcgggtccttggtgtttccagcacccagtttcccttcaagccgggtcgcgatgtacgactgtatggaaacgtttgccccgggtccgcgacggctgtacggggcggccgggcccggggccggcttgctgcgcagagccaccggcggctcctgtttcgccggacttgaatcttttgcctggccgcaacccgccagcctgcaatggcttctttcgccgaagcatccagaagaacatggtgtacacgtgtcaccgcgacaaaaactgtatcatcaacaaggtgaccaggaatcgctgccagtactgccggctacagaagtgcttcgaagtgggcatgtccaaggaagctgtgcgaaatgaccggaacaagaagaagaaagaggtgaaggaagaagggtcacctgacagctatgagctgagccctcagttagaagagctcatcaccaaggtcagcaaagcccatcaggagactttcccctcgctctgccagctgggcaagtataccacgaactccagtgcagaccaccgcgtgcagctggatctggggctgtgggacaagttcagtgagctggctaccaagtgcatcatcaagatcgtggagtttgccaagcggttgcctggctttacagggctcagcattgctgaccagatcactctgctcaaagctgcctgcctagatatcctgatgctgcgtatctgcacaaggtacaccccagagcaggacaccatgaccttctccgacgggctgaccctgaaccggacccagatgcacaatgccggcttcgggcccctcacagaccttgtctttgcctttgctgggcagctcctgcccctggagatggatgacaccgagacagggctgctcagcgccatctgcctcatctgcggagaccgcatggacctggaggagcccgaaaaagtggacaagctgcaggagccactgctggaagccctgaggctgtacgcccggcgccggcggcccagccagccctacatgttcccaaggatgctaatgaaaatcaccgacctccggggcatcagcactaagggagctgaaagggccattactctgaagatggagattccaggcccgatgcctcccttaatccgagagatgctggagaaccctgaaatgtttgaggatgactcctcgcagcctggtccccaccccaatgcctctagcgaggatgaggttcctgggggccagggcaaagggggcctgaagtccccagcc

SEQ ID NO: 4671 - DNA, 1329 bp, Homo sapiens
  source 1..1329: mol_type = genomic DNA
atgtacgactgtatggaaacgtttgccccgggtccgcgacggctgtacggggcggccgggcccggggccggcttgctgcgcagagccaccggcggctcctgtttcgccggacttgaatcttttgcctggccgcaacccgccagcctgcaatcggtggagacacagagcaccagctcagaggagatggtgcccagctcgccctcgccccctccgcctcctcgggtctacaagccatgcttcgtgtgcaatgacaagtcctctggctaccactatggggtcagctcttgtgaaggctgcaagggcttctttcgccgaagcatccagaagaacatggtgtacacgtgtcaccgcgacaaaaactgtatcatcaacaaggtgaccaggaatcgctgccagtactgccggctacagaagtgcttcgaagtgggcatgtccaaggaagctgtgcgaaatgaccggaacaagaagaagaaagaggtgaaggaagaagggtcacctgacagctatgagctgagccctcagttagaagagctcatcaccaaggtcagcaaagcccatcaggagactttcccctcgctctgccagctgggcaagtataccacgaactccagtgcagaccaccgcgtgcagctggatctggggctgtgggacaagttcagtgagctggctaccaagtgcatcatcaagatcgtggagtttgccaagcggttgcctggctttacagggctcagcattgctgaccagatcactctgctcaaagctgcctgcctagatatcctgatgctgcgtatctgcacaaggtacaccccagagcaggacaccatgaccttctccgacgggctgaccctgaaccggacccagatgcacaatgccggcttcgggcccctcacagaccttgtctttgcctttgctgggcagctcctgcccctggagatggatgacaccgagacagggctgctcagcgccatctgcctcatctgcggagaccgcatggacctggaggagcccgaaaaagtggacaagctgcaggagccactgctggaagccctgaggctgtacgcccggcgccggcggcccagccagccctacatgttcccaaggatgctaatgaaaatcaccgacctccggggcatcagcactaagggagctgaaagggccattactctgaagatggagattccaggcccgatgcctcccttaatccgagagatgctggagaaccctgaaatgtttgaggatgactcctcgcagcctggtccccaccccaatgcctctagcgaggatgaggttcctgggggccagggcaaagggggcctgaagtccccagcc

SEQ ID NO: 4672 - DNA, 1146 bp, Homo sapiens
  source 1..1146: mol_type = genomic DNA
atggtgcccagctcgccctcgccccctccgcctcctcgggtctacaagccatgcttcgtgtgcaatgacaagtcctctggctaccactatggggtcagctcttgtgaaggctgcaagggcttctttcgccgaagcatccagaagaacatggtgtacacgtgtcaccgcgacaaaaactgtatcatcaacaaggtgaccaggaatcgctgccagtactgccggctacagaagtgcttcgaagtgggcatgtccaaggaagctgtgcgaaatgaccggaacaagaagaagaaagaggtgaaggaagaagggtcacctgacagctatgagctgagccctcagttagaagagctcatcaccaaggtcagcaaagcccatcaggagactttcccctcgctctgccagctgggcaagtataccacgaactccagtgcagaccaccgcgtgcagctggatctggggctgtgggacaagttcagtgagctggctaccaagtgcatcatcaagatcgtggagtttgccaagcggttgcctggctttacagggctcagcattgctgaccagatcactctgctcaaagctgcctgcctagatatcctgatgctgcgtatctgcacaaggtacaccccagagcaggacaccatgaccttctccgacgggctgaccctgaaccggacccagatgcacaatgccggcttcgggcccctcacagaccttgtctttgcctttgctgggcagctcctgcccctggagatggatgacaccgagacagggctgctcagcgccatctgcctcatctgcggagaccgcatggacctggaggagcccgaaaaagtggacaagctgcaggagccactgctggaagccctgaggctgtacgcccggcgccggcggcccagccagccctacatgttcccaaggatgctaatgaaaatcaccgacctccggggcatcagcactaagggagctgaaagggccattactctgaagatggagattccaggcccgatgcctcccttaatccgagagatgctggagaaccctgaaatgtttgaggatgactcctcgcagcctggtccccaccccaatgcctctagcgaggatgaggttcctgggggccagggcaaagggggcctgaagtccccagcc

SEQ ID NO: 4673 - DNA, 3363 bp, Homo sapiens
  source 1..3363: mol_type = genomic DNA
atgagcttagaaaatgaagacaagcgagctcgcacccgatccaaggccctgcgaggacccccagagaccacagctgcagacctcagctgccccaccccaggatgcacaggctcagggcacgtccggggcaagtactccaggcaccgaagtttacagagctgccccctggccaagaagaggaagctggagggcgctgaggctgagcacctggtgtccaagaggaagtcacaccccctgaagctggctctggacgagggctatggtgtggacagcgacggcagtgaggacactgaggtgaaggacgcctctgtttcggatgaatcggaaggaactctggagggggccgaggctgagacgtcaggacaggacgagattcatcgccccgagacagctgaaggaaggagccccgtcaagtcccattttggatccaaccccatcggcagcgccactgcctcctccaagggcagctacagcagctaccagggaatcatcgcaacttctctcctgaacttgggtcaaattgctgaagagaccctggtggaagaggacttgggccaggcggccaagccaggtcctggcattgtgcacctgcttcaggaggctgcagagggagctgccagcgaggagggtgaaaagggcctcttcatccagccagaggatgccgaggaggtcgtcgaagtcaccaccgagcgctcccaggacctgtgtccccagtccctggaggatgcagccagtgaggagtccagcaagcagaaaggcatcctgagtcacgaagaggaggacgaggaggaggaggaggaggaagaggaggaggaggaggatgaagaagaggaagaggaagaggaggaggaagaggaagaggaggaggaggaagaggaagaggaggaggaagaggaagaggaagaggaggaggaggaggcagctcctgatgtgatctttcaggaagacacctctcacacctctgcccagaaggcccctgagctccggggcccagaatcacccagtcccaagcctgagtactctgttattgtggaggtccgctcggatgatgacaaggacgaggacacccactcccggaagtcaacagtcactgacgagtcggagatgcaggacatgatgacccggggaaacctgggcctcctggagcaggccatcgccctgaaggctgaacaggtgcgcacagtctgcgagccgggctgcccgcctgccgagcagagccagctgggcctgggagagccagggaaggcagcaaagcccctggacactgtgcggaagagttactacagtaaagatccttcaagagctgagaagcgtgagatcaagtgtccaacaccaggctgtgatggcactggccacgttaccgggttgtaccctcaccaccgcagcctttctggctgtccccacaaggataggatccccccagagatcttagccatgcatgagaacgtgctgaagtgccccactcctggctgcacaggccagggtcacgtgaacagcaaccgcaacacgcacagaagtttgtctgggtgtcccattgctgccgccgaaaaattagccaaatcccatgagaagcagcagccgcagacaggagatccttccaagagtagctccaattccgatcggatcctcaggcccatgtgcttcgtgaagcagctcgaggtccctccatatgggagctaccggcccaacgtggcccccgccacacccagggccaacttggccaaggagctggagaagttctccaaggtcacctttgactacgcaagtttcgatgctcaggtttttggcaaacgcatgcttgccccaaagattcagaccagcgaaacctcacctaaagcctttcaatgctttgactactcgcaggacgccgaggctgcacacatggctgccactgccatcctgaacctctccacgcgctgctgggagatgcctgagaacctcagcacgaagccacaggacctccccagcaagtctgtggatatcgaggtagacgaaaatggaaccctggacttgagcatgcacaaacaccgcaaacgagaaaatgctttccccagcagcagcagctgcagcagcagccccggtgtgaagtctcccgacgcctcccagcgccacagcagcaccagcgcccccagcagctccatgacctctccccagtccagccaggcctcccgccaggacgagtgggaccggcccctggactacaccaagcctagccgcctgagagaggaggaacctgaggagtcagagccagcagcccattcttttgcttcttctgaagcagatgaccaggaagtgtcggaagagaattttgaggagcggaagtatccgggggaagtcaccctgaccaactttaagctgaagtttctctccaaggacataaagaaggagctgctcacctgtcccacccctggctgtgacggcagcggccacatcaccgggaactacgcctcccaccgcagcctctctggttgccctcttgctgacaagagcctcagaaacctcatggctgcccactctgctgacctcaagtgccccacgcccggctgtgacggctctggccacatcacagggaactacgcttcacaccggagcttgtccggctgccctcgtgcaaagaaaagtggagtcaaggtggcacccaccaaggacgacaaggaggaccccgagctgatgaagtgcccagttccaggctgtgtggggctcggtcacatcagcgggaaatacgcctctcacaggagcgcatccggctgcccactggccgcccgcaggcagaaggaagggtccctcaatggctcgtcattctcctggaagtccctgaagaatgaaggaccgacctgccccaccccgggctgtgacggctctggccacgccaatgggagtttcctcacccaccggagtttgtcaggctgtcccagagcaacctttgctggaaagaagggaaaactgtcaggggatgaggtcctcagtccaaagttcaagactagcgacgtgttggagaatgatgaggagatcaagcagctgaaccaggagatccgagacctgaacgagtccaactcggagatggaggctgccatggtgcagctgcagtcccagatctcctccatggagaagaacctgaagaacatcgaggaggagaacaagctcattgaggagcagaatgaagccctgtttctggagctgtccggcctgagccaggccctcatccaaagtctcgccaatatccgccttccgcacatggagccaatatgcgaacagaatttcgatgcctatgtgagcaccctcaccgacatgtactccaaccaggacccggagaacaaggacctcctggagagcatcaagcaggctgtgaggggcatccaggtc

SEQ ID NO: 4674 - DNA, 1491 bp, Homo sapiens
  source 1..1491: mol_type = genomic DNA
ctgcaggacccggcttccacgtgtgtcccggagccggcgtctcagcacacgctccgctccgggcctgggtgcctacagcagccagagcagcagggagtccgggacccgggcggcatctgggccaagttaggcgccgccgaggccagcgctgaacgtctccagggccggaggagccgcggggcgtccgggtctgagccgcagcaaatgggctccgacgtgcgggacctgaacgcgctgctgcccgccgtcccctccctgggtggcggcggcggctgtgccctgcctgtgagcggcgcggcgcagtgggcgccggtgctggactttgcgcccccgggcgcttcggcttacgggtcgttgggcggccccgcgccgccaccggctccgccgccacccccgccgccgccgcctcactccttcatcaaacaggagccgagctggggcggcgcggagccgcacgaggagcagtgcctgagcgccttcactgtccacttttccggccagttcactggcacagccggagcctgtcgctacgggcccttcggtcctcctccgcccagccaggcgtcatccggccaggccaggatgtttcctaacgcgccctacctgcccagctgcctcgagagccagcccgctattcgcaatcagggttacagcacggtcaccttcgacgggacgcccagctacggtcacacgccctcgcaccatgcggcgcagttccccaaccactcattcaagcatgaggatcccatgggccagcagggctcgctgggtgagcagcagtactcggtgccgcccccggtctatggctgccacacccccaccgacagctgcaccggcagccaggctttgctgctgaggacgccctacagcagtgacaatttataccaaatgacatcccagcttgaatgcatgacctggaatcagatgaacttaggagccaccttaaagggccacagcacagggtacgagagcgataaccacacaacgcccatcctctgcggagcccaatacagaatacacacgcacggtgtcttcagaggcattcaggatgtgcgacgtgtgcctggagtagccccgactcttgtacggtcggcatctgagaccagtgagaaacgccccttcatgtgtgcttacccaggctgcaataagagatattttaagctgtcccacttacagatgcacagcaggaagcacactggtgagaaaccataccagtgtgacttcaaggactgtgaacgaaggttttctcgttcagaccagctcaaaagacaccaaaggagacatacaggtgtgaaaccattccagtgtaaaacttgtcagcgaaagttctcccggtccgaccacctgaagacccacaccaggactcatacaggtgaaaagcccttcagctgtcggtggccaagttgtcagaaaaagtttgcccggtcagatgaattagtccgccatcacaacatgcatcagagaaacatgaccaaactccagctggcgctt

SEQ ID NO: 4675 - DNA, 864 bp, Homo sapiens
  source 1..864: mol_type = genomic DNA
atggagaagggttacagcacggtcaccttcgacgggacgcccagctacggtcacacgccctcgcaccatgcggcgcagttccccaaccactcattcaagcatgaggatcccatgggccagcagggctcgctgggtgagcagcagtactcggtgccgcccccggtctatggctgccacacccccaccgacagctgcaccggcagccaggctttgctgctgaggacgccctacagcagtgacaatttataccaaatgacatcccagcttgaatgcatgacctggaatcagatgaacttaggagccaccttaaagggccacagcacagggtacgagagcgataaccacacaacgcccatcctctgcggagcccaatacagaatacacacgcacggtgtcttcagaggcattcaggatgtgcgacgtgtgcctggagtagccccgactcttgtacggtcggcatctgagaccagtgagaaacgccccttcatgtgtgcttacccaggctgcaataagagatattttaagctgtcccacttacagatgcacagcaggaagcacactggtgagaaaccataccagtgtgacttcaaggactgtgaacgaaggttttctcgttcagaccagctcaaaagacaccaaaggagacatacaggtgtgaaaccattccagtgtaaaacttgtcagcgaaagttctcccggtccgaccacctgaagacccacaccaggactcatacaggtaaaacaagtgaaaagcccttcagctgtcggtggccaagttgtcagaaaaagtttgcccggtcagatgaattagtccgccatcacaacatgcatcagagaaacatgaccaaactccagctggcgctt

SEQ ID NO: 4676 - DNA, 1551 bp, Homo sapiens
  source 1..1551: mol_type = genomic DNA
ctgcaggacccggcttccacgtgtgtcccggagccggcgtctcagcacacgctccgctccgggcctgggtgcctacagcagccagagcagcagggagtccgggacccgggcggcatctgggccaagttaggcgccgccgaggccagcgctgaacgtctccagggccggaggagccgcggggcgtccgggtctgagccgcagcaaatgggctccgacgtgcgggacctgaacgcgctgctgcccgccgtcccctccctgggtggcggcggcggctgtgccctgcctgtgagcggcgcggcgcagtgggcgccggtgctggactttgcgcccccgggcgcttcggcttacgggtcgttgggcggccccgcgccgccaccggctccgccgccacccccgccgccgccgcctcactccttcatcaaacaggagccgagctggggcggcgcggagccgcacgaggagcagtgcctgagcgccttcactgtccacttttccggccagttcactggcacagccggagcctgtcgctacgggcccttcggtcctcctccgcccagccaggcgtcatccggccaggccaggatgtttcctaacgcgccctacctgcccagctgcctcgagagccagcccgctattcgcaatcagggttacagcacggtcaccttcgacgggacgcccagctacggtcacacgccctcgcaccatgcggcgcagttccccaaccactcattcaagcatgaggatcccatgggccagcagggctcgctgggtgagcagcagtactcggtgccgcccccggtctatggctgccacacccccaccgacagctgcaccggcagccaggctttgctgctgaggacgccctacagcagtgacaatttataccaaatgacatcccagcttgaatgcatgacctggaatcagatgaacttaggagccaccttaaagggagttgctgctgggagctccagctcagtgaaatggacagaagggcagagcaaccacagcacagggtacgagagcgataaccacacaacgcccatcctctgcggagcccaatacagaatacacacgcacggtgtcttcagaggcattcaggatgtgcgacgtgtgcctggagtagccccgactcttgtacggtcggcatctgagaccagtgagaaacgccccttcatgtgtgcttacccaggctgcaataagagatattttaagctgtcccacttacagatgcacagcaggaagcacactggtgagaaaccataccagtgtgacttcaaggactgtgaacgaaggttttctcgttcagaccagctcaaaagacaccaaaggagacatacaggtgtgaaaccattccagtgtaaaacttgtcagcgaaagttctcccggtccgaccacctgaagacccacaccaggactcatacaggtaaaacaagtgaaaagcccttcagctgtcggtggccaagttgtcagaaaaagtttgcccggtcagatgaattagtccgccatcacaacatgcatcagagaaacatgaccaaactccagctggcgctt

SEQ ID NO: 4677 - DNA, 1542 bp, Homo sapiens
  source 1..1542: mol_type = genomic DNA
ctgcaggacccggcttccacgtgtgtcccggagccggcgtctcagcacacgctccgctccgggcctgggtgcctacagcagccagagcagcagggagtccgggacccgggcggcatctgggccaagttaggcgccgccgaggccagcgctgaacgtctccagggccggaggagccgcggggcgtccgggtctgagccgcagcaaatgggctccgacgtgcgggacctgaacgcgctgctgcccgccgtcccctccctgggtggcggcggcggctgtgccctgcctgtgagcggcgcggcgcagtgggcgccggtgctggactttgcgcccccgggcgcttcggcttacgggtcgttgggcggccccgcgccgccaccggctccgccgccacccccgccgccgccgcctcactccttcatcaaacaggagccgagctggggcggcgcggagccgcacgaggagcagtgcctgagcgccttcactgtccacttttccggccagttcactggcacagccggagcctgtcgctacgggcccttcggtcctcctccgcccagccaggcgtcatccggccaggccaggatgtttcctaacgcgccctacctgcccagctgcctcgagagccagcccgctattcgcaatcagggttacagcacggtcaccttcgacgggacgcccagctacggtcacacgccctcgcaccatgcggcgcagttccccaaccactcattcaagcatgaggatcccatgggccagcagggctcgctgggtgagcagcagtactcggtgccgcccccggtctatggctgccacacccccaccgacagctgcaccggcagccaggctttgctgctgaggacgccctacagcagtgacaatttataccaaatgacatcccagcttgaatgcatgacctggaatcagatgaacttaggagccaccttaaagggagttgctgctgggagctccagctcagtgaaatggacagaagggcagagcaaccacagcacagggtacgagagcgataaccacacaacgcccatcctctgcggagcccaatacagaatacacacgcacggtgtcttcagaggcattcaggatgtgcgacgtgtgcctggagtagccccgactcttgtacggtcggcatctgagaccagtgagaaacgccccttcatgtgtgcttacccaggctgcaataagagatattttaagctgtcccacttacagatgcacagcaggaagcacactggtgagaaaccataccagtgtgacttcaaggactgtgaacgaaggttttctcgttcagaccagctcaaaagacaccaaaggagacatacaggtgtgaaaccattccagtgtaaaacttgtcagcgaaagttctcccggtccgaccacctgaagacccacaccaggactcatacaggtgaaaagcccttcagctgtcggtggccaagttgtcagaaaaagtttgcccggtcagatgaattagtccgccatcacaacatgcatcagagaaacatgaccaaactccagctggcgctt

SEQ ID NO: 4678 - DNA, 906 bp, Homo sapiens
  source 1..906: mol_type = genomic DNA
atggagaagggttacagcacggtcaccttcgacgggacgcccagctacggtcacacgccctcgcaccatgcggcgcagttccccaaccactcattcaagcatgaggatcccatgggccagcagggctcgctgggtgagcagcagtactcggtgccgcccccggtctatggctgccacacccccaccgacagctgcaccggcagccaggctttgctgctgaggacgccctacagcagtgacaatttataccaaatgacatcccagcttgaatgcatgacctggaatcagatgaacttaggagccaccttaaagggagttgctgctgggagctccagctcagtgaaatggacagaagggcagagcaaccacagcacagggtacgagagcgataaccacacaacgcccatcctctgcggagcccaatacagaatacacacgcacggtgtcttcagaggcattcaggatgtgcgacgtgtgcctggagtagccccgactcttgtacggtcggcatctgagaccagtgagaaacgccccttcatgtgtgcttacccaggctgcaataagagatattttaagctgtcccacttacagatgcacagcaggaagcacactggtgagaaaccataccagtgtgacttcaaggactgtgaacgaaggttttctcgttcagaccagctcaaaagacaccaaaggagacatacaggtgtgaaaccattccagtgtaaaacttgtcagcgaaagttctcccggtccgaccacctgaagacccacaccaggactcatacaggtgaaaagcccttcagctgtcggtggccaagttgtcagaaaaagtttgcccggtcagatgaattagtccgccatcacaacatgcatcagagaaacatgaccaaactccagctggcgctt

SEQ ID NO: 4679 - DNA, 1710 bp, Homo sapiens
  source 1..1710: mol_type = genomic DNA
atgcaccagccgcctgagtccaccgccgcggccgccgccgctgcagacattagcgctaggaagatggcgcacccggcaatgttccctcgaaggggcagcggtagtggcagcgcctctgctctcaatgcagcaggtaccggcgtcggtagtaatgccacatcttccgaggattttccgcctccgtcgctgcttcagccgccgccccctgcagcatcttctacgtcgggaccacagcctccgcctccacaaagcctgaacctcctttcgcaggctcagctgcaggcacagcctcttgcgccaggcggaactcaaatgaaaaagaaaagtggcttccagataactagcgttactcctgctcagatctccgctagtatcagctctaacaacagtatagcagaggacactgagagctatgatgatctggatgaatctcacacggaagatctctcttcttcggagatccttgatgtgtcactttccagggctactgacttaggggagcccgaacgcagctcctcagaagagaccctaaataacttccaggaagccgagacacctggggcagtctctcccaaccagccccaccttcctcagcctcatttgcctcaccttccacaacagaatgttgtgatcaatgggaatgctcatccacaccacctccatcaccaccatcagattcatcatgggcaccacctccaacatggtcaccaccatccatctcatgttgctgtggccagtgcatccattactggtgggccaccctcaagcccagtatctagaaaactctctacaactggaagctctgacagtatcacaccagttgcaccaacttctgctgtatcatccagtggttcacctgcatctgtaatgactaatatgcgtgctccaagtactacaggtggaataggtataaattctgttactggcactagtacagtaaataatgttaacattactgctgtgggtagttttaatcctaatgtgacaagcagcatgcttggtaatgttaatataagtacaagcaatattcctagtgctgctggtgtgagtgttgggcctggagttaccagtggtgttaatgtgaatatcttgagtggcatgggcaatggtactatttcttcctctgctgctgttagcagtgttcctaatgcagctgcagggatgactgggggatcggtttcaagtcagcagcaacaaccaacagttaacacttcgaggttcagagttgtgaagttagattctagttctgagccctttaaaaaaggtagatggacttgcactgagttctatgaaaaagaaaatgctgtacctgctacagaaggtgtgctgataaataaagtggtggagactgtaaagcaaaatccgatagaagtgacttctgaaagggagagcactagtgggagttcagtgagcagtagtgtcagcacactgagtcactatacagagagtgtgggaagtggagagatgggagcccctactgtggtggtgcagcagcagcagcagcaacaacaacaacaacagcaacaaccagctctccaaggtgtgaccctccaacagatggattttggtagcactggtccacagagtattccagcagttagtataccacagagtatttctcagtcacagatctcacaagtacaattacagtctcaagaactgagctatcttaccatgaaggttgttttgcttattgtatatttgtgtatg

SEQ ID NO: 4680 - DNA, 432 bp, Homo sapiens
  source 1..432: mol_type = genomic DNA
atgaaatcccaatggtgtagaccagtggcgatggatctaggagtttaccaactgagacatttttcaatttctttcttgtcatccttgctggggactgaaaacgcttctgtgagacttgataatagctcctctggtgcaagtgtggtagctattgacaacaaaatcgagcaagctatggatctagtgaaaagccatttgatgtatgcggtcagagaagaagtggaggtcctcaaagagcaaatcaaagaactaatagagaaaaattcccagctggagcaggagaacaatctgctgaagacactggccagtcctgagcagcttgcccagtttcaggcccagctgcagactggctccccccctgccaccacccagccacagggcaccacacagccccccgcccagccagcatcgcagggctcaggaccaaccgca

SEQ ID NO: 4681 - DNA, 3219 bp, Homo sapiens
  source 1..3219: mol_type = genomic DNA
atgcaccagccgcctgagtccaccgccgcggccgccgccgctgcagacattagcgctaggaagatggcgcacccggcaatgttccctcgaaggggcagcggtagtggcagcgcctctgctctcaatgcagcaggtaccggcgtcggtagtaatgccacatcttccgaggattttccgcctccgtcgctgcttcagccgccgccccctgcagcatcttctacgtcgggaccacagcctccgcctccacaaagcctgaacctcctttcgcaggctcagctgcaggcacagcctcttgcgccaggcggaactcaaatgaaaaagaaaagtggcttccagataactagcgttactcctgctcagatctccgctagtatcagctctaacaacagtatagcagaggacactgagagctatgatgatctggatgaatctcacacggaagatctctcttcttcggagatccttgatgtgtcactttccagggctactgacttaggggagcccgaacgcagctcctcagaagagaccctaaataacttccaggaagccgagacacctggggcagtctctcccaaccagccccaccttcctcagcctcatttgcctcaccttccacaacagaatgttgtgatcaatgggaatgctcatccacaccacctccatcaccaccatcagattcatcatgggcaccacctccaacatggtcaccaccatccatctcatgttgctgtggccagtgcatccattactggtgggccaccctcaagcccagtatctagaaaactctctacaactggaagctctgacagtatcacaccagttgcaccaacttctgctgtatcatccagtggttcacctgcatctgtaatgactaatatgcgtgctccaagtactacaggtggaataggtataaattctgttactggcactagtacagtaaataatgttaacattactgctgtgggtagttttaatcctaatgtgacaagcagcatgcttggtaatgttaatataagtacaagcaatattcctagtgctgctggtgtgagtgttgggcctggagttaccagtggtgttaatgtgaatatcttgagtggcatgggcaatggtactatttcttcctctgctgctgttagcagtgttcctaatgcagctgcagggatgactgggggatcggtttcaagtcagcagcaacaaccaacagttaacacttcgaggttcagagttgtgaagttagattctagttctgagccctttaaaaaaggtagatggacttgcactgagttctatgaaaaagaaaatgctgtacctgctacagaaggtgtgctgataaataaagtggtggagactgtaaagcaaaatccgatagaagtgacttctgaaagggagagcactagtgggagttcagtgagcagtagtgtcagcacactgagtcactatacagagagtgtgggaagtggagagatgggagcccctactgtggtggtgcagcagcagcagcagcaacaacaacaacaacagcaacaaccagctctccaaggtgtgaccctccaacagatggattttggtagcactggtccacagagtattccagcagttagtataccacagagtatttctcagtcacagatctcacaagtacaattacagtctcaagaactgagctatcagcaaaagcaaggtcttcagccagtacctctgcaagccactatgagtgctgcaactggtatccagccatcgcctgtaaatgtggttggtgtaacttcagctttaggtcagcagccttccatttccagtttggctcaaccccagctaccatattctcaggcggctcctccagtgcaaactccccttccaggggcaccaccaccccaacagttacagtatggacaacagcaaccaatggtttctacacagatggccccaggccatgtcaaatcagtgactcaaaatcctgcttcagagtatgtacaacagcagccaattcttcaaacagcaatgtcctccggacagcccagttctgcaggagtaggagcaggaacaacagtgattcctgtggctcagccacagggtatccagctgccagtgcagcccacagcagtcccagcacaacctgcaggggcatctgtccagcctgttggccaggctccggcagcagtgtctgctgtacctactggcagtcagattgcaaatattggtcagcaagcaaacatacctactgcagtgcagcagccctctacccaggttccaccttcagttattcagcagggtgctcctccatcttcgcaagtggttccacctgctcaaactgggattattcatcagggagttcaaactagtgctccaagccttcctcaacaattggttattgcatcccaaagttccttgttaactgtgcctccccagccacaaggagtagaaccagtagctcaaggaattgtttcacagcagttgcctgcagttagttctttgccctctgctagtagtatttctgttacaagtcaggttagttcaactggtccttctggaatgccttctgccccaacaaacttggttccaccacaaaatatagcacaaacccctgctacccaaaatggtaatttggttcaaagtgttagtcaacctcccttgatagcaactaatacaaatttgcctttggcacaacagataccactaagttctacccagttctccgcacaatcattagctcaggcaattggaagccaaattgaagatgccaggcgtgcagcggagccctccttagttggcttacctcagactatcagtggtgacagtgggggaatgtcagcagtttcagatgggagtagcagcagcctagcagcctctgcttctcttttcccgttgaaggtgctaccgctgacgacacccctggtggatggcgaggatgagagctcctctggtgcaagtgtggtagctattgacaacaaaatcgagcaagctatggatctagtgaaaagccatttgatgtatgcggtcagagaagaagtggaggtcctcaaagagcaaatcaaagaactaatagagaaaaattcccagctggagcaggagaacaatctgctgaagacactggccagtcctgagcagcttgcccagtttcaggcccagctgcagactggctccccccctgccaccacccagccacagggcaccacacagccccccgcccagccagcatcgcagggctcaggaccaaccgca

SEQ ID NO: 4682 - DNA, 258 bp, Homo sapiens
  source 1..258: mol_type = genomic DNA
atggatctagtgaaaagccatttgatgtatgcggtcagagaagaagtggaggtcctcaaagagcaaatcaaagaactaatagagaaaaattcccagctggagcaggagaacaatctgctgaagacactggccagtcctgagcagcttgcccagtttcaggcccagctgcagactggctccccccctgccaccacccagccacagggcaccacacagccccccgcccagccagcatcgcagggctcaggaccaaccgca

SEQ ID NO: 4683 - DNA, 402 bp, Homo sapiens
  source 1..402: mol_type = genomic DNA
atgaacaccgaaatgtatcagacccccatggaggtggcggtctaccagctgcacaatttctccatctccttcttctcttctctgcttggaggggatgtggtttccgttaagctggacaacagtgcctccggagccagcgtggtggccatagacaacaagatcgaacaggccatggatctggtgaagaatcatctgatgtatgctgtgagagaggaggtggagatcctgaaggagcagatccgagagctggtggagaagaactcccagctagagcgtgagaacaccctgttgaagaccctggcaagcccagagcagctggagaagttccagtcctgtctgagccctgaagagccagctcccgaatccccacaagtgcccgaggcccctggtggttctgcggtg

SEQ ID NO: 4684 - DNA, 600 bp, Homo sapiens
  source 1..600: mol_type = genomic DNA
atggcccagtccaagctcgattgccgctcacctgtcggcctcgactgctgcaactgctgcctggacctggcccatcggagtgggctccagcgaggcagcagcggggagaacaacaacccgggcagccctacagtgagcaactttcggcagctgcaggaaaagctggtctttgagaacctcaataccgacaagctcaacagcataatgcggcaggattcgctagagccggtgctgcgggacccctgctacctgatcaacgagggcatctgcaaccgcaacatcgaccagaccatgctctccatcctgctcttcttccacagtgcctccggagccagcgtggtggccatagacaacaagatcgaacaggccatggatctggtgaagaatcatctgatgtatgctgtgagagaggaggtggagatcctgaaggagcagatccgagagctggtggagaagaactcccagctagagcgtgagaacaccctgttgaagaccctggcaagcccagagcagctggagaagttccagtcctgtctgagccctgaagagccagctcccgaatccccacaagtgcccgaggcccctggtggttctgcggtg

SEQ ID NO: 4685 - DNA, 2340 bp, Homo sapiens
  source 1..2340: mol_type = genomic DNA
atgtccaagatgccggccaagaagaagagctgcttccagatcaccagtgtcaccacggcccaggtggccactagcatcaccgaggacaccgagagcttggacgacccggacgagtcacgcacagaggacgtctcctccgagattttcgacgtctctcgggccacggattatggccctgaggaggtctgcgagcgcagctcttccgaagagacgcttaacaatgttggggatgcggagactcccgggaccgtctccccaaacctcctcctagatgggcagctggcagcggcggctgctgctcccgccaacggaggaggagtcgtttcggcccggagcgtgtctggggcgctcgccagtaccctggcggcggctgccacttcggcccccgcccccggagcacccggcggcccccagctcgcgggctcatccgccgggccagtgactgcagccccatctcagcctcccaccacatgtagttcccgttttcgcgtgatcaagctggaccacgggagcggagagccctatagacgcggccgatggacgtgtatggaatactatgagagggattcagacagcagcgtcctgactagatccggggattgcattagacacagcagtacttttgaccagactgcggagcgggacagcggcctgggcgccaccggagggtcggtggtggtagtagtggcctccatgcagggggcgcacgggcccgagtcgggaactgacagctccttgactgctgtgtcacagctacccccgtcggagaaaatgagccagcccactccggcccagccgcagagttttagcgttgggcagccacagccgccgccgccacccgtaggtggggctgtggctcaaagctcggctccgctgccgccgttcccgggagccgcgaccgggccgcagccaatgatggcagccgcgcagcccagccagccccagggagcggggcccgggggacagactctgccgccgacgaatgtaaccctggcgcagccggctatgtccctgcctccgcagccgggccctgcagtgggcgcccccgcggcgcagcagccccagcagttcgcgtatcctcagcctcagataccgcccggacatttgctgcccgtccagccctccggccagagtgagtacctgcagcagcacgtggccggcctgcagccgccaagccccgcgcagccctcgtccaccggcgccgcagcgagccccgccacggcggccacccttcccgtgggcaccggccagaatgcttcctcggtgggcgcgcagctcatgggcgcgtcttcccagcccagcgaagccatggccccccggacgggaccagcgcaaggcgggcaggtcgcgccttgtcagccgactggagtgcccccggctactgtgggaggcgtggtgcagccgtgcctcggtcctgccggggctgggcagccccagtccgtgcctccgccgcagatgggtggcagtggtccgctgtcagccgtacctggtggccctcacgccgtggtgcccggagttccaaacgtgcctgcagccgtgcccgctccaagcgtgcctagtgtgtctaccacttctgttactatgccaaatgtacccgcgcctctggcccagtcgcaacagctgagcagccatacgccagtcagcaggagcagcagcataatccagcatgttgggctgcccttagcgccaggcacacacagcgcaccaacaagtctaccacagtctgacctaagccagtttcaaactcagacccagcctttagtcgggcaagtcgacgatactagaagaaaatcagaacccctacctcaaccaccactttctctcattgctgaaaataagcctgttgtgaagccgcctgttgcagattccctggcaaacccccttcagttaacacctatgaacagtctggccacctctgtattcagcatagctattcctgttgatggtgatgaagacaggaatccttcaactgctttctaccaagcgttccatttgaacacgttaaaggaatcaaagagcctctgggatagtgcatctgggggaggtgttgtagccattgacaacaaaatagaacaagcaatggatctggtgaaaagccatttgatgtatgcagtaagagaagaagtggaagttttaaaggaacaaataaaagaattagttgaaagaaactctttacttgaacgagaaaatgcactgttaaaatctctttcaagcaatgatcaattatcccaactcccaacccaacaggccaatcctggtagcacttctcaacagcaagcagtgatagcacagcctccgcagccaacgcaacctccacagcagccgaatgtctcctcagca

SEQ ID NO: 4686 - DNA, 4449 bp, Homo sapiens
  source 1..4449: mol_type = genomic DNA
atggcgccgctcctgggccgcaagcccttcccgctggtgaagccgttgcccggagaggagccgctcttcaccatcccgcacactcaggaggccttccgcacccgggaagagtatgaagcccgcttggaaaggtacagtgagcgcatttggacgtgcaagagtactggaagcagtcagctaacacacaaggaagcctgggaggaagaacaggaagttgctgagcttttgaaggaggagtttcctgcctggtatgagaagcttgttctggaaatggttcaccataacacagcctccttagagaagttagtagatactgcttggttggagatcatgaccaaatatgctgtgggagaagagtgtgacttcgaggttgggaaggagaaaatgctcaaggtgaagattgtgaagattcatcctttggagaaagtggatgaagaggccactgagaagaaatctgatggtgcctgtgattctccatcaagtgacaaagagaactccagtcagattgctcaggaccatcagaagaaggagacagttgtgaaagaggatgaaggaaggagagagagtattaatgacagagcacgtagatcgccacgaaaacttcctacttcattaaaaaaaggagaaaggaaatgggctcctccaaaatttctgcctcacaaatatgatgtgaaactacaaaatgaagataagatcatcagtaacgtgccagcagacagcttgattcgtacagagcgcccaccaaataaggagatagttcgatactttatacggcataatgcattacgagctggtactggtgaaaatgcaccttgggtcgtagaagatgaattggtgaagaaatactctctgcccagcaagttcagtgactttttacttgatccatacaagtatatgactctcaacccttctactaagaggaagaatactggatccccagacaggaagccctcaaagaaatccaagacagacaactcttctcttagttcaccactaaatcctaagttatggtgtcacgtacacttgaagaagtcattgagtggctcgccactcaaagtgaagaactcaaagaattccaaatctcctgaagaacatctagaagaaatgatgaagatgatgtcgcccaataagctgcacactaactttcacattcctaaaaaaggcccacctgccaagaaaccagggaagcacagtgacaagcctttgaaggcaaagggcagaagcaaaggcatcctgaatggacagaaatccacagggaattccaaatctcccaaaaaaggactgaagactcctaaaaccaaaatgaagcagatgactttgttggatatggccaaaggcacgcagaagatgacacgagccccacggaattctgggggtacacctaggacctctagtaaacctcataaacatctgcctcctgcagccctacacctcattgcatactacaaagaaaacaaagacagggaggacaagaggagcgccctgtcctgtgttatctccaaaacagctcgtcttctctctagtgaagatagagctcgtctcccagaagaattgcgaagtcttgttcaaaaacgctatgaacttctagagcacaaaaagaggtgggcttctatgtctgaagaacaacggaaagaatatttgaaaaagaaacgggaggagctgaaaaagaagttgaaggaaaaagccaaagaacgaagagagaaagaaatgcttgagagattagaaaaacagaagcggtatgaggaccaagagttaactggcaaaaaccttccagcattcagattggtggatacccctgaagggctgcccaacacgctgtttggggatgtggccatggtggtggaattcttgagctgttattctgggctacttttaccagatgctcagtatcctattactgctgtgtcccttatggaagccttgagtgcagataagggtggctttttataccttaacagggtgttggtcatcctcttacagaccctcctacaagatgagatagcagaagactatggtgaattgggaatgaagctgtcggaaatccccttgactctgcattctgtttcagagctggtgcggctctgcttgcgcagatctgatgttcaggaggaaagcgagggctcagacacagatgacaataaagattcagctgcatttgaggataatgaggtacaagatgagttcctagaaaagctggagacctctgaattttttgagctgacgtcagaggagaagctacagatcttgacagcactgtgccaccggatcctcatgacatactcagtgcaagaccacatggagaccagacagcagatgtctgcagagttgtggaaggaacggcttgctgtgttgaaggaagaaaatgataagaagagagcagagaaacagaaacggaaagaaatggaagccaaaaataaagaaaatggaaaagttgagaatgggttaggcaaaactgataggaaaaaagaaattgtgaagtttgagccccaagtagatacagaagctgaagacatgattagtgctgtgaagagcagaaggttgcttgccattcaagctaagaaggaacgggaaatccaggaaagagaaatgaaagtgaaactggaacgccaagctgaagaagaacgaatacggaagcacaaagcagctgctgagaaagctttccaggaagggattgccaaggccaaactagtcatgcgcaggactcctattggcacagatcgaaaccataatagatactggctcttctcagatgaagttccaggattattcattgaaaaaggctgggtacatgacagcattgactaccgattcaaccatcactgcaaagaccacacagtctctggtgatgaggattactgtcctcgcagtaagaaagcaaacttaggtaaaaatgcaagcatgaacacacaacatggaacagcaacagaagttgctgtagagacaaccacacccaaacaaggacagaacctatggtttttatgtgatagtcaaaaggagctggatgagttgctaaactgtcttcaccctcagggaataagagaaagtcaacttaaagagagactagagaagaggtaccaggacattattcactctattcatctagcacggaagccaaatttgggtctaaaatcttgtgatggcaaccaggagcttttaaacttccttcgtagtgatctcattgaagttgcaacaaggttacaaaaaggaggacttggatatgtggaagaaacatcagaatttgaagcccgggtcatttcattagagaaattgaaggattttggtgagtgtgtgattgcccttcaggccagtgtcataaagaaatttctccaaggcttcatggctcccaagcaaaagagaagaaaactccaaagtgaagattcagcaaaaactgaggaagtggatgaagagaagaaaatggtagaggaagcaaaggttgcatctgcactggagaaatggaagacagcaatccgggaagctcagactttctccaggatgcacgtgctgcttgggatgcttgatgcctgtatcaagtgggatatgtccgcagaaaatgctaggtgcaaagtttgtcgaaagaaaggtgaggatgacaaattgatcttgtgtgatgagtgtaataaagccttccacctgttttgtctgaggccggccctctatgaagtaccagatggtgagtggcagtgcccagcttgccagcccgctactgccaggcgcaactcccgtggcaggaactatactgaagagtctgcttctgaggacagtgaagatgatgagagtgatgaagaggaggaggaggaagaagaggaggaggaggaagaagattatgaggtggctggtttgcgattgagacctcgaaagaccatccggggcaagcacagcgtcatcccccctgcagcaaggtcaggccggcgcccgggtaagaagccacactctaccaggaggtctcagcccaaggcaccacctgtggatgatgctgaggtggatgagctggtgcttcagaccaagcggagctcccggaggcaaagcctggagctgcagaagtgtgaagagatcctccacaagatcgtgaagtaccgcttcagctggcccttcagggagcctgtgaccagagatgaggccgaggactactatgatgtgatcacgcaccccatggactttcagacagtgcagaacaaatgttcctgtgggagctaccgctctgtgcaggagtttcttactgacatgaagcaagtgtttaccaatgctgaggtttacaactgccgtggcagccatgtgctaagctgcatggtgaagacagaacagtgtctagtggctctgttgcataaacaccttcctggccacccatatgtccgcaggaagcgcaagaagtttcctgataggcttgctgaagatgaaggggacagtgagccagaggccgttggacagtccaggggacgaagacagaagaag

SEQ ID NO: 4687 - DNA, 804 bp, Homo sapiens
  source 1..804: mol_type = genomic DNA
atgccgcgctccttcctggtcaagaagcatttcaacgcctccaaaaagccaaactacagcgaactggacacacatacagtgattatttccccgtatctctatgagagttactccatgcctgtcataccacaaccagagatcctcagctcaggagcatacagccccatcactgtgtggactaccgctgctccattccacgcccagctacccaatggcctctctcctctttccggatactcctcatctttggggcgagtgagtccccctcctccatctgacacctcctccaaggaccacagtggctcagaaagccccattagtgatgaagaggaaagactacagtccaagctttcagacccccatgccattgaagctgaaaagtttcagtgcaatttatgcaataagacctattcaactttttctgggctggccaaacataagcagctgcactgcgatgcccagtctagaaaatctttcagctgtaaatactgtgacaaggaatatgtgagcctgggcgccctgaagatgcatattcggacccacacattaccttgtgtttgcaagatctgcggcaaggcgttttccagaccctggttgcttcaaggacacattagaactcacacgggggagaagcctttttcttgccctcactgcaacagagcatttgcagacaggtcaaatctgagggctcatctgcagacccattctgatgtaaagaaataccagtgcaaaaactgctccaaaaccttctccagaatgtctctcctgcacaaacatgaggaatctggctgctgtgtagcacac

SEQ ID NO: 4688 - DNA, 1488 bp, Homo sapiens
  source 1..1488: mol_type = genomic DNA
atgaccacatttttcaccagcgtccccccctggattcaagatgcaaagcaggaggaggaagtgggctggaaactagttcccaggcctcggggccgggaggcggagagtcaagtgaagtgccaatgtgaaatttcgggaacacctttctcaaatggggagaagctgaggcctcacagcctcccgcaaccagagcagagaccatatagctgccctcagctgcactgtggcaaggcttttgcttccaaatacaagctgtataggcacatggccacccactcagcccagaaaccccaccagtgtatgtactgtgataagatgtttcaccgcaaggaccatctgcggaaccatctgcagacccatgatcctaacaaagaggccctccactgctctgagtgcggtaagaattacaatacgaagctgggctaccggcgccacctggccatgcatgctgccagcagcggtgacctcagctgcaaggtgtgcctgcagacctttgagagtacccaggccctgctagagcacctgaaggcccactcacgccgggtagcaggcggtgccaaggagaagaagcacccctgtgaccactgcgaccggcggttctatactcgtaaggatgtacggcggcacctagtggtgcacacaggccgtaaggacttcctgtgccagtactgtgcccagcggtttggccgtaaggaccacctgacgcgtcatgtcaagaagagccactcgcaggagctgctcaagatcaagacagagcccgtggacatgttaggcctactcagctgcagctccacagtcagtgtgaaggaagagctgagccctgtgctgtgcatggcctctcgggacgtaatggggaccaaggccttccctggcatgttgcccatgggcatgtatggtgcccacatccctaccatgcccagcacgggcgtgccacactccctggtgcacaacacgctgcccatgggtatgagctaccctctggaatcctcacctatctcttccccagctcagctccctccaaaataccagcttggatctacctcatacttgcccgacaaattgcccaaagtggaggtggatagttttctggcggagcttcctggaagcctgtctctctcatccgctgaaccccagcccgcctcacctcagccggcggcagctgcggccctcctagatgaagcactgcttgccaagagccccgccaacctctctgaggccctctgcgctgctaatgtggacttctcccacctactgggctttcttccactcaacctgcccccgtgtaacccacctggggccacaggaggcctggtcatgggctactcccaggctgaggcacagcccctgcttaccactttgcaagctcagcctcaagattccccaggagctgggggaccactgaactttgggcctctgcactccttgcctcctgtcttcacgtctggcctgagtagcaccaccctgcctcgtttccatcaagcattccag

SEQ ID NO: 4689 - DNA, 1923 bp, Homo sapiens
  source 1..1923: mol_type = genomic DNA
atggccacagggctcctgagagccaaaaaagaggcgttcgtggcattcagggatgtggctgtgtacttcacccaggaggagtggaggttgttgagccctgctcagaggaccctgcacagggaggtgatgctggagacttataaccatctggtctcactggaaattccatcttctaaaccaaaactcattgctcagctggagcgaggggaagcgccctggagagaggagagaaaatgtccactggacctctgtccagcagaatcgaagccagaaattcaacttagtccctcctgccctctgattttctccagtcagcaagctctcagccaacatgtgtggctgagtcatctctctcagctgttttcaagtttatgggcaggaaatcctctccacctgggaaaacactatccagaagatcagaaacaacagcaggatccattctgctttagtggcaaagcagaatggattcaagagggagaagactccagactcctgtttgggagagtaagcaaaaatggcacttcaaaggcactttccagcccacctgaagaacaacagccagcacagtccaaggaagacaacacagtggtggatatagggtccagccctgaacggagggcagatctagaggaaacagacaaagtattgcatggtttagaagtctcaggatttggagaaatcaaatatgaagagtttgggccaggctttatcaaggagtcaaacctccttagcctccagaagacacaaactggggagacaccttacatgtacactgagtggggagacagctttggcagtatgtcagtcctcatcaaaaacccaaggacacactctgggggaaagccttatgtgtgcagggaatgtgggcgaggctttacgtggaagtcaaacctgatcacacatcagaggacacactcaggggagaaaccttatgtgtgcaaggattgtggacgaggctttacttggaagtcgaacctctttacacatcagcggacacactcagggctcaagccttatgtgtgcaaggaatgtgggcagagctttagcctgaagtcaaacctcattacccaccagagggcgcacactggggagaagccttatgtttgcagggaatgtgggcgtggctttcgccagcattcacacctggtcagacacaagaggacacattcaggagagaagccttacatttgcagggagtgtgagcaaggctttagccagaagtcacacctcatcagacacttaaggacacacacaggagagaagccttatgtatgcacagaatgtgggcgtcactttagctggaaatcaaacctcaaaacacaccagaggacacactcaggggttaaaccttatgtctgcctggagtgcgggcagtgctttagcctgaagtcaaaccttaacaaacaccagaggtcacacacgggggagaagccatttgtatgtacggagtgtgggcgaggctttacccggaaatcaaccctgagcacgcaccagaggacacactcaggggagaagccatttgtatgtgctgagtgtggacgaggctttaatgataagtccaccctcatttcacaccagaggacacattcaggggaaaagccttttatgtgcagggagtgtggcagaaggtttcggcagaagcctaacctgtttaggcacaagagggcacactcaggtgcctttgtgtgcagggagtgtgggcaaggcttttgtgctaagttaactctcattaaacaccagagagcacacgcaggggggaagcctcatgtgtgcagggagtgtgggcaaggctttagccggcagtcacacctcattagacaccagaggacacattcaggagagaagccttatatttgcagaaagtgtggacggggctttagtcggaagtccaaccttatcagacatcagaggacacactcagga

SEQ ID NO: 4690 - DNA, 1794 bp, Homo sapiens
  source 1..1794: mol_type = genomic DNA
atgctggagacttataaccatctggtctcactggaaattccatcttctaaaccaaaactcattgctcagctggagcgaggggaagcgccctggagagaggagagaaaatgtccactggacctctgtccagaatcgaagccagaaattcaacttagtccctcctgccctctgattttctccagtcagcaagctctcagccaacatgtgtggctgagtcatctctctcagctgttttcaagtttatgggcaggaaatcctctccacctgggaaaacactatccagaagatcagaaacaacagcaggatccattctgctttagtggcaaagcagaatggattcaagagggagaagactccagactcctgtttgggagagtaagcaaaaatggcacttcaaaggcactttccagcccacctgaagaacaacagccagcacagtccaaggaagacaacacagtggtggatatagggtccagccctgaacggagggcagatctagaggaaacagacaaagtattgcatggtttagaagtctcaggatttggagaaatcaaatatgaagagtttgggccaggctttatcaaggagtcaaacctccttagcctccagaagacacaaactggggagacaccttacatgtacactgagtggggagacagctttggcagtatgtcagtcctcatcaaaaacccaaggacacactctgggggaaagccttatgtgtgcagggaatgtgggcgaggctttacgtggaagtcaaacctgatcacacatcagaggacacactcaggggagaaaccttatgtgtgcaaggattgtggacgaggctttacttggaagtcgaacctctttacacatcagcggacacactcagggctcaagccttatgtgtgcaaggaatgtgggcagagctttagcctgaagtcaaacctcattacccaccagagggcgcacactggggagaagccttatgtttgcagggaatgtgggcgtggctttcgccagcattcacacctggtcagacacaagaggacacattcaggagagaagccttacatttgcagggagtgtgagcaaggctttagccagaagtcacacctcatcagacacttaaggacacacacaggagagaagccttatgtatgcacagaatgtgggcgtcactttagctggaaatcaaacctcaaaacacaccagaggacacactcaggggttaaaccttatgtctgcctggagtgcgggcagtgctttagcctgaagtcaaaccttaacaaacaccagaggtcacacacgggggagaagccatttgtatgtacggagtgtgggcgaggctttacccggaaatcaaccctgagcacgcaccagaggacacactcaggggagaagccatttgtatgtgctgagtgtggacgaggctttaatgataagtccaccctcatttcacaccagaggacacattcaggggaaaagccttttatgtgcagggagtgtggcagaaggtttcggcagaagcctaacctgtttaggcacaagagggcacactcaggtgcctttgtgtgcagggagtgtgggcaaggcttttgtgctaagttaactctcattaaacaccagagagcacacgcaggggggaagcctcatgtgtgcagggagtgtgggcaaggctttagccggcagtcacacctcattagacaccagaggacacattcaggagagaagccttatatttgcagaaagtgtggacggggctttagtcggaagtccaaccttatcagacatcagaggacacactcagga

SEQ ID NO: 4691 - DNA, 1977 bp, Homo sapiens
  source 1..1977: mol_type = genomic DNA
atgagggtcaaccacacagtgtctacaatgctccctacatgcatggttcacagacaaaccatgagttgttccggggctggaggaataacggcgttcgtggcattcagggatgtggctgtgtacttcacccaggaggagtggaggttgttgagccctgctcagaggaccctgcacagggaggtgatgctggagacttataaccatctggtctcactggaaattccatcttctaaaccaaaactcattgctcagctggagcgaggggaagcgccctggagagaggagagaaaatgtccactggacctctgtccagaatcgaagccagaaattcaacttagtccctcctgccctctgattttctccagtcagcaagctctcagccaacatgtgtggctgagtcatctctctcagctgttttcaagtttatgggcaggaaatcctctccacctgggaaaacactatccagaagatcagaaacaacagcaggatccattctgctttagtggcaaagcagaatggattcaagagggagaagactccagactcctgtttgggagagtaagcaaaaatggcacttcaaaggcactttccagcccacctgaagaacaacagccagcacagtccaaggaagacaacacagtggtggatatagggtccagccctgaacggagggcagatctagaggaaacagacaaagtattgcatggtttagaagtctcaggatttggagaaatcaaatatgaagagtttgggccaggctttatcaaggagtcaaacctccttagcctccagaagacacaaactggggagacaccttacatgtacactgagtggggagacagctttggcagtatgtcagtcctcatcaaaaacccaaggacacactctgggggaaagccttatgtgtgcagggaatgtgggcgaggctttacgtggaagtcaaacctgatcacacatcagaggacacactcaggggagaaaccttatgtgtgcaaggattgtggacgaggctttacttggaagtcgaacctctttacacatcagcggacacactcagggctcaagccttatgtgtgcaaggaatgtgggcagagctttagcctgaagtcaaacctcattacccaccagagggcgcacactggggagaagccttatgtttgcagggaatgtgggcgtggctttcgccagcattcacacctggtcagacacaagaggacacattcaggagagaagccttacatttgcagggagtgtgagcaaggctttagccagaagtcacacctcatcagacacttaaggacacacacaggagagaagccttatgtatgcacagaatgtgggcgtcactttagctggaaatcaaacctcaaaacacaccagaggacacactcaggggttaaaccttatgtctgcctggagtgcgggcagtgctttagcctgaagtcaaaccttaacaaacaccagaggtcacacacgggggagaagccatttgtatgtacggagtgtgggcgaggctttacccggaaatcaaccctgagcacgcaccagaggacacactcaggggagaagccatttgtatgtgctgagtgtggacgaggctttaatgataagtccaccctcatttcacaccagaggacacattcaggggaaaagccttttatgtgcagggagtgtggcagaaggtttcggcagaagcctaacctgtttaggcacaagagggcacactcaggtgcctttgtgtgcagggagtgtgggcaaggcttttgtgctaagttaactctcattaaacaccagagagcacacgcaggggggaagcctcatgtgtgcagggagtgtgggcaaggctttagccggcagtcacacctcattagacaccagaggacacattcaggagagaagccttatatttgcagaaagtgtggacggggctttagtcggaagtccaaccttatcagacatcagaggacacactcagga

SEQ ID NO: 4692 - DNA, 1920 bp, Homo sapiens
  source 1..1920: mol_type = genomic DNA
atggccacagggctcctgagagccaaaaaagaggcgttcgtggcattcagggatgtggctgtgtacttcacccaggaggagtggaggttgttgagccctgctcagaggaccctgcacagggaggtgatgctggagacttataaccatctggtctcactggaaattccatcttctaaaccaaaactcattgctcagctggagcgaggggaagcgccctggagagaggagagaaaatgtccactggacctctgtccagaatcgaagccagaaattcaacttagtccctcctgccctctgattttctccagtcagcaagctctcagccaacatgtgtggctgagtcatctctctcagctgttttcaagtttatgggcaggaaatcctctccacctgggaaaacactatccagaagatcagaaacaacagcaggatccattctgctttagtggcaaagcagaatggattcaagagggagaagactccagactcctgtttgggagagtaagcaaaaatggcacttcaaaggcactttccagcccacctgaagaacaacagccagcacagtccaaggaagacaacacagtggtggatatagggtccagccctgaacggagggcagatctagaggaaacagacaaagtattgcatggtttagaagtctcaggatttggagaaatcaaatatgaagagtttgggccaggctttatcaaggagtcaaacctccttagcctccagaagacacaaactggggagacaccttacatgtacactgagtggggagacagctttggcagtatgtcagtcctcatcaaaaacccaaggacacactctgggggaaagccttatgtgtgcagggaatgtgggcgaggctttacgtggaagtcaaacctgatcacacatcagaggacacactcaggggagaaaccttatgtgtgcaaggattgtggacgaggctttacttggaagtcgaacctctttacacatcagcggacacactcagggctcaagccttatgtgtgcaaggaatgtgggcagagctttagcctgaagtcaaacctcattacccaccagagggcgcacactggggagaagccttatgtttgcagggaatgtgggcgtggctttcgccagcattcacacctggtcagacacaagaggacacattcaggagagaagccttacatttgcagggagtgtgagcaaggctttagccagaagtcacacctcatcagacacttaaggacacacacaggagagaagccttatgtatgcacagaatgtgggcgtcactttagctggaaatcaaacctcaaaacacaccagaggacacactcaggggttaaaccttatgtctgcctggagtgcgggcagtgctttagcctgaagtcaaaccttaacaaacaccagaggtcacacacgggggagaagccatttgtatgtacggagtgtgggcgaggctttacccggaaatcaaccctgagcacgcaccagaggacacactcaggggagaagccatttgtatgtgctgagtgtggacgaggctttaatgataagtccaccctcatttcacaccagaggacacattcaggggaaaagccttttatgtgcagggagtgtggcagaaggtttcggcagaagcctaacctgtttaggcacaagagggcacactcaggtgcctttgtgtgcagggagtgtgggcaaggcttttgtgctaagttaactctcattaaacaccagagagcacacgcaggggggaagcctcatgtgtgcagggagtgtgggcaaggctttagccggcagtcacacctcattagacaccagaggacacattcaggagagaagccttatatttgcagaaagtgtggacggggctttagtcggaagtccaaccttatcagacatcagaggacacactcagga

SEQ ID NO: 4693 - DNA, 1158 bp, Homo sapiens
  source 1..1158: mol_type = genomic DNA
atgtacactgagtggggagacagctttggcagtatgtcagtcctcatcaaaaacccaaggacacactctgggggaaagccttatgtgtgcagggaatgtgggcgaggctttacgtggaagtcaaacctgatcacacatcagaggacacactcaggggagaaaccttatgtgtgcaaggattgtggacgaggctttacttggaagtcgaacctctttacacatcagcggacacactcagggctcaagccttatgtgtgcaaggaatgtgggcagagctttagcctgaagtcaaacctcattacccaccagagggcgcacactggggagaagccttatgtttgcagggaatgtgggcgtggctttcgccagcattcacacctggtcagacacaagaggacacattcaggagagaagccttacatttgcagggagtgtgagcaaggctttagccagaagtcacacctcatcagacacttaaggacacacacaggagagaagccttatgtatgcacagaatgtgggcgtcactttagctggaaatcaaacctcaaaacacaccagaggacacactcaggggttaaaccttatgtctgcctggagtgcgggcagtgctttagcctgaagtcaaaccttaacaaacaccagaggtcacacacgggggagaagccatttgtatgtacggagtgtgggcgaggctttacccggaaatcaaccctgagcacgcaccagaggacacactcaggggagaagccatttgtatgtgctgagtgtggacgaggctttaatgataagtccaccctcatttcacaccagaggacacattcaggggaaaagccttttatgtgcagggagtgtggcagaaggtttcggcagaagcctaacctgtttaggcacaagagggcacactcaggtgcctttgtgtgcagggagtgtgggcaaggcttttgtgctaagttaactctcattaaacaccagagagcacacgcaggggggaagcctcatgtgtgcagggagtgtgggcaaggctttagccggcagtcacacctcattagacaccagaggacacattcaggagagaagccttatatttgcagaaagtgtggacggggctttagtcggaagtccaaccttatcagacatcagaggacacactcagga

SEQ ID NO: 4694 - DNA, 1389 bp, Homo sapiens
  source 1..1389: mol_type = genomic DNA
atggccacgttcccctgccagttatgtggcaagacgttcctcaccctggagaagttcacgattcacaattattcccactccagggagcggccgtacaagtgtgtgcagcctgactgtggcaaagcctttgtttccagatataaattgatgaggcatatggctacccattctccccagaaatctcaccagtgtgctcactgtgagaagacgttcaaccggaaagaccacctgaaaaaccacctccagacccacgaccccaacaaaatggcctttgggtgtgaggagtgtgggaagaagtacaacaccatgctgggctataagaggcacctggccctccatgcggccagcagtggggacctcacctgtggggtctgtgccctggagctagggagcaccgaggtgctactggaccacctcaaagcccatgcggaagagaagccccctagcggaaccaaggaaaagaagcaccagtgcgaccactgtgaaagatgcttctacacccggaaggatgtgcgacgccacctggtggtccacacaggatgcaaggacttcctgtgccagttctgtgcccagagatttgggcgcaaggatcacctcacccggcataccaagaagacccactcacaggagctgatgaaagagagcttgcagaccggagaccttctgagcaccttccacaccatctcgccttcattccaactgaaggctgctgccttgcctcctttccctttaggagcttctgcccagaacgggcttgcaagtagcttgccagctgaggtccatagcctcaccctcagtcccccagaacaagccgcccagcctatgcagccgctgccagagtccctggcctccctccacccctcggtatcccctggctctcctccgccaccccttcccaatcacaagtacaacaccacttctacctcatactccccacttgcaagcctgcccctcaaagcagatactaaaggtttttgcaatatcagtttgtttgaggacttgcctctgcaagagcctcagtcacctcaaaagctcaacccaggttttgatctggctaagggaaatgctggtaaagtaaacctgcccaaggagctgcctgcagatgctgtgaacctaacaatacctgcctctctggacctgtcccccctgttgggcttctggcagctgccccctcctgctacccaaaatacctttgggaatagcactcttgccctggggcctggggaatctttgccccacaggttaagctgtctggggcagcagcagcaagaacccccacttgccatgggcactgtgagcctgggccagctccccctgccccccatccctcatgtgttctcagctggcactggctctgccatcctgcctcatttccatcatgcattcaga

SEQ ID NO: 4695 - DNA, 1233 bp, Homo sapiens
  source 1..1233: mol_type = genomic DNA
atggctacccattctccccagaaatctcaccagtgtgctcactgtgagaagacgttcaaccggaaagaccacctgaaaaaccacctccagacccacgaccccaacaaaatggcctttgggtgtgaggagtgtgggaagaagtacaacaccatgctgggctataagaggcacctggccctccatgcggccagcagtggggacctcacctgtggggtctgtgccctggagctagggagcaccgaggtgctactggaccacctcaaagcccatgcggaagagaagccccctagcggaaccaaggaaaagaagcaccagtgcgaccactgtgaaagatgcttctacacccggaaggatgtgcgacgccacctggtggtccacacaggatgcaaggacttcctgtgccagttctgtgcccagagatttgggcgcaaggatcacctcacccggcataccaagaagacccactcacaggagctgatgaaagagagcttgcagaccggagaccttctgagcaccttccacaccatctcgccttcattccaactgaaggctgctgccttgcctcctttccctttaggagcttctgcccagaacgggcttgcaagtagcttgccagctgaggtccatagcctcaccctcagtcccccagaacaagccgcccagcctatgcagccgctgccagagtccctggcctccctccacccctcggtatcccctggctctcctccgccaccccttcccaatcacaagtacaacaccacttctacctcatactccccacttgcaagcctgcccctcaaagcagatactaaaggtttttgcaatatcagtttgtttgaggacttgcctctgcaagagcctcagtcacctcaaaagctcaacccaggttttgatctggctaagggaaatgctggtaaagtaaacctgcccaaggagctgcctgcagatgctgtgaacctaacaatacctgcctctctggacctgtcccccctgttgggcttctggcagctgccccctcctgctacccaaaatacctttgggaatagcactcttgccctggggcctggggaatctttgccccacaggttaagctgtctggggcagcagcagcaagaacccccacttgccatgggcactgtgagcctgggccagctccccctgccccccatccctcatgtgttctcagctggcactggctctgccatcctgcctcatttccatcatgcattcaga

SEQ ID NO: 4696 - DNA, 1413 bp, Homo sapiens
  source 1..1413: mol_type = genomic DNA
atgctgcagcttttcattgggacggcggacgaccgcctgctgcgcccgcacgccttctaccaggtgcaccgcatcacagggaagaccgtgtccaccaccagccacgaggccatcctctccaacaccaaagtcctggagatcccactcctgccggagaacagcatgcgagccgtcattgactgtgccggaatcctgaaactcagaaactccgacattgaacttcggaaaggagagacggacatcgggaggaagaacacacgggtacggctggtgttccgcgttcacgtcccgcaacccagcggccgcacgctgtccctgcaggtggcctccaaccccatcgaatgctcccagcgctcagctcaggagctgcctctggtggagaagcagagcacggacagctatccggtcgtgggcgggaagaagatggtcctgtctggccacaacttcctgcaggactccaaggtcattttcgtggagaaagccccagatggccaccatgtctgggagatggaagcgaaaactgaccgggacctgtgcaagccgaattctctggtggttgagatcccgccatttcggaatcagaggataaccagccccgttcacgtcagtttctacgtctgcaacgggaagagaaagcgaagccagtaccagcgtttcacctaccttcccgccaacgttccaattataaaaacagaacccactgatgattatgagcctgctccaacctgtggaccggtgagccaggggttaagtcctctcccaagaccatactacagccagcagctcgcgatgccacccgaccccagctcctgcctcgtggccggcttcccgccctgtccgcagagaagcaccctgatgccagcggcccctggcgtgagccccaagctccacgacctttctcccgctgcctacaccaagggcgttgccagcccgggccactgtcacctcggactcccgcagccggccggagaggcccccgccgtccaggacgtgcccaggccagtggccacgcaccccggctcgcccgggcagccacccccggccctgctgccacagcaggtgagtgcgcctccaagcagtagctgcccccctggtctcgaacactcgctctgccccagcagcccctctcctccactcccgcctgccacccaagagccgacctgcctgcagccctgcagcccagcgtgcccgcccgccacgggccgcccgcagcacctgccgtccacggtccgcagggacgagtctccgactgccgggccacggctgctgccagaggtgcatgaggacggtagtcctaatttggcccctattcctgtaacggtcaagcgagagcctgaagagttggaccagttgtacctggatgacgtaaatgaaataatacgaaatgacctctccagcacgagcacccactcc

SEQ ID NO: 4697 - DNA, 2109 bp, Homo sapiens
  source 1..2109: mol_type = genomic DNA
atgacggggctggaggaccaggagttcgacttcgagttcctcttcgagtttaaccagcgcgacgagggcgccgccgcggccgccccagaacactatggctatgcatcctccaacgtcagccccgccctgccgctccccacggcgcactccaccctgccggccccgtgccacaaccttcagacctccacaccgggcatcatcccgccggcggatcacccctcggggtacggagcagctttggacggtgggcccgcgggctacttcctctcctccggccacaccaggcctgatggggcccctgccctggagagtcctcgcatcgagataacctcgtgcttgggcctgtaccacaacaataaccagtttttccacgatgtggaggtggaagacgtcctccctagctccaaacggtccccctccacggccacgctgagtctgcccagcctggaggcctacagagacccctcgtgcctgagcccggccagcagcctgtcctcccggagctgcaactcagaggcctcctcctacgagtccaactactcgtacccgtacgcgtccccccagacgtcgccatggcagtctccctgcgtgtctcccaagaccacggaccccgaggagggctttccccgcgggctgggggcctgcacactgctgggttccccgcggcactccccctccacctcgccccgcgccagcgtcactgaggagagctggctgggtgcccgctcctccagacccgcgtccccttgcaacaagaggaagtacagcctcaacggccggcagccgccctactcaccccaccactcgcccacgccgtccccgcacggctccccgcgggtcagcgtgaccgacgactcgtggttgggcaacaccacccagtacaccagctcggccatcgtggccgccatcaacgcgctgaccaccgacagcagcctggacctgggagatggcgtccctgtcaagtcccgcaagaccaccctggagcagccgccctcagtggcgctcaaggtggagcccgtcggggaggacctgggcagccccccgcccccggccgacttcgcgcccgaagactactcctctttccagcacatcaggaagggcggcttctgcgaccagtacctggcggtgccgcagcacccctaccagtgggcgaagcccaagcccctgtcccctacgtcctacatgagcccgaccctgcccgccctggactggcagctgccgtcccactcaggcccgtatgagcttcggattgaggtgcagcccaagtcccaccaccgagcccactacgagacggagggcagccggggggccgtgaaggcgtcggccggaggacaccccatcgtgcagctgcatggctacttggagaatgagccgctgatgctgcagcttttcattgggacggcggacgaccgcctgctgcgcccgcacgccttctaccaggtgcaccgcatcacagggaagaccgtgtccaccaccagccacgaggccatcctctccaacaccaaagtcctggagatcccactcctgccggagaacagcatgcgagccgtcattgactgtgccggaatcctgaaactcagaaactccgacattgaacttcggaaaggagagacggacatcgggaggaagaacacacgggtacggctggtgttccgcgttcacgtcccgcaacccagcggccgcacgctgtccctgcaggtggcctccaaccccatcgaatgctcccagcgctcagctcaggagctgcctctggtggagaagcagagcacggacagctatccggtcgtgggcgggaagaagatggtcctgtctggccacaacttcctgcaggactccaaggtcattttcgtggagaaagccccagatggccaccatgtctgggagatggaagcgaaaactgaccgggacctgtgcaagccgaattctctggtggttgagatcccgccatttcggaatcagaggataaccagccccgttcacgtcagtttctacgtctgcaacgggaagagaaagcgaagccagtaccagcgtttcacctaccttcccgccaacggtaacgccatctttctaaccgtaagccgtgaacatgagcgcgtggggtgctttttc

SEQ ID NO: 4698 - DNA, 2436 bp, Homo sapiens
  source 1..2436: mol_type = genomic DNA
atgacggggctggaggaccaggagttcgacttcgagttcctcttcgagtttaaccagcgcgacgagggcgccgccgcggccgccccagaacactatggctatgcatcctccaacgtcagccccgccctgccgctccccacggcgcactccaccctgccggccccgtgccacaaccttcagacctccacaccgggcatcatcccgccggcggatcacccctcggggtacggagcagctttggacggtgggcccgcgggctacttcctctcctccggccacaccaggcctgatggggcccctgccctggagagtcctcgcatcgagataacctcgtgcttgggcctgtaccacaacaataaccagtttttccacgatgtggaggtggaagacgtcctccctagctccaaacggtccccctccacggccacgctgagtctgcccagcctggaggcctacagagacccctcgtgcctgagcccggccagcagcctgtcctcccggagctgcaactcagaggcctcctcctacgagtccaactactcgtacccgtacgcgtccccccagacgtcgccatggcagtctccctgcgtgtctcccaagaccacggaccccgaggagggctttccccgcgggctgggggcctgcacactgctgggttccccgcggcactccccctccacctcgccccgcgccagcgtcactgaggagagctggctgggtgcccgctcctccagacccgcgtccccttgcaacaagaggaagtacagcctcaacggccggcagccgccctactcaccccaccactcgcccacgccgtccccgcacggctccccgcgggtcagcgtgaccgacgactcgtggttgggcaacaccacccagtacaccagctcggccatcgtggccgccatcaacgcgctgaccaccgacagcagcctggacctgggagatggcgtccctgtcaagtcccgcaagaccaccctggagcagccgccctcagtggcgctcaaggtggagcccgtcggggaggacctgggcagccccccgcccccggccgacttcgcgcccgaagactactcctctttccagcacatcaggaagggcggcttctgcgaccagtacctggcggtgccgcagcacccctaccagtgggcgaagcccaagcccctgtcccctacgtcctacatgagcccgaccctgcccgccctggactggcagctgccgtcccactcaggcccgtatgagcttcggattgaggtgcagcccaagtcccaccaccgagcccactacgagacggagggcagccggggggccgtgaaggcgtcggccggaggacaccccatcgtgcagctgcatggctacttggagaatgagccgctgatgctgcagcttttcattgggacggcggacgaccgcctgctgcgcccgcacgccttctaccaggtgcaccgcatcacagggaagaccgtgtccaccaccagccacgaggccatcctctccaacaccaaagtcctggagatcccactcctgccggagaacagcatgcgagccgtcattgactgtgccggaatcctgaaactcagaaactccgacattgaacttcggaaaggagagacggacatcgggaggaagaacacacgggtacggctggtgttccgcgttcacgtcccgcaacccagcggccgcacgctgtccctgcaggtggcctccaaccccatcgaatgctcccagcgctcagctcaggagctgcctctggtggagaagcagagcacggacagctatccggtcgtgggcgggaagaagatggtcctgtctggccacaacttcctgcaggactccaaggtcattttcgtggagaaagccccagatggccaccatgtctgggagatggaagcgaaaactgaccgggacctgtgcaagccgaattctctggtggttgagatcccgccatttcggaatcagaggataaccagccccgttcacgtcagtttctacgtctgcaacgggaagagaaagcgaagccagtaccagcgtttcacctaccttcccgccaacgttccaattataaaaacagaacccactgatgattatgagcctgctccaacctgtggaccggtgagccaggggttaagtcctctcccaagaccatactacagccagcagctcgcgatgccacccgaccccagctcctgcctcgtggccggcttcccgccctgtccgcagagaagcaccctgatgccagcggcccctggcgtgagccccaagctccacgacctttctcccgctgcctacaccaagggcgttgccagcccgggccactgtcacctcggactcccgcagccggccggagaggcccccgccgtccaggacgtgcccaggccagtggccacgcaccccggctcgcccgggcagccacccccggccctgctgccacagcag

SEQ ID NO: 4699 - DNA, 2475 bp, Homo sapiens
  source 1..2475: mol_type = genomic DNA
atgccaagcaccagctttccagtcccttccaagtttccacttggccctgcggctgcggtcttcgggagaggagaaactttggggcccgcgccgcgcgccggcggcaccatgaagtcagcggaggaagaacactatggctatgcatcctccaacgtcagccccgccctgccgctccccacggcgcactccaccctgccggccccgtgccacaaccttcagacctccacaccgggcatcatcccgccggcggatcacccctcggggtacggagcagctttggacggtgggcccgcgggctacttcctctcctccggccacaccaggcctgatggggcccctgccctggagagtcctcgcatcgagataacctcgtgcttgggcctgtaccacaacaataaccagtttttccacgatgtggaggtggaagacgtcctccctagctccaaacggtccccctccacggccacgctgagtctgcccagcctggaggcctacagagacccctcgtgcctgagcccggccagcagcctgtcctcccggagctgcaactcagaggcctcctcctacgagtccaactactcgtacccgtacgcgtccccccagacgtcgccatggcagtctccctgcgtgtctcccaagaccacggaccccgaggagggctttccccgcgggctgggggcctgcacactgctgggttccccgcggcactccccctccacctcgccccgcgccagcgtcactgaggagagctggctgggtgcccgctcctccagacccgcgtccccttgcaacaagaggaagtacagcctcaacggccggcagccgccctactcaccccaccactcgcccacgccgtccccgcacggctccccgcgggtcagcgtgaccgacgactcgtggttgggcaacaccacccagtacaccagctcggccatcgtggccgccatcaacgcgctgaccaccgacagcagcctggacctgggagatggcgtccctgtcaagtcccgcaagaccaccctggagcagccgccctcagtggcgctcaaggtggagcccgtcggggaggacctgggcagccccccgcccccggccgacttcgcgcccgaagactactcctctttccagcacatcaggaagggcggcttctgcgaccagtacctggcggtgccgcagcacccctaccagtgggcgaagcccaagcccctgtcccctacgtcctacatgagcccgaccctgcccgccctggactggcagctgccgtcccactcaggcccgtatgagcttcggattgaggtgcagcccaagtcccaccaccgagcccactacgagacggagggcagccggggggccgtgaaggcgtcggccggaggacaccccatcgtgcagctgcatggctacttggagaatgagccgctgatgctgcagcttttcattgggacggcggacgaccgcctgctgcgcccgcacgccttctaccaggtgcaccgcatcacagggaagaccgtgtccaccaccagccacgaggccatcctctccaacaccaaagtcctggagatcccactcctgccggagaacagcatgcgagccgtcattgactgtgccggaatcctgaaactcagaaactccgacattgaacttcggaaaggagagacggacatcgggaggaagaacacacgggtacggctggtgttccgcgttcacgtcccgcaacccagcggccgcacgctgtccctgcaggtggcctccaaccccatcgaatgctcccagcgctcagctcaggagctgcctctggtggagaagcagagcacggacagctatccggtcgtgggcgggaagaagatggtcctgtctggccacaacttcctgcaggactccaaggtcattttcgtggagaaagccccagatggccaccatgtctgggagatggaagcgaaaactgaccgggacctgtgcaagccgaattctctggtggttgagatcccgccatttcggaatcagaggataaccagccccgttcacgtcagtttctacgtctgcaacgggaagagaaagcgaagccagtaccagcgtttcacctaccttcccgccaacgttccaattataaaaacagaacccactgatgattatgagcctgctccaacctgtggaccggtgagccaggggttaagtcctctcccaagaccatactacagccagcagctcgcgatgccacccgaccccagctcctgcctcgtggccggcttcccgccctgtccgcagagaagcaccctgatgccagcggcccctggcgtgagccccaagctccacgacctttctcccgctgcctacaccaagggcgttgccagcccgggccactgtcacctcggactcccgcagccggccggagaggcccccgccgtccaggacgtgcccaggccagtggccacgcaccccggctcgcccgggcagccacccccggccctgctgccacagcag

SEQ ID NO: 4700 - DNA, 2100 bp, Homo sapiens
  source 1..2100: mol_type = genomic DNA
atgacggggctggaggaccaggagttcgacttcgagttcctcttcgagtttaaccagcgcgacgagggcgccgccgcggccgccccagaacactatggctatgcatcctccaacgtcagccccgccctgccgctccccacggcgcactccaccctgccggccccgtgccacaaccttcagacctccacaccgggcatcatcccgccggcggatcacccctcggggtacggagcagctttggacggtgggcccgcgggctacttcctctcctccggccacaccaggcctgatggggcccctgccctggagagtcctcgcatcgagataacctcgtgcttgggcctgtaccacaacaataaccagtttttccacgatgtggaggtggaagacgtcctccctagctccaaacggtccccctccacggccacgctgagtctgcccagcctggaggcctacagagacccctcgtgcctgagcccggccagcagcctgtcctcccggagctgcaactcagaggcctcctcctacgagtccaactactcgtacccgtacgcgtccccccagacgtcgccatggcagtctccctgcgtgtctcccaagaccacggaccccgaggagggctttccccgcgggctgggggcctgcacactgctgggttccccgcggcactccccctccacctcgccccgcgccagcgtcactgaggagagctggctgggtgcccgctcctccagacccgcgtccccttgcaacaagaggaagtacagcctcaacggccggcagccgccctactcaccccaccactcgcccacgccgtccccgcacggctccccgcgggtcagcgtgaccgacgactcgtggttgggcaacaccacccagtacaccagctcggccatcgtggccgccatcaacgcgctgaccaccgacagcagcctggacctgggagatggcgtccctgtcaagtcccgcaagaccaccctggagcagccgccctcagtggcgctcaaggtggagcccgtcggggaggacctgggcagccccccgcccccggccgacttcgcgcccgaagactactcctctttccagcacatcaggaagggcggcttctgcgaccagtacctggcggtgccgcagcacccctaccagtgggcgaagcccaagcccctgtcccctacgtcctacatgagcccgaccctgcccgccctggactggcagctgccgtcccactcaggcccgtatgagcttcggattgaggtgcagcccaagtcccaccaccgagcccactacgagacggagggcagccggggggccgtgaaggcgtcggccggaggacaccccatcgtgcagctgcatggctacttggagaatgagccgctgatgctgcagcttttcattgggacggcggacgaccgcctgctgcgcccgcacgccttctaccaggtgcaccgcatcacagggaagaccgtgtccaccaccagccacgaggccatcctctccaacaccaaagtcctggagatcccactcctgccggagaacagcatgcgagccgtcattgactgtgccggaatcctgaaactcagaaactccgacattgaacttcggaaaggagagacggacatcgggaggaagaacacacgggtacggctggtgttccgcgttcacgtcccgcaacccagcggccgcacgctgtccctgcaggtggcctccaaccccatcgaatgctcccagcgctcagctcaggagctgcctctggtggagaagcagagcacggacagctatccggtcgtgggcgggaagaagatggtcctgtctggccacaacttcctgcaggactccaaggtcattttcgtggagaaagccccagatggccaccatgtctgggagatggaagcgaaaactgaccgggacctgtgcaagccgaattctctggtggttgagatcccgccatttcggaatcagaggataaccagccccgttcacgtcagtttctacgtctgcaacgggaagagaaagcgaagccagtaccagcgtttcacctaccttcccgccaacgtaaatgaaataatacgaaatgacctctccagcacgagcacccactcc

SEQ ID NO: 4701 - DNA, 2139 bp, Homo sapiens
  source 1..2139: mol_type = genomic DNA
atgccaagcaccagctttccagtcccttccaagtttccacttggccctgcggctgcggtcttcgggagaggagaaactttggggcccgcgccgcgcgccggcggcaccatgaagtcagcggaggaagaacactatggctatgcatcctccaacgtcagccccgccctgccgctccccacggcgcactccaccctgccggccccgtgccacaaccttcagacctccacaccgggcatcatcccgccggcggatcacccctcggggtacggagcagctttggacggtgggcccgcgggctacttcctctcctccggccacaccaggcctgatggggcccctgccctggagagtcctcgcatcgagataacctcgtgcttgggcctgtaccacaacaataaccagtttttccacgatgtggaggtggaagacgtcctccctagctccaaacggtccccctccacggccacgctgagtctgcccagcctggaggcctacagagacccctcgtgcctgagcccggccagcagcctgtcctcccggagctgcaactcagaggcctcctcctacgagtccaactactcgtacccgtacgcgtccccccagacgtcgccatggcagtctccctgcgtgtctcccaagaccacggaccccgaggagggctttccccgcgggctgggggcctgcacactgctgggttccccgcggcactccccctccacctcgccccgcgccagcgtcactgaggagagctggctgggtgcccgctcctccagacccgcgtccccttgcaacaagaggaagtacagcctcaacggccggcagccgccctactcaccccaccactcgcccacgccgtccccgcacggctccccgcgggtcagcgtgaccgacgactcgtggttgggcaacaccacccagtacaccagctcggccatcgtggccgccatcaacgcgctgaccaccgacagcagcctggacctgggagatggcgtccctgtcaagtcccgcaagaccaccctggagcagccgccctcagtggcgctcaaggtggagcccgtcggggaggacctgggcagccccccgcccccggccgacttcgcgcccgaagactactcctctttccagcacatcaggaagggcggcttctgcgaccagtacctggcggtgccgcagcacccctaccagtgggcgaagcccaagcccctgtcccctacgtcctacatgagcccgaccctgcccgccctggactggcagctgccgtcccactcaggcccgtatgagcttcggattgaggtgcagcccaagtcccaccaccgagcccactacgagacggagggcagccggggggccgtgaaggcgtcggccggaggacaccccatcgtgcagctgcatggctacttggagaatgagccgctgatgctgcagcttttcattgggacggcggacgaccgcctgctgcgcccgcacgccttctaccaggtgcaccgcatcacagggaagaccgtgtccaccaccagccacgaggccatcctctccaacaccaaagtcctggagatcccactcctgccggagaacagcatgcgagccgtcattgactgtgccggaatcctgaaactcagaaactccgacattgaacttcggaaaggagagacggacatcgggaggaagaacacacgggtacggctggtgttccgcgttcacgtcccgcaacccagcggccgcacgctgtccctgcaggtggcctccaaccccatcgaatgctcccagcgctcagctcaggagctgcctctggtggagaagcagagcacggacagctatccggtcgtgggcgggaagaagatggtcctgtctggccacaacttcctgcaggactccaaggtcattttcgtggagaaagccccagatggccaccatgtctgggagatggaagcgaaaactgaccgggacctgtgcaagccgaattctctggtggttgagatcccgccatttcggaatcagaggataaccagccccgttcacgtcagtttctacgtctgcaacgggaagagaaagcgaagccagtaccagcgtttcacctaccttcccgccaacgtaaatgaaataatacgaaatgacctctccagcacgagcacccactcc

SEQ ID NO: 4702 - DNA, 2829 bp, Homo sapiens
  source 1..2829: mol_type = genomic DNA
atgccaagcaccagctttccagtcccttccaagtttccacttggccctgcggctgcggtcttcgggagaggagaaactttggggcccgcgccgcgcgccggcggcaccatgaagtcagcggaggaagaacactatggctatgcatcctccaacgtcagccccgccctgccgctccccacggcgcactccaccctgccggccccgtgccacaaccttcagacctccacaccgggcatcatcccgccggcggatcacccctcggggtacggagcagctttggacggtgggcccgcgggctacttcctctcctccggccacaccaggcctgatggggcccctgccctggagagtcctcgcatcgagataacctcgtgcttgggcctgtaccacaacaataaccagtttttccacgatgtggaggtggaagacgtcctccctagctccaaacggtccccctccacggccacgctgagtctgcccagcctggaggcctacagagacccctcgtgcctgagcccggccagcagcctgtcctcccggagctgcaactcagaggcctcctcctacgagtccaactactcgtacccgtacgcgtccccccagacgtcgccatggcagtctccctgcgtgtctcccaagaccacggaccccgaggagggctttccccgcgggctgggggcctgcacactgctgggttccccgcggcactccccctccacctcgccccgcgccagcgtcactgaggagagctggctgggtgcccgctcctccagacccgcgtccccttgcaacaagaggaagtacagcctcaacggccggcagccgccctactcaccccaccactcgcccacgccgtccccgcacggctccccgcgggtcagcgtgaccgacgactcgtggttgggcaacaccacccagtacaccagctcggccatcgtggccgccatcaacgcgctgaccaccgacagcagcctggacctgggagatggcgtccctgtcaagtcccgcaagaccaccctggagcagccgccctcagtggcgctcaaggtggagcccgtcggggaggacctgggcagccccccgcccccggccgacttcgcgcccgaagactactcctctttccagcacatcaggaagggcggcttctgcgaccagtacctggcggtgccgcagcacccctaccagtgggcgaagcccaagcccctgtcccctacgtcctacatgagcccgaccctgcccgccctggactggcagctgccgtcccactcaggcccgtatgagcttcggattgaggtgcagcccaagtcccaccaccgagcccactacgagacggagggcagccggggggccgtgaaggcgtcggccggaggacaccccatcgtgcagctgcatggctacttggagaatgagccgctgatgctgcagcttttcattgggacggcggacgaccgcctgctgcgcccgcacgccttctaccaggtgcaccgcatcacagggaagaccgtgtccaccaccagccacgaggccatcctctccaacaccaaagtcctggagatcccactcctgccggagaacagcatgcgagccgtcattgactgtgccggaatcctgaaactcagaaactccgacattgaacttcggaaaggagagacggacatcgggaggaagaacacacgggtacggctggtgttccgcgttcacgtcccgcaacccagcggccgcacgctgtccctgcaggtggcctccaaccccatcgaatgctcccagcgctcagctcaggagctgcctctggtggagaagcagagcacggacagctatccggtcgtgggcgggaagaagatggtcctgtctggccacaacttcctgcaggactccaaggtcattttcgtggagaaagccccagatggccaccatgtctgggagatggaagcgaaaactgaccgggacctgtgcaagccgaattctctggtggttgagatcccgccatttcggaatcagaggataaccagccccgttcacgtcagtttctacgtctgcaacgggaagagaaagcgaagccagtaccagcgtttcacctaccttcccgccaacgttccaattataaaaacagaacccactgatgattatgagcctgctccaacctgtggaccggtgagccaggggttaagtcctctcccaagaccatactacagccagcagctcgcgatgccacccgaccccagctcctgcctcgtggccggcttcccgccctgtccgcagagaagcaccctgatgccagcggcccctggcgtgagccccaagctccacgacctttctcccgctgcctacaccaagggcgttgccagcccgggccactgtcacctcggactcccgcagccggccggagaggcccccgccgtccaggacgtgcccaggccagtggccacgcaccccggctcgcccgggcagccacccccggccctgctgccacagcaggtgagtgcgcctccaagcagtagctgcccccctggtctcgaacactcgctctgccccagcagcccctctcctccactcccgcctgccacccaagagccgacctgcctgcagccctgcagcccagcgtgcccgcccgccacgggccgcccgcagcacctgccgtccacggtccgcagggacgagtctccgactgccgggccacggctgctgccagaggtgcatgaggacggtagtcctaatttggcccctattcctgtaacggtcaagcgagagcctgaagagttggaccagttgtacctggatgacgtaaatgaaataatacgaaatgacctctccagcacgagcacccactcc

SEQ ID NO: 4703 - DNA, 1059 bp, Homo sapiens
  source 1..1059: mol_type = genomic DNA
atgctgcagcttttcattgggacggcggacgaccgcctgctgcgcccgcacgccttctaccaggtgcaccgcatcacagggaagaccgtgtccaccaccagccacgaggccatcctctccaacaccaaagtcctggagatcccactcctgccggagaacagcatgcgagccgtcattgactgtgccggaatcctgaaactcagaaactccgacattgaacttcggaaaggagagacggacatcgggaggaagaacacacgggtacggctggtgttccgcgttcacgtcccgcaacccagcggccgcacgctgtccctgcaggtggcctccaaccccatcgaatgctcccagcgctcagctcaggagctgcctctggtggagaagcagagcacggacagctatccggtcgtgggcgggaagaagatggtcctgtctggccacaacttcctgcaggactccaaggtcattttcgtggagaaagccccagatggccaccatgtctgggagatggaagcgaaaactgaccgggacctgtgcaagccgaattctctggtggttgagatcccgccatttcggaatcagaggataaccagccccgttcacgtcagtttctacgtctgcaacgggaagagaaagcgaagccagtaccagcgtttcacctaccttcccgccaacgttccaattataaaaacagaacccactgatgattatgagcctgctccaacctgtggaccggtgagccaggggttaagtcctctcccaagaccatactacagccagcagctcgcgatgccacccgaccccagctcctgcctcgtggccggcttcccgccctgtccgcagagaagcaccctgatgccagcggcccctggcgtgagccccaagctccacgacctttctcccgctgcctacaccaagggcgttgccagcccgggccactgtcacctcggactcccgcagccggccggagaggcccccgccgtccaggacgtgcccaggccagtggccacgcaccccggctcgcccgggcagccacccccggccctgctgccacagcag

SEQ ID NO: 4704 - DNA, 2790 bp, Homo sapiens
  source 1..2790: mol_type = genomic DNA
atgacggggctggaggaccaggagttcgacttcgagttcctcttcgagtttaaccagcgcgacgagggcgccgccgcggccgccccagaacactatggctatgcatcctccaacgtcagccccgccctgccgctccccacggcgcactccaccctgccggccccgtgccacaaccttcagacctccacaccgggcatcatcccgccggcggatcacccctcggggtacggagcagctttggacggtgggcccgcgggctacttcctctcctccggccacaccaggcctgatggggcccctgccctggagagtcctcgcatcgagataacctcgtgcttgggcctgtaccacaacaataaccagtttttccacgatgtggaggtggaagacgtcctccctagctccaaacggtccccctccacggccacgctgagtctgcccagcctggaggcctacagagacccctcgtgcctgagcccggccagcagcctgtcctcccggagctgcaactcagaggcctcctcctacgagtccaactactcgtacccgtacgcgtccccccagacgtcgccatggcagtctccctgcgtgtctcccaagaccacggaccccgaggagggctttccccgcgggctgggggcctgcacactgctgggttccccgcggcactccccctccacctcgccccgcgccagcgtcactgaggagagctggctgggtgcccgctcctccagacccgcgtccccttgcaacaagaggaagtacagcctcaacggccggcagccgccctactcaccccaccactcgcccacgccgtccccgcacggctccccgcgggtcagcgtgaccgacgactcgtggttgggcaacaccacccagtacaccagctcggccatcgtggccgccatcaacgcgctgaccaccgacagcagcctggacctgggagatggcgtccctgtcaagtcccgcaagaccaccctggagcagccgccctcagtggcgctcaaggtggagcccgtcggggaggacctgggcagccccccgcccccggccgacttcgcgcccgaagactactcctctttccagcacatcaggaagggcggcttctgcgaccagtacctggcggtgccgcagcacccctaccagtgggcgaagcccaagcccctgtcccctacgtcctacatgagcccgaccctgcccgccctggactggcagctgccgtcccactcaggcccgtatgagcttcggattgaggtgcagcccaagtcccaccaccgagcccactacgagacggagggcagccggggggccgtgaaggcgtcggccggaggacaccccatcgtgcagctgcatggctacttggagaatgagccgctgatgctgcagcttttcattgggacggcggacgaccgcctgctgcgcccgcacgccttctaccaggtgcaccgcatcacagggaagaccgtgtccaccaccagccacgaggccatcctctccaacaccaaagtcctggagatcccactcctgccggagaacagcatgcgagccgtcattgactgtgccggaatcctgaaactcagaaactccgacattgaacttcggaaaggagagacggacatcgggaggaagaacacacgggtacggctggtgttccgcgttcacgtcccgcaacccagcggccgcacgctgtccctgcaggtggcctccaaccccatcgaatgctcccagcgctcagctcaggagctgcctctggtggagaagcagagcacggacagctatccggtcgtgggcgggaagaagatggtcctgtctggccacaacttcctgcaggactccaaggtcattttcgtggagaaagccccagatggccaccatgtctgggagatggaagcgaaaactgaccgggacctgtgcaagccgaattctctggtggttgagatcccgccatttcggaatcagaggataaccagccccgttcacgtcagtttctacgtctgcaacgggaagagaaagcgaagccagtaccagcgtttcacctaccttcccgccaacgttccaattataaaaacagaacccactgatgattatgagcctgctccaacctgtggaccggtgagccaggggttaagtcctctcccaagaccatactacagccagcagctcgcgatgccacccgaccccagctcctgcctcgtggccggcttcccgccctgtccgcagagaagcaccctgatgccagcggcccctggcgtgagccccaagctccacgacctttctcccgctgcctacaccaagggcgttgccagcccgggccactgtcacctcggactcccgcagccggccggagaggcccccgccgtccaggacgtgcccaggccagtggccacgcaccccggctcgcccgggcagccacccccggccctgctgccacagcaggtgagtgcgcctccaagcagtagctgcccccctggtctcgaacactcgctctgccccagcagcccctctcctccactcccgcctgccacccaagagccgacctgcctgcagccctgcagcccagcgtgcccgcccgccacgggccgcccgcagcacctgccgtccacggtccgcagggacgagtctccgactgccgggccacggctgctgccagaggtgcatgaggacggtagtcctaatttggcccctattcctgtaacggtcaagcgagagcctgaagagttggaccagttgtacctggatgacgtaaatgaaataatacgaaatgacctctccagcacgagcacccactcc

SEQ ID NO: 4705 - DNA, 2106 bp, Homo sapiens
  source 1..2106: mol_type = genomic DNA
atgtcacctcgaaccagcctcgccgaggacagctgcctgggccgccactcgcccgtgccccgtccggcctcccgctcctcatcgcctggtgccaagcggaggcattcgtgcgccgaggccttggttgccctgccgcccggagcctcaccccagcgctcccggagcccctcgccgcagccctcatctcacgtggcaccccaggaccacggctccccggctgggtacccccctgtggctggctctgccgtgatcatggatgccctgaacagcctcgccacggactcgccttgtgggatcccccccaagatgtggaagaccagccctgacccctcgccggtgtctgccgccccatccaaggccggcctgcctcgccacatctacccggccgtggagttcctggggccctgcgagcagggcgagaggagaaactcggctccagaatccatcctgctggttccgcccacttggcccaagccgctggtgcctgccattcccatctgcagcatcccagtgactgcatccctccctccacttgagtggccgctgtccagtcagtcaggctcttacgagctgcggatcgaggtgcagcccaagccacatcaccgggcccactatgagacagaaggcagccgaggggctgtcaaagctccaactggaggccaccctgtggttcagctccatggctacatggaaaacaagcctctgggacttcagatcttcattgggacagctgatgagcggatccttaagccgcacgccttctaccaggtgcaccgaatcacggggaaaactgtcaccaccaccagctatgagaagatagtgggcaacaccaaagtcctggagatacccttggagcccaaaaacaacatgagggcaaccatcgactgtgcggggatcttgaagcttagaaacgccgacattgagctgcggaaaggcgagacggacattggaagaaagaacacgcgggtgagactggttttccgagttcacatcccagagtccagtggcagaatcgtctctttacagactgcatctaaccccatcgagtgctcccagcgatctgctcacgagctgcccatggttgaaagacaagacacagacagctgcctggtctatggcggccagcaaatgatcctcacggggcagaactttacatccgagtccaaagttgtgtttactgagaagaccacagatggacagcaaatttgggagatggaagccacggtggataaggacaagagccagcccaacatgctttttgttgagatccctgaatatcggaacaagcatatccgcacacctgtaaaagtgaacttctacgtcatcaatgggaagagaaaacgaagtcagcctcagcactttacctaccacccagtcccagccatcaagacggagcccacggatgaatatgaccccactctgatctgcagccccacccatggaggcctggggagccagccttactacccccagcacccgatggtggccgagtccccctcctgcctcgtggccaccatggctccctgccagcagttccgcacggggctctcatcccctgacgcccgctaccagcaacagaacccagcggccgtactctaccagcggagcaagagcctgagccccagcctgctgggctatcagcagccggccctcatggccgccccgctgtcccttgcggacgctcaccgctctgtgctggtgcacgccggctcccagggccagagctcagccctgctccacccctctccgaccaaccagcaggcctcgcctgtgatccactactcacccaccaaccagcagctgcgctgcggaagccaccaggagttccagcacatcatgtactgcgagaatttcgcaccaggcaccaccagacctggcccgcccccggtcagtcaaggtcagaggctgagcccgggttcctaccccacagtcattcagcagcagaatgccacgagccaaagagccgccaaaaacggacccccggtcagtgaccaaaaggaagtattacctgcgggggtgaccattaaacaggagcagaacttggaccagacctacttggatgatgagctgatagacacacaccttagctggatacaaaacatatta

SEQ ID NO: 4706 - DNA, 2775 bp, Homo sapiens
  source 1..2775: mol_type = genomic DNA
atgaacgcccccgagcggcagccccaacccgacggcggggacgccccaggccacgagcctgggggcagcccccaagacgagcttgacttctccatcctcttcgactatgagtatttgaatccgaacgaagaagagccgaatgcacataaggtcgccagcccaccctccggacccgcataccccgatgatgtcctggactatggcctcaagccatacagcccccttgctagtctctctggcgagccccccggccgattcggagagccggatagggtagggccgcagaagtttctgagcgcggccaagccagcaggggcctcgggcctgagccctcggatcgagatcactccgtcccacgaactgatccaggcagtggggcccctccgcatgagagacgcgggcctcctggtggagcagccgcccctggccggggtggccgccagcccgaggttcaccctgcccgtgcccggcttcgagggctaccgcgagccgctttgcttgagccccgctagcagcggctcctctgccagcttcatttctgacaccttctccccctacacctcgccctgcgtctcgcccaataacggcgggcccgacgacctgtgtccgcagtttcaaaacatccctgctcattattcccccagaacctcgccaataatgtcacctcgaaccagcctcgccgaggacagctgcctgggccgccactcgcccgtgccccgtccggcctcccgctcctcatcgcctggtgccaagcggaggcattcgtgcgccgaggccttggttgccctgccgcccggagcctcaccccagcgctcccggagcccctcgccgcagccctcatctcacgtggcaccccaggaccacggctccccggctgggtacccccctgtggctggctctgccgtgatcatggatgccctgaacagcctcgccacggactcgccttgtgggatcccccccaagatgtggaagaccagccctgacccctcgccggtgtctgccgccccatccaaggccggcctgcctcgccacatctacccggccgtggagttcctggggccctgcgagcagggcgagaggagaaactcggctccagaatccatcctgctggttccgcccacttggcccaagccgctggtgcctgccattcccatctgcagcatcccagtgactgcatccctccctccacttgagtggccgctgtccagtcagtcaggctcttacgagctgcggatcgaggtgcagcccaagccacatcaccgggcccactatgagacagaaggcagccgaggggctgtcaaagctccaactggaggccaccctgtggttcagctccatggctacatggaaaacaagcctctgggacttcagatcttcattgggacagctgatgagcggatccttaagccgcacgccttctaccaggtgcaccgaatcacggggaaaactgtcaccaccaccagctatgagaagatagtgggcaacaccaaagtcctggagatacccttggagcccaaaaacaacatgagggcaaccatcgactgtgcggggatcttgaagcttagaaacgccgacattgagctgcggaaaggcgagacggacattggaagaaagaacacgcgggtgagactggttttccgagttcacatcccagagtccagtggcagaatcgtctctttacagactgcatctaaccccatcgagtgctcccagcgatctgctcacgagctgcccatggttgaaagacaagacacagacagctgcctggtctatggcggccagcaaatgatcctcacggggcagaactttacatccgagtccaaagttgtgtttactgagaagaccacagatggacagcaaatttgggagatggaagccacggtggataaggacaagagccagcccaacatgctttttgttgagatccctgaatatcggaacaagcatatccgcacacctgtaaaagtgaacttctacgtcatcaatgggaagagaaaacgaagtcagcctcagcactttacctaccacccagtcccagccatcaagacggagcccacggatgaatatgaccccactctgatctgcagccccacccatggaggcctggggagccagccttactacccccagcacccgatggtggccgagtccccctcctgcctcgtggccaccatggctccctgccagcagttccgcacggggctctcatcccctgacgcccgctaccagcaacagaacccagcggccgtactctaccagcggagcaagagcctgagccccagcctgctgggctatcagcagccggccctcatggccgccccgctgtcccttgcggacgctcaccgctctgtgctggtgcacgccggctcccagggccagagctcagccctgctccacccctctccgaccaaccagcaggcctcgcctgtgatccactactcacccaccaaccagcagctgcgctgcggaagccaccaggagttccagcacatcatgtactgcgagaatttcgcaccaggcaccaccagacctggcccgcccccggtcagtcaaggtcagaggctgagcccgggttcctaccccacagtcattcagcagcagaatgccacgagccaaagagccgccaaaaacggacccccggtcagtgaccaaaaggaagtattacctgcgggggtgaccattaaacaggagcagaacttggaccagacctacttggatgatgttaatgaaattatcaggaaggagttttcaggacctcctgccagaaatcagacg

SEQ ID NO: 4707 - DNA, 2715 bp, Homo sapiens
  source 1..2715: mol_type = genomic DNA
atgcagagagaggctgcgttcagactggggcactgccatcccctccgcatcatggggtctgtggaccaagaagagccgaatgcacataaggtcgccagcccaccctccggacccgcataccccgatgatgtcctggactatggcctcaagccatacagcccccttgctagtctctctggcgagccccccggccgattcggagagccggatagggtagggccgcagaagtttctgagcgcggccaagccagcaggggcctcgggcctgagccctcggatcgagatcactccgtcccacgaactgatccaggcagtggggcccctccgcatgagagacgcgggcctcctggtggagcagccgcccctggccggggtggccgccagcccgaggttcaccctgcccgtgcccggcttcgagggctaccgcgagccgctttgcttgagccccgctagcagcggctcctctgccagcttcatttctgacaccttctccccctacacctcgccctgcgtctcgcccaataacggcgggcccgacgacctgtgtccgcagtttcaaaacatccctgctcattattcccccagaacctcgccaataatgtcacctcgaaccagcctcgccgaggacagctgcctgggccgccactcgcccgtgccccgtccggcctcccgctcctcatcgcctggtgccaagcggaggcattcgtgcgccgaggccttggttgccctgccgcccggagcctcaccccagcgctcccggagcccctcgccgcagccctcatctcacgtggcaccccaggaccacggctccccggctgggtacccccctgtggctggctctgccgtgatcatggatgccctgaacagcctcgccacggactcgccttgtgggatcccccccaagatgtggaagaccagccctgacccctcgccggtgtctgccgccccatccaaggccggcctgcctcgccacatctacccggccgtggagttcctggggccctgcgagcagggcgagaggagaaactcggctccagaatccatcctgctggttccgcccacttggcccaagccgctggtgcctgccattcccatctgcagcatcccagtgactgcatccctccctccacttgagtggccgctgtccagtcagtcaggctcttacgagctgcggatcgaggtgcagcccaagccacatcaccgggcccactatgagacagaaggcagccgaggggctgtcaaagctccaactggaggccaccctgtggttcagctccatggctacatggaaaacaagcctctgggacttcagatcttcattgggacagctgatgagcggatccttaagccgcacgccttctaccaggtgcaccgaatcacggggaaaactgtcaccaccaccagctatgagaagatagtgggcaacaccaaagtcctggagatacccttggagcccaaaaacaacatgagggcaaccatcgactgtgcggggatcttgaagcttagaaacgccgacattgagctgcggaaaggcgagacggacattggaagaaagaacacgcgggtgagactggttttccgagttcacatcccagagtccagtggcagaatcgtctctttacagactgcatctaaccccatcgagtgctcccagcgatctgctcacgagctgcccatggttgaaagacaagacacagacagctgcctggtctatggcggccagcaaatgatcctcacggggcagaactttacatccgagtccaaagttgtgtttactgagaagaccacagatggacagcaaatttgggagatggaagccacggtggataaggacaagagccagcccaacatgctttttgttgagatccctgaatatcggaacaagcatatccgcacacctgtaaaagtgaacttctacgtcatcaatgggaagagaaaacgaagtcagcctcagcactttacctaccacccagtcccagccatcaagacggagcccacggatgaatatgaccccactctgatctgcagccccacccatggaggcctggggagccagccttactacccccagcacccgatggtggccgagtccccctcctgcctcgtggccaccatggctccctgccagcagttccgcacggggctctcatcccctgacgcccgctaccagcaacagaacccagcggccgtactctaccagcggagcaagagcctgagccccagcctgctgggctatcagcagccggccctcatggccgccccgctgtcccttgcggacgctcaccgctctgtgctggtgcacgccggctcccagggccagagctcagccctgctccacccctctccgaccaaccagcaggcctcgcctgtgatccactactcacccaccaaccagcagctgcgctgcggaagccaccaggagttccagcacatcatgtactgcgagaatttcgcaccaggcaccaccagacctggcccgcccccggtcagtcaaggtcagaggctgagcccgggttcctaccccacagtcattcagcagcagaatgccacgagccaaagagccgccaaaaacggacccccggtcagtgaccaaaaggaagtattacctgcgggggtgaccattaaacaggagcagaacttggaccagacctacttggatgatgttaatgaaattatcaggaaggagttttcaggacctcctgccagaaatcagacg

SEQ ID NO: 4708 - DNA, 2703 bp, Homo sapiens
  source 1..2703: mol_type = genomic DNA
atgcagagagaggctgcgttcagactggggcactgccatcccctccgcatcatggggtctgtggaccaagaagagccgaatgcacataaggtcgccagcccaccctccggacccgcataccccgatgatgtcctggactatggcctcaagccatacagcccccttgctagtctctctggcgagccccccggccgattcggagagccggatagggtagggccgcagaagtttctgagcgcggccaagccagcaggggcctcgggcctgagccctcggatcgagatcactccgtcccacgaactgatccaggcagtggggcccctccgcatgagagacgcgggcctcctggtggagcagccgcccctggccggggtggccgccagcccgaggttcaccctgcccgtgcccggcttcgagggctaccgcgagccgctttgcttgagccccgctagcagcggctcctctgccagcttcatttctgacaccttctccccctacacctcgccctgcgtctcgcccaataacggcgggcccgacgacctgtgtccgcagtttcaaaacatccctgctcattattcccccagaacctcgccaataatgtcacctcgaaccagcctcgccgaggacagctgcctgggccgccactcgcccgtgccccgtccggcctcccgctcctcatcgcctggtgccaagcggaggcattcgtgcgccgaggccttggttgccctgccgcccggagcctcaccccagcgctcccggagcccctcgccgcagccctcatctcacgtggcaccccaggaccacggctccccggctgggtacccccctgtggctggctctgccgtgatcatggatgccctgaacagcctcgccacggactcgccttgtgggatcccccccaagatgtggaagaccagccctgacccctcgccggtgtctgccgccccatccaaggccggcctgcctcgccacatctacccggccgtggagttcctggggccctgcgagcagggcgagaggagaaactcggctccagaatccatcctgctggttccgcccacttggcccaagccgctggtgcctgccattcccatctgcagcatcccagtgactgcatccctccctccacttgagtggccgctgtccagtcagtcaggctcttacgagctgcggatcgaggtgcagcccaagccacatcaccgggcccactatgagacagaaggcagccgaggggctgtcaaagctccaactggaggccaccctgtggttcagctccatggctacatggaaaacaagcctctgggacttcagatcttcattgggacagctgatgagcggatccttaagccgcacgccttctaccaggtgcaccgaatcacggggaaaactgtcaccaccaccagctatgagaagatagtgggcaacaccaaagtcctggagatacccttggagcccaaaaacaacatgagggcaaccatcgactgtgcggggatcttgaagcttagaaacgccgacattgagctgcggaaaggcgagacggacattggaagaaagaacacgcgggtgagactggttttccgagttcacatcccagagtccagtggcagaatcgtctctttacagactgcatctaaccccatcgagtgctcccagcgatctgctcacgagctgcccatggttgaaagacaagacacagacagctgcctggtctatggcggccagcaaatgatcctcacggggcagaactttacatccgagtccaaagttgtgtttactgagaagaccacagatggacagcaaatttgggagatggaagccacggtggataaggacaagagccagcccaacatgctttttgttgagatccctgaatatcggaacaagcatatccgcacacctgtaaaagtgaacttctacgtcatcaatgggaagagaaaacgaagtcagcctcagcactttacctaccacccagtcccagccatcaagacggagcccacggatgaatatgaccccactctgatctgcagccccacccatggaggcctggggagccagccttactacccccagcacccgatggtggccgagtccccctcctgcctcgtggccaccatggctccctgccagcagttccgcacggggctctcatcccctgacgcccgctaccagcaacagaacccagcggccgtactctaccagcggagcaagagcctgagccccagcctgctgggctatcagcagccggccctcatggccgccccgctgtcccttgcggacgctcaccgctctgtgctggtgcacgccggctcccagggccagagctcagccctgctccacccctctccgaccaaccagcaggcctcgcctgtgatccactactcacccaccaaccagcagctgcgctgcggaagccaccaggagttccagcacatcatgtactgcgagaatttcgcaccaggcaccaccagacctggcccgcccccggtcagtcaaggtcagaggctgagcccgggttcctaccccacagtcattcagcagcagaatgccacgagccaaagagccgccaaaaacggacccccggtcagtgaccaaaaggaagtattacctgcgggggtgaccattaaacaggagcagaacttggaccagacctacttggatgatgagctgatagacacacaccttagctggatacaaaacatatta

SEQ ID NO: 4709 - DNA, 2763 bp, Homo sapiens
  source 1..2763: mol_type = genomic DNA
atgaacgcccccgagcggcagccccaacccgacggcggggacgccccaggccacgagcctgggggcagcccccaagacgagcttgacttctccatcctcttcgactatgagtatttgaatccgaacgaagaagagccgaatgcacataaggtcgccagcccaccctccggacccgcataccccgatgatgtcctggactatggcctcaagccatacagcccccttgctagtctctctggcgagccccccggccgattcggagagccggatagggtagggccgcagaagtttctgagcgcggccaagccagcaggggcctcgggcctgagccctcggatcgagatcactccgtcccacgaactgatccaggcagtggggcccctccgcatgagagacgcgggcctcctggtggagcagccgcccctggccggggtggccgccagcccgaggttcaccctgcccgtgcccggcttcgagggctaccgcgagccgctttgcttgagccccgctagcagcggctcctctgccagcttcatttctgacaccttctccccctacacctcgccctgcgtctcgcccaataacggcgggcccgacgacctgtgtccgcagtttcaaaacatccctgctcattattcccccagaacctcgccaataatgtcacctcgaaccagcctcgccgaggacagctgcctgggccgccactcgcccgtgccccgtccggcctcccgctcctcatcgcctggtgccaagcggaggcattcgtgcgccgaggccttggttgccctgccgcccggagcctcaccccagcgctcccggagcccctcgccgcagccctcatctcacgtggcaccccaggaccacggctccccggctgggtacccccctgtggctggctctgccgtgatcatggatgccctgaacagcctcgccacggactcgccttgtgggatcccccccaagatgtggaagaccagccctgacccctcgccggtgtctgccgccccatccaaggccggcctgcctcgccacatctacccggccgtggagttcctggggccctgcgagcagggcgagaggagaaactcggctccagaatccatcctgctggttccgcccacttggcccaagccgctggtgcctgccattcccatctgcagcatcccagtgactgcatccctccctccacttgagtggccgctgtccagtcagtcaggctcttacgagctgcggatcgaggtgcagcccaagccacatcaccgggcccactatgagacagaaggcagccgaggggctgtcaaagctccaactggaggccaccctgtggttcagctccatggctacatggaaaacaagcctctgggacttcagatcttcattgggacagctgatgagcggatccttaagccgcacgccttctaccaggtgcaccgaatcacggggaaaactgtcaccaccaccagctatgagaagatagtgggcaacaccaaagtcctggagatacccttggagcccaaaaacaacatgagggcaaccatcgactgtgcggggatcttgaagcttagaaacgccgacattgagctgcggaaaggcgagacggacattggaagaaagaacacgcgggtgagactggttttccgagttcacatcccagagtccagtggcagaatcgtctctttacagactgcatctaaccccatcgagtgctcccagcgatctgctcacgagctgcccatggttgaaagacaagacacagacagctgcctggtctatggcggccagcaaatgatcctcacggggcagaactttacatccgagtccaaagttgtgtttactgagaagaccacagatggacagcaaatttgggagatggaagccacggtggataaggacaagagccagcccaacatgctttttgttgagatccctgaatatcggaacaagcatatccgcacacctgtaaaagtgaacttctacgtcatcaatgggaagagaaaacgaagtcagcctcagcactttacctaccacccagtcccagccatcaagacggagcccacggatgaatatgaccccactctgatctgcagccccacccatggaggcctggggagccagccttactacccccagcacccgatggtggccgagtccccctcctgcctcgtggccaccatggctccctgccagcagttccgcacggggctctcatcccctgacgcccgctaccagcaacagaacccagcggccgtactctaccagcggagcaagagcctgagccccagcctgctgggctatcagcagccggccctcatggccgccccgctgtcccttgcggacgctcaccgctctgtgctggtgcacgccggctcccagggccagagctcagccctgctccacccctctccgaccaaccagcaggcctcgcctgtgatccactactcacccaccaaccagcagctgcgctgcggaagccaccaggagttccagcacatcatgtactgcgagaatttcgcaccaggcaccaccagacctggcccgcccccggtcagtcaaggtcagaggctgagcccgggttcctaccccacagtcattcagcagcagaatgccacgagccaaagagccgccaaaaacggacccccggtcagtgaccaaaaggaagtattacctgcgggggtgaccattaaacaggagcagaacttggaccagacctacttggatgatgagctgatagacacacaccttagctggatacaaaacatatta

SEQ ID NO: 4710 - DNA, 3204 bp, Homo sapiens
  source 1..3204: mol_type = genomic DNA
atgactactgcaaactgtggcgcccacgacgagctcgacttcaaactcgtctttggcgaggacggggcgccggcgccgccgcccccgggctcgcggcctgcagatcttgagccagatgattgtgcatccatttacatctttaatgtagatccacctccatctactttaaccacaccactttgcttaccacatcatggattaccgtctcactcttctgttttgtcaccatcgtttcagctccaaagtcacaaaaactatgaaggaacttgtgagattcctgaatctaaatatagcccattaggtggtcccaaaccctttgagtgcccaagtattcaaattacatctatctctcctaactgtcatcaagaattagatgcacatgaagatgacctacagataaatgacccagaacgggaatttttggaaaggccttctagagatcatctctatcttcctcttgagccatcctaccgggagtcttctcttagtcctagtcctgccagcagcatctcttctaggagttggttctctgatgcatcttcttgtgaatcgctttcacatatttatgatgatgtggactcagagttgaatgaagctgcagcccgatttacccttggatcccctctgacttctcctggtggctctccagggggctgccctggagaagaaacttggcatcaacagtatggacttggacactcattatcacccaggcaatctccttgccactctcctagatccagtgtcactgatgagaattggctgagccccaggccagcctcaggaccctcatcaaggcccacatccccctgtgggaaacggaggcactccagtgctgaagtttgttatgctgggtccctttcaccccatcactcacctgttccttcacctggtcactcccccaggggaagtgtgacagaagatacgtggctcaatgcttctgtccatggtgggtcaggccttggccctgcagtttttccatttcagtactgtgtagagactgacatccctctcaaaacaaggaaaacttctgaagatcaagctgccatactaccaggaaaattagagctgtgttcagatgaccaagggagtttatcaccagcccgggagacttcaatagatgatggccttggatctcagtatcctttaaagaaagattcatgtggtgatcagtttctttcagttccttcaccctttacctggagcaaaccaaagcctggccacacccctatatttcgcacatcttcattacctccactagactggcctttaccagctcattttggacaatgtgaactgaaaatagaagtgcaacctaaaactcatcatcgagcccattatgaaactgaaggtagccgaggggcagtaaaagcatctactgggggacatcctgttgtgaagctcctgggctataacgaaaagccaataaatctacaaatgtttattgggacagcagatgatcgatatttacgacctcatgcattttaccaggtgcatcgaatcactgggaagacagtcgctactgcaagccaagagataataattgccagtacaaaagttctggaaattccacttcttcctgaaaataatatgtcagccagtattgattgtgcaggtattttgaaactccgcaattcagatatagaacttcgaaaaggagaaactgatattggcagaaagaatactagagtacgacttgtgtttcgtgtacacatcccacagcccagtggaaaagtcctttctctgcagatagcctctatacccgttgagtgctcccagcggtctgctcaagaacttcctcatattgagaagtacagtatcaacagttgttctgtaaatggaggtcatgaaatggttgtgactggatctaattttcttccagaatccaaaatcatttttcttgaaaaaggacaagatggacgacctcagtgggaggtagaagggaagataatcagggaaaaatgtcaaggggctcacattgtccttgaagttcctccatatcataacccagcagttacagctgcagtgcaggtgcacttttatctttgcaatggcaagaggaaaaaaagccagtctcaacgttttacttatacaccagttttgatgaagcaagaacacagagaagagattgatttgtcttcagttccatctttgcctgtgcctcatcctgctcagacccagaggccttcctctgattcagggtgttcacatgacagtgtactgtcaggacagagaagtttgatttgctccatcccacaaacatatgcatccatggtgacctcatcccatctgccacagttgcagtgtagagatgagagtgttagtaaagaacagcatatgattccttctccaattgtacaccagccttttcaagtcacaccaacacctcctgtggggtcttcctatcagcctatgcaaactaatgttgtgtacaatggaccaacttgtcttcctattaatgctgcctctagtcaagaatttgattcagttttgtttcagcaggatgcaactctttctggtttagtgaatcttggctgtcaaccactgtcatccataccatttcattcttcaaattcaggctcaacaggacatctcttagcccatacacctcattctgtgcataccctgcctcatctgcaatcaatgggatatcattgttcaaatacaggacaaagatctctttcttctccagtggctgaccagattacaggtcagccttcgtctcagttacaacctattacatatggtccttcacattcagggtctgctacaacagcttccccagcagcttctcatcccttggctagttcaccgctttctgggccaccatctcctcagcttcagcctatgccttaccaatctcctagctcaggaactgcctcatcaccgtctccagccaccagaatgcattctggacagcactcaactcaagcacaaagtacgggccaggggggtctttctgcaccttcatccttaatatgtcacagtttgtgtgatccagcgtcatttccacctgatggggcaactgtgagcattaaacctgaaccagaagatcgagagcctaactttgcaaccattggtctgcaggacatcactttagatgatgaccaatttatatctgacttggaacaccagccatcaggttcagcagagaaatggcctaaccacagtgtgctctcatgtccagctcctttctggagaatc

SEQ ID NO: 4711 - DNA, 3195 bp, Homo sapiens
  source 1..3195: mol_type = genomic DNA
atgactactgcaaactgtggcgcccacgacgagctcgacttcaaactcgtctttggcgaggacggggcgccggcgccgccgcccccgggctcgcggcctgcagatcttgagccagatgattgtgcatccatttacatctttaatgtagatccacctccatctactttaaccacaccactttgcttaccacatcatggattaccgtctcactcttctgttttgtcaccatcgtttcagctccaaagtcacaaaaactatgaaggaacttgtgagattcctgaatctaaatatagcccattaggtggtcccaaaccctttgagtgcccaagtattcaaattacatctatctctcctaactgtcatcaagaattagatgcacatgaagatgacctacagataaatgacccagaacgggaatttttggaaaggccttctagagatcatctctatcttcctcttgagccatcctaccgggagtcttctcttagtcctagtcctgccagcagcatctcttctaggagttggttctctgatgcatcttcttgtgaatcgctttcacatatttatgatgatgtggactcagagttgaatgaagctgcagcccgatttacccttggatcccctctgacttctcctggtggctctccagggggctgccctggagaagaaacttggcatcaacagtatggacttggacactcattatcacccaggcaatctccttgccactctcctagatccagtgtcactgatgagaattggctgagccccaggccagcctcaggaccctcatcaaggcccacatccccctgtgggaaacggaggcactccagtgctgaagtttgttatgctgggtccctttcaccccatcactcacctgttccttcacctggtcactcccccaggggaagtgtgacagaagatacgtggctcaatgcttctgtccatggtgggtcaggccttggccctgcagtttttccatttcagtactgtgtagagactgacatccctctcaaaacaaggaaaacttctgaagatcaagctgccatactaccaggaaaattagagctgtgttcagatgaccaagggagtttatcaccagcccgggagacttcaatagatgatggccttggatctcagtatcctttaaagaaagattcatgtggtgatcagtttctttcagttccttcaccctttacctggagcaaaccaaagcctggccacacccctatatttcgcacatcttcattacctccactagactggcctttaccagctcattttggacaatgtgaactgaaaatagaagtgcaacctaaaactcatcatcgagcccattatgaaactgaaggtagccgaggggcagtaaaagcatctactgggggacatcctgttgtgaagctcctgggctataacgaaaagccaataaatctacaaatgtttattgggacagcagatgatcgatatttacgacctcatgcattttaccaggtgcatcgaatcactgggaagacagtcgctactgcaagccaagagataataattgccagtacaaaagttctggaaattccacttcttcctgaaaataatatgtcagccagtattgattgtgcaggtattttgaaactccgcaattcagatatagaacttcgaaaaggagaaactgatattggcagaaagaatactagagtacgacttgtgtttcgtgtacacatcccacagcccagtggaaaagtcctttctctgcagatagcctctatacccgttgagtgctcccagcggtctgctcaagaacttcctcatattgagaagtacagtatcaacagttgttctgtaaatggaggtcatgaaatggttgtgactggatctaattttcttccagaatccaaaatcatttttcttgaaaaaggacaagatggacgacctcagtgggaggtagaagggaagataatcagggaaaaatgtcaaggggctcacattgtccttgaagttcctccatatcataacccagcagttacagctgcagtgcaggtgcacttttatctttgcaatggcaagaggaaaaaaagccagtctcaacgttttacttatacaccagttttgatgaagcaagaacacagagaagagattgatttgtcttcagttccatctttgcctgtgcctcatcctgctcagacccagaggccttcctctgattcagggtgttcacatgacagtgtactgtcaggacagagaagtttgatttgctccatcccacaaacatatgcatccatggtgacctcatcccatctgccacagttgcagtgtagagatgagagtgttagtaaagaacagcatatgattccttctccaattgtacaccagccttttcaagtcacaccaacacctcctgtggggtcttcctatcagcctatgcaaactaatgttgtgtacaatggaccaacttgtcttcctattaatgctgcctctagtcaagaatttgattcagttttgtttcagcaggatgcaactctttctggtttagtgaatcttggctgtcaaccactgtcatccataccatttcattcttcaaattcaggctcaacaggacatctcttagcccatacacctcattctgtgcataccctgcctcatctgcaatcaatgggatatcattgttcaaatacaggacaaagatctctttcttctccagtggctgaccagattacaggtcagccttcgtctcagttacaacctattacatatggtccttcacattcagggtctgctacaacagcttccccagcagcttctcatcccttggctagttcaccgctttctgggccaccatctcctcagcttcagcctatgccttaccaatctcctagctcaggaactgcctcatcaccgtctccagccaccagaatgcattctggacagcactcaactcaagcacaaagtacgggccaggggggtctttctgcaccttcatccttaatatgtcacagtttgtgtgatccagcgtcatttccacctgatggggcaactgtgagcattaaacctgaaccagaagatcgagagcctaactttgcaaccattggtctgcaggacatcactttagatgatgatttgtttaccagtaataattttgacttgcttcagttgagacctacgttttggccagtcccagcaggaagatatctgaggaatctagag

SEQ ID NO: 4712 - DNA, 2892 bp, Homo sapiens
  source 1..2892: mol_type = genomic DNA
atgataaccaccctcccatctctcctacccgccagcctcgccagtatctcccaccgagtcacgaatctcccatctaactccctctcacacaacccaggcctctccaagcctgactttcccggaaactccagtccaggtcttccttcctcctccagcccaggccgggacctgggggctcctgccggatccatgggggcggccagctgcgaggatgaggagctggaatttaagctggtgttcggggaggaaaaggaggcccccccgctgggcgcggggggattgggggaagaactggactcagaggatgccccgccatgctgccgtctggccttgggagagccccctccctatggcgctgcacctatcggtattccccgacctccaccccctcggcctggcatgcattcgccaccgccgcgaccagccccctcacctggcacctgggagagccagcccgccaggtcggtgaggctgggaggaccaggagggggtgctgggggtgctgggggtggccgtgttctcgagtgtcccagcatccgcatcacctccatctctcccacgccggagccgccagcagcgctggaggacaaccctgatgcctggggggacggctctcctagagattaccccccaccagaaggctttgggggctacagagaagcagggggccagggtgggggggccttcttcagcccaagccctggcagcagcagcctgtcctcgtggagcttcttctccgatgcctctgacgaggcagccctgtatgcagcctgcgacgaggtggagtctgagctaaatgaggcggcctcccgctttggcctgggctccccgctgccctcgccccgggcctcccctcggccatggacccccgaagatccctggagcctgtatggtccaagccccggaggccgagggccagaggatagctggctactcctcagtgctcctgggcccaccccagcctccccgcggcctgcctctccatgtggcaagcggcgctattccagctcgggaaccccatcttcagcctccccagctctgtcccgccgtggcagcctgggggaagaggggtctgagccacctccaccacccccattgcctctggcccgggacccgggctcccctggtccctttgactatgtgggggccccaccagctgagagcatccctcagaagacacggcggacttccagcgagcaggcagtggctctgcctcggtctgaggagcctgcctcatgcaatgggaagctgcccttgggagcagaggagtctgtggctcctccaggaggttcccggaaggaggtggctggcatggactacctggcagtgccctccccactcgcttggtccaaggcccggattgggggacacagccctatcttcaggacctctgccctacccccactggactggcctctgcccagccaatatgagcagctggagctgaggatcgaggtacagcctagagcccaccaccgggcccactatgagacagaaggcagccgtggagctgtcaaagctgcccctggcggtcaccccgtagtcaagctcctaggctacagtgagaagccactgaccctacagatgttcatcggcactgcagatgaaaggaacctgcggcctcatgccttctatcaggtgcaccgtatcacaggcaagatggtggccacggccagctatgaagccgtagtcagtggcaccaaggtgttggagatgactctgctgcctgagaacaacatggcggccaacattgactgcgcgggaatcctgaagcttcggaattcagacattgagcttcggaagggtgagacggacatcgggcgcaaaaacacacgtgtacggctggtgttccgggtacacgtgccccagggcggcgggaaggtcgtctcagtacaggcagcatcggtgcccatcgagtgctcccagcgctcagcccaggagctgccccaggtggaggcctacagccccagtgcctgctctgtgagaggaggcgaggaactggtactgactggctccaacttcctgccagactccaaggtggtgttcattgagaggggtcctgatgggaagctgcaatgggaggaggaggccacagtgaaccgactgcagagcaacgaggtgacgctgaccctgactgtccccgagtacagcaacaagagggtttcccggccagtccaggtctacttttatgtctccaatgggcggaggaaacgcagtcctacccagagtttcaggtttctgcctgtgatctgcaaagaggagcccctaccggactcatctctgcggggtttcccttcagcatcggcaaccccctttggcactgacatggacttctcaccacccaggcccccctacccctcctatccccatgaagaccctgcttgcgaaactccttacctatcagaaggcttcggctatggcatgccccctctgtacccccagacggggcccccaccatcctacagaccgggcctgcggatgttccctgagactaggggtaccacaggttgtgcccaaccacctgcagtttccttccttccccgccccttccctagtgacccgtatggagggcggggctcctctttctccctggggctgccattctctccgccagccccctttcggccgcctcctcttcctgcatccccaccgcttgaaggccccttcccttcccagagtgatgtgcatcccctacctgctgagggatacaataaggtagggccaggctatggccctggggagggggctccggagcaggagaaatccaggggtggctacagcagcggcttccgagacagtgtccctatccagggtatcacgctggaggaaggtgggtgtgggactgggggctgtgagtgtgagtgtgtgcaagagattgctctgcatgtttgc

SEQ ID NO: 4713 - DNA, 2670 bp, Homo sapiens
  source 1..2670: mol_type = genomic DNA
atgcctgcttcaatctcctccatcttcccaggtccaactctgcttttgtcttgtggctcagaagaactggactcagaggatgccccgccatgctgccgtctggccttgggagagccccctccctatggcgctgcacctatcggtattccccgacctccaccccctcggcctggcatgcattcgccaccgccgcgaccagccccctcacctggcacctgggagagccagcccgccaggtcggtgaggctgggaggaccaggagggggtgctgggggtgctgggggtggccgtgttctcgagtgtcccagcatccgcatcacctccatctctcccacgccggagccgccagcagcgctggaggacaaccctgatgcctggggggacggctctcctagagattaccccccaccagaaggctttgggggctacagagaagcagggggccagggtgggggggccttcttcagcccaagccctggcagcagcagcctgtcctcgtggagcttcttctccgatgcctctgacgaggcagccctgtatgcagcctgcgacgaggtggagtctgagctaaatgaggcggcctcccgctttggcctgggctccccgctgccctcgccccgggcctcccctcggccatggacccccgaagatccctggagcctgtatggtccaagccccggaggccgagggccagaggatagctggctactcctcagtgctcctgggcccaccccagcctccccgcggcctgcctctccatgtggcaagcggcgctattccagctcgggaaccccatcttcagcctccccagctctgtcccgccgtggcagcctgggggaagaggggtctgagccacctccaccacccccattgcctctggcccgggacccgggctcccctggtccctttgactatgtgggggccccaccagctgagagcatccctcagaagacacggcggacttccagcgagcaggcagtggctctgcctcggtctgaggagcctgcctcatgcaatgggaagctgcccttgggagcagaggagtctgtggctcctccaggaggttcccggaaggaggtggctggcatggactacctggcagtgccctccccactcgcttggtccaaggcccggattgggggacacagccctatcttcaggacctctgccctacccccactggactggcctctgcccagccaatatgagcagctggagctgaggatcgaggtacagcctagagcccaccaccgggcccactatgagacagaaggcagccgtggagctgtcaaagctgcccctggcggtcaccccgtagtcaagctcctaggctacagtgagaagccactgaccctacagatgttcatcggcactgcagatgaaaggaacctgcggcctcatgccttctatcaggtgcaccgtatcacaggcaagatggtggccacggccagctatgaagccgtagtcagtggcaccaaggtgttggagatgactctgctgcctgagaacaacatggcggccaacattgactgcgcgggaatcctgaagcttcggaattcagacattgagcttcggaagggtgagacggacatcgggcgcaaaaacacacgtgtacggctggtgttccgggtacacgtgccccagggcggcgggaaggtcgtctcagtacaggcagcatcggtgcccatcgagtgctcccagcgctcagcccaggagctgccccaggtggaggcctacagccccagtgcctgctctgtgagaggaggcgaggaactggtactgactggctccaacttcctgccagactccaaggtggtgttcattgagaggggtcctgatgggaagctgcaatgggaggaggaggccacagtgaaccgactgcagagcaacgaggtgacgctgaccctgactgtccccgagtacagcaacaagagggtttcccggccagtccaggtctacttttatgtctccaatgggcggaggaaacgcagtcctacccagagtttcaggtttctgcctgtgatctgcaaagaggagcccctaccggactcatctctgcggggtttcccttcagcatcggcaaccccctttggcactgacatggacttctcaccacccaggcccccctacccctcctatccccatgaagaccctgcttgcgaaactccttacctatcagaaggcttcggctatggcatgccccctctgtacccccagacggggcccccaccatcctacagaccgggcctgcggatgttccctgagactaggggtaccacaggttgtgcccaaccacctgcagtttccttccttccccgccccttccctagtgacccgtatggagggcggggctcctctttctccctggggctgccattctctccgccagccccctttcggccgcctcctcttcctgcatccccaccgcttgaaggccccttcccttcccagagtgatgtgcatcccctacctgctgagggatacaataaggtagggccaggctatggccctggggagggggctccggagcaggagaaatccaggggtggctacagcagcggcttccgagacagtgtccctatccagggtatcacgctggaggaagtgagtgagatcattggccgagacctgagtggcttccctgcacctcctggagaagagcctcctgcc

SEQ ID NO: 4714 - DNA, 2496 bp, Homo sapiens
  source 1..2496: mol_type = genomic DNA
atgcattcgccaccgccgcgaccagccccctcacctggcacctgggagagccagcccgccaggtcggtgaggctgggaggaccaggagggggtgctgggggtgctgggggtggccgtgttctcgagtgtcccagcatccgcatcacctccatctctcccacgccggagccgccagcagcgctggaggacaaccctgatgcctggggggacggctctcctagagattaccccccaccagaaggctttgggggctacagagaagcagggggccagggtgggggggccttcttcagcccaagccctggcagcagcagcctgtcctcgtggagcttcttctccgatgcctctgacgaggcagccctgtatgcagcctgcgacgaggtggagtctgagctaaatgaggcggcctcccgctttggcctgggctccccgctgccctcgccccgggcctcccctcggccatggacccccgaagatccctggagcctgtatggtccaagccccggaggccgagggccagaggatagctggctactcctcagtgctcctgggcccaccccagcctccccgcggcctgcctctccatgtggcaagcggcgctattccagctcgggaaccccatcttcagcctccccagctctgtcccgccgtggcagcctgggggaagaggggtctgagccacctccaccacccccattgcctctggcccgggacccgggctcccctggtccctttgactatgtgggggccccaccagctgagagcatccctcagaagacacggcggacttccagcgagcaggcagtggctctgcctcggtctgaggagcctgcctcatgcaatgggaagctgcccttgggagcagaggagtctgtggctcctccaggaggttcccggaaggaggtggctggcatggactacctggcagtgccctccccactcgcttggtccaaggcccggattgggggacacagccctatcttcaggacctctgccctacccccactggactggcctctgcccagccaatatgagcagctggagctgaggatcgaggtacagcctagagcccaccaccgggcccactatgagacagaaggcagccgtggagctgtcaaagctgcccctggcggtcaccccgtagtcaagctcctaggctacagtgagaagccactgaccctacagatgttcatcggcactgcagatgaaaggaacctgcggcctcatgccttctatcaggtgcaccgtatcacaggcaagatggtggccacggccagctatgaagccgtagtcagtggcaccaaggtgttggagatgactctgctgcctgagaacaacatggcggccaacattgactgcgcgggaatcctgaagcttcggaattcagacattgagcttcggaagggtgagacggacatcgggcgcaaaaacacacgtgtacggctggtgttccgggtacacgtgccccagggcggcgggaaggtcgtctcagtacaggcagcatcggtgcccatcgagtgctcccagcgctcagcccaggagctgccccaggtggaggcctacagccccagtgcctgctctgtgagaggaggcgaggaactggtactgactggctccaacttcctgccagactccaaggtggtgttcattgagaggggtcctgatgggaagctgcaatgggaggaggaggccacagtgaaccgactgcagagcaacgaggtgacgctgaccctgactgtccccgagtacagcaacaagagggtttcccggccagtccaggtctacttttatgtctccaatgggcggaggaaacgcagtcctacccagagtttcaggtttctgcctgtgatctgcaaagaggagcccctaccggactcatctctgcggggtttcccttcagcatcggcaaccccctttggcactgacatggacttctcaccacccaggcccccctacccctcctatccccatgaagaccctgcttgcgaaactccttacctatcagaaggcttcggctatggcatgccccctctgtacccccagacggggcccccaccatcctacagaccgggcctgcggatgttccctgagactaggggtaccacaggttgtgcccaaccacctgcagtttccttccttccccgccccttccctagtgacccgtatggagggcggggctcctctttctccctggggctgccattctctccgccagccccctttcggccgcctcctcttcctgcatccccaccgcttgaaggccccttcccttcccagagtgatgtgcatcccctacctgctgagggatacaataaggtagggccaggctatggccctggggagggggctccggagcaggagaaatccaggggtggctacagcagcggcttccgagacagtgtccctatccagggtatcacgctggaggaagtgagtgagatcattggccgagacctgagtggcttccctgcacctcctggagaagagcctcctgcc

SEQ ID NO: 4715 - DNA, 2382 bp, Homo sapiens
  source 1..2382: mol_type = genomic DNA
atgggggcggccagctgcgaggatgaggagctggaatttaagctggtgttcggggaggaaaaggaggcccccccgctgggcgcggggggattgggggaagaactggactcagaggatgccccgccatgctgccgtctggccttgggagagccccctccctatggcgctgcacctatcggtattccccgacctccaccccctcggcctggcatgcattcgccaccgccgcgaccagccccctcacctggcacctgggagagccagcccgccaggtcggtgaggctgggaggaccaggagggggtgctgggggtgctgggggtggccgtgttctcgagtgtcccagcatccgcatcacctccatctctcccacgccggagccgccagcagcgctggaggacaaccctgatgcctggggggacggctctcctagagattaccccccaccagaaggctttgggggctacagagaagcagggggccagggtgggggggccttcttcagcccaagccctggcagcagcagcctgtcctcgtggagcttcttctccgatgcctctgacgaggcagccctgtatgcagcctgcgacgaggtggagtctgagctaaatgaggcggcctcccgctttggcctgggctccccgctgccctcgccccgggcctcccctcggccatggacccccgaagatccctggagcctgtatggtccaagccccggaggccgagggccagaggatagctggctactcctcagtgctcctgggcccaccccagcctccccgcggcctgcctctccatgtggcaagcggcgctattccagctcgggaaccccatcttcagcctccccagctctgtcccgccgtggcagcctgggggaagaggggtctgagccacctccaccacccccattgcctctggcccgggacccgggctcccctggtccctttgactatgtgggggccccaccagctgagagcatccctcagaagacacggcggacttccagcgagcaggcagtggctctgcctcggtctgaggagcctgcctcatgcaatgggaagctgcccttgggagcagaggagtctgtggctcctccaggaggttcccggaaggaggtggctggcatggactacctggcagtgccctccccactcgcttggtccaaggcccggattgggggacacagccctatcttcaggacctctgccctacccccactggactggcctctgcccagccaatatgagcagctggagctgaggatcgaggtacagcctagagcccaccaccgggcccactatgagacagaaggcagccgtggagctgtcaaagctgcccctggcggtcaccccgtagtcaagctcctaggctacagtgagaagccactgaccctacagatgttcatcggcactgcagatgaaaggaacctgcggcctcatgccttctatcaggtgcaccgtatcacaggcaagatggtggccacggccagctatgaagccgtagtcagtggcaccaaggtgttggagatgactctgctgcctgagaacaacatggcggccaacattgactgcgcgggaatcctgaagcttcggaattcagacattgagcttcggaagggtgagacggacatcgggcgcaaaaacacacgtgtacggctggtgttccgggtacacgtgccccagggcggcgggaaggtcgtctcagtacaggcagcatcggtgcccatcgagtgctcccagcgctcagcccaggagctgccccaggtggaggcctacagccccagtgcctgctctgtgagaggaggcgaggaactggtactgactggctccaacttcctgccagactccaaggtggtgttcattgagaggggtcctgatgggaagctgcaatgggaggaggaggccacagtgaaccgactgcagagcaacgaggtgacgctgaccctgactgtccccgagtacagcaacaagagggtttcccggccagtccaggtctacttttatgtctccaatgggcggaggaaacgcagtcctacccagagtttcaggtttctgcctgtgatctgcaaagaggagcccctaccggactcatctctgcggggtttcccttcagcatcggcaaccccctttggcactgacatggacttctcaccacccaggcccccctacccctcctatccccatgaagaccctgcttgcgaaactccttacctatcagaaggcttcggctatggcatgccccctctgtacccccagacggggcccccaccatcctacagaccgggcctgcggatgttccctgagactaggggtaccacagtgagtgagatcattggccgagacctgagtggcttccctgcacctcctggagaagagcctcctgcc

SEQ ID NO: 4716 - DNA, 2667 bp, Homo sapiens
  source 1..2667: mol_type = genomic DNA
atgcctgcttcaatctcctccatcttcccaggtccaactctgcttttgtcttgtggctcagaagaactggactcagaggatgccccgccatgctgccgtctggccttgggagagccccctccctatggcgctgcacctatcggtattccccgacctccaccccctcggcctggcatgcattcgccaccgccgcgaccagccccctcacctggcacctgggagagccagcccgccaggtcggtgaggctgggaggaccaggagggggtgctgggggtgctgggggtggccgtgttctcgagtgtcccagcatccgcatcacctccatctctcccacgccggagccgccagcagcgctggaggacaaccctgatgcctggggggacggctctcctagagattaccccccaccagaaggctttgggggctacagagaagcagggggccagggtgggggggccttcttcagcccaagccctggcagcagcagcctgtcctcgtggagcttcttctccgatgcctctgacgaggcagccctgtatgcagcctgcgacgaggtggagtctgagctaaatgaggcggcctcccgctttggcctgggctccccgctgccctcgccccgggcctcccctcggccatggacccccgaagatccctggagcctgtatggtccaagccccggaggccgagggccagaggatagctggctactcctcagtgctcctgggcccaccccagcctccccgcggcctgcctctccatgtggcaagcggcgctattccagctcgggaaccccatcttcagcctccccagctctgtcccgccgtggcagcctgggggaagaggggtctgagccacctccaccacccccattgcctctggcccgggacccgggctcccctggtccctttgactatgtgggggccccaccagctgagagcatccctcagaagacacggcggacttccagcgagcaggcagtggctctgcctcggtctgaggagcctgcctcatgcaatgggaagctgcccttgggagcagaggagtctgtggctcctccaggaggttcccggaaggaggtggctggcatggactacctggcagtgccctccccactcgcttggtccaaggcccggattgggggacacagccctatcttcaggacctctgccctacccccactggactggcctctgcccagccaatatgagcagctggagctgaggatcgaggtacagcctagagcccaccaccgggcccactatgagacagaaggcagccgtggagctgtcaaagctgcccctggcggtcaccccgtagtcaagctcctaggctacagtgagaagccactgaccctacagatgttcatcggcactgcagatgaaaggaacctgcggcctcatgccttctatcaggtgcaccgtatcacaggcaagatggtggccacggccagctatgaagccgtagtcagtggcaccaaggtgttggagatgactctgctgcctgagaacaacatggcggccaacattgactgcgcgggaatcctgaagcttcggaattcagacattgagcttcggaagggtgagacggacatcgggcgcaaaaacacacgtgtacggctggtgttccgggtacacgtgccccagggcggcgggaaggtcgtctcagtacaggcagcatcggtgcccatcgagtgctcccagcgctcagcccaggagctgccccaggtggaggcctacagccccagtgcctgctctgtgagaggaggcgaggaactggtactgactggctccaacttcctgccagactccaaggtggtgttcattgagaggggtcctgatgggaagctgcaatgggaggaggaggccacagtgaaccgactgcagagcaacgaggtgacgctgaccctgactgtccccgagtacagcaacaagagggtttcccggccagtccaggtctacttttatgtctccaatgggcggaggaaacgcagtcctacccagagtttcaggtttctgcctgtgatctgcaaagaggagcccctaccggactcatctctgcggggtttcccttcagcatcggcaaccccctttggcactgacatggacttctcaccacccaggcccccctacccctcctatccccatgaagaccctgcttgcgaaactccttacctatcagaaggcttcggctatggcatgccccctctgtacccccagacggggcccccaccatcctacagaccgggcctgcggatgttccctgagactaggggtaccacaggttgtgcccaaccacctgcagtttccttccttccccgccccttccctagtgacccgtatggagggcggggctcctctttctccctggggctgccattctctccgccagccccctttcggccgcctcctcttcctgcatccccaccgcttgaaggccccttcccttcccagagtgatgtgcatcccctacctgctgagggatacaataaggtagggccaggctatggccctggggagggggctccggagcaggagaaatccaggggtggctacagcagcggcttccgagacagtgtccctatccagggtatcacgctggaggaaggtgggtgtgggactgggggctgtgagtgtgagtgtgtgcaagagattgctctgcatgtttgc

SEQ ID NO: 4717 - DNA, 2346 bp, Homo sapiens
  source 1..2346: mol_type = genomic DNA
atgcctgcttcaatctcctccatcttcccaggtccaactctgcttttgtcttgtggctcagaagaactggactcagaggatgccccgccatgctgccgtctggccttgggagagccccctccctatggcgctgcacctatcggtattccccgacctccaccccctcggcctggcatgcattcgccaccgccgcgaccagccccctcacctggcacctgggagagccagcccgccaggtcggtgaggctgggaggaccaggagggggtgctgggggtgctgggggtggccgtgttctcgagtgtcccagcatccgcatcacctccatctctcccacgccggagccgccagcagcgctggaggacaaccctgatgcctggggggacggctctcctagagattaccccccaccagaaggctttgggggctacagagaagcagggggccagggtgggggggccttcttcagcccaagccctggcagcagcagcctgtcctcgtggagcttcttctccgatgcctctgacgaggcagccctgtatgcagcctgcgacgaggtggagtctgagctaaatgaggcggcctcccgctttggcctgggctccccgctgccctcgccccgggcctcccctcggccatggacccccgaagatccctggagcctgtatggtccaagccccggaggccgagggccagaggatagctggctactcctcagtgctcctgggcccaccccagcctccccgcggcctgcctctccatgtggcaagcggcgctattccagctcgggaaccccatcttcagcctccccagctctgtcccgccgtggcagcctgggggaagaggggtctgagccacctccaccacccccattgcctctggcccgggacccgggctcccctggtccctttgactatgtgggggccccaccagctgagagcatccctcagaagacacggcggacttccagcgagcaggcagtggctctgcctcggtctgaggagcctgcctcatgcaatgggaagctgcccttgggagcagaggagtctgtggctcctccaggaggttcccggaaggaggtggctggcatggactacctggcagtgccctccccactcgcttggtccaaggcccggattgggggacacagccctatcttcaggacctctgccctacccccactggactggcctctgcccagccaatatgagcagctggagctgaggatcgaggtacagcctagagcccaccaccgggcccactatgagacagaaggcagccgtggagctgtcaaagctgcccctggcggtcaccccgtagtcaagctcctaggctacagtgagaagccactgaccctacagatgttcatcggcactgcagatgaaaggaacctgcggcctcatgccttctatcaggtgcaccgtatcacaggcaagatggtggccacggccagctatgaagccgtagtcagtggcaccaaggtgttggagatgactctgctgcctgagaacaacatggcggccaacattgactgcgcgggaatcctgaagcttcggaattcagacattgagcttcggaagggtgagacggacatcgggcgcaaaaacacacgtgtacggctggtgttccgggtacacgtgccccagggcggcgggaaggtcgtctcagtacaggcagcatcggtgcccatcgagtgctcccagcgctcagcccaggagctgccccaggtggaggcctacagccccagtgcctgctctgtgagaggaggcgaggaactggtactgactggctccaacttcctgccagactccaaggtggtgttcattgagaggggtcctgatgggaagctgcaatgggaggaggaggccacagtgaaccgactgcagagcaacgaggtgacgctgaccctgactgtccccgagtacagcaacaagagggtttcccggccagtccaggtctacttttatgtctccaatgggcggaggaaacgcagtcctacccagagtttcaggtttctgcctgtgatctgcaaagaggagcccctaccggactcatctctgcggggtttcccttcagcatcggcaaccccctttggcactgacatggacttctcaccacccaggcccccctacccctcctatccccatgaagaccctgcttgcgaaactccttacctatcagaaggcttcggctatggcatgccccctctgtacccccagacggggcccccaccatcctacagaccgggcctgcggatgttccctgagactaggggtaccacagtgagtgagatcattggccgagacctgagtggcttccctgcacctcctggagaagagcctcctgcc

SEQ ID NO: 4718 - DNA, 2571 bp, Homo sapiens
  source 1..2571: mol_type = genomic DNA
atgataaccaccctcccatctctcctacccgccagcctcgccagtatctcccaccgagtcacgaatctcccatctaactccctctcacacaacccaggcctctccaagcctgactttcccggaaactccagtccaggtcttccttcctcctccagcccaggccgggacctgggggctcctgccggatccatgggggcggccagctgcgaggatgaggagctggaatttaagctggtgttcggggaggaaaaggaggcccccccgctgggcgcggggggattgggggaagaactggactcagaggatgccccgccatgctgccgtctggccttgggagagccccctccctatggcgctgcacctatcggtattccccgacctccaccccctcggcctggcatgcattcgccaccgccgcgaccagccccctcacctggcacctgggagagccagcccgccaggtcggtgaggctgggaggaccaggagggggtgctgggggtgctgggggtggccgtgttctcgagtgtcccagcatccgcatcacctccatctctcccacgccggagccgccagcagcgctggaggacaaccctgatgcctggggggacggctctcctagagattaccccccaccagaaggctttgggggctacagagaagcagggggccagggtgggggggccttcttcagcccaagccctggcagcagcagcctgtcctcgtggagcttcttctccgatgcctctgacgaggcagccctgtatgcagcctgcgacgaggtggagtctgagctaaatgaggcggcctcccgctttggcctgggctccccgctgccctcgccccgggcctcccctcggccatggacccccgaagatccctggagcctgtatggtccaagccccggaggccgagggccagaggatagctggctactcctcagtgctcctgggcccaccccagcctccccgcggcctgcctctccatgtggcaagcggcgctattccagctcgggaaccccatcttcagcctccccagctctgtcccgccgtggcagcctgggggaagaggggtctgagccacctccaccacccccattgcctctggcccgggacccgggctcccctggtccctttgactatgtgggggccccaccagctgagagcatccctcagaagacacggcggacttccagcgagcaggcagtggctctgcctcggtctgaggagcctgcctcatgcaatgggaagctgcccttgggagcagaggagtctgtggctcctccaggaggttcccggaaggaggtggctggcatggactacctggcagtgccctccccactcgcttggtccaaggcccggattgggggacacagccctatcttcaggacctctgccctacccccactggactggcctctgcccagccaatatgagcagctggagctgaggatcgaggtacagcctagagcccaccaccgggcccactatgagacagaaggcagccgtggagctgtcaaagctgcccctggcggtcaccccgtagtcaagctcctaggctacagtgagaagccactgaccctacagatgttcatcggcactgcagatgaaaggaacctgcggcctcatgccttctatcaggtgcaccgtatcacaggcaagatggtggccacggccagctatgaagccgtagtcagtggcaccaaggtgttggagatgactctgctgcctgagaacaacatggcggccaacattgactgcgcgggaatcctgaagcttcggaattcagacattgagcttcggaagggtgagacggacatcgggcgcaaaaacacacgtgtacggctggtgttccgggtacacgtgccccagggcggcgggaaggtcgtctcagtacaggcagcatcggtgcccatcgagtgctcccagcgctcagcccaggagctgccccaggtggaggcctacagccccagtgcctgctctgtgagaggaggcgaggaactggtactgactggctccaacttcctgccagactccaaggtggtgttcattgagaggggtcctgatgggaagctgcaatgggaggaggaggccacagtgaaccgactgcagagcaacgaggtgacgctgaccctgactgtccccgagtacagcaacaagagggtttcccggccagtccaggtctacttttatgtctccaatgggcggaggaaacgcagtcctacccagagtttcaggtttctgcctgtgatctgcaaagaggagcccctaccggactcatctctgcggggtttcccttcagcatcggcaaccccctttggcactgacatggacttctcaccacccaggcccccctacccctcctatccccatgaagaccctgcttgcgaaactccttacctatcagaaggcttcggctatggcatgccccctctgtacccccagacggggcccccaccatcctacagaccgggcctgcggatgttccctgagactaggggtaccacagtgagtgagatcattggccgagacctgagtggcttccctgcacctcctggagaagagcctcctgcc

SEQ ID NO: 4719 - DNA, 2706 bp, Homo sapiens
  source 1..2706: mol_type = genomic DNA
atgggggcggccagctgcgaggatgaggagctggaatttaagctggtgttcggggaggaaaaggaggcccccccgctgggcgcggggggattgggggaagaactggactcagaggatgccccgccatgctgccgtctggccttgggagagccccctccctatggcgctgcacctatcggtattccccgacctccaccccctcggcctggcatgcattcgccaccgccgcgaccagccccctcacctggcacctgggagagccagcccgccaggtcggtgaggctgggaggaccaggagggggtgctgggggtgctgggggtggccgtgttctcgagtgtcccagcatccgcatcacctccatctctcccacgccggagccgccagcagcgctggaggacaaccctgatgcctggggggacggctctcctagagattaccccccaccagaaggctttgggggctacagagaagcagggggccagggtgggggggccttcttcagcccaagccctggcagcagcagcctgtcctcgtggagcttcttctccgatgcctctgacgaggcagccctgtatgcagcctgcgacgaggtggagtctgagctaaatgaggcggcctcccgctttggcctgggctccccgctgccctcgccccgggcctcccctcggccatggacccccgaagatccctggagcctgtatggtccaagccccggaggccgagggccagaggatagctggctactcctcagtgctcctgggcccaccccagcctccccgcggcctgcctctccatgtggcaagcggcgctattccagctcgggaaccccatcttcagcctccccagctctgtcccgccgtggcagcctgggggaagaggggtctgagccacctccaccacccccattgcctctggcccgggacccgggctcccctggtccctttgactatgtgggggccccaccagctgagagcatccctcagaagacacggcggacttccagcgagcaggcagtggctctgcctcggtctgaggagcctgcctcatgcaatgggaagctgcccttgggagcagaggagtctgtggctcctccaggaggttcccggaaggaggtggctggcatggactacctggcagtgccctccccactcgcttggtccaaggcccggattgggggacacagccctatcttcaggacctctgccctacccccactggactggcctctgcccagccaatatgagcagctggagctgaggatcgaggtacagcctagagcccaccaccgggcccactatgagacagaaggcagccgtggagctgtcaaagctgcccctggcggtcaccccgtagtcaagctcctaggctacagtgagaagccactgaccctacagatgttcatcggcactgcagatgaaaggaacctgcggcctcatgccttctatcaggtgcaccgtatcacaggcaagatggtggccacggccagctatgaagccgtagtcagtggcaccaaggtgttggagatgactctgctgcctgagaacaacatggcggccaacattgactgcgcgggaatcctgaagcttcggaattcagacattgagcttcggaagggtgagacggacatcgggcgcaaaaacacacgtgtacggctggtgttccgggtacacgtgccccagggcggcgggaaggtcgtctcagtacaggcagcatcggtgcccatcgagtgctcccagcgctcagcccaggagctgccccaggtggaggcctacagccccagtgcctgctctgtgagaggaggcgaggaactggtactgactggctccaacttcctgccagactccaaggtggtgttcattgagaggggtcctgatgggaagctgcaatgggaggaggaggccacagtgaaccgactgcagagcaacgaggtgacgctgaccctgactgtccccgagtacagcaacaagagggtttcccggccagtccaggtctacttttatgtctccaatgggcggaggaaacgcagtcctacccagagtttcaggtttctgcctgtgatctgcaaagaggagcccctaccggactcatctctgcggggtttcccttcagcatcggcaaccccctttggcactgacatggacttctcaccacccaggcccccctacccctcctatccccatgaagaccctgcttgcgaaactccttacctatcagaaggcttcggctatggcatgccccctctgtacccccagacggggcccccaccatcctacagaccgggcctgcggatgttccctgagactaggggtaccacaggttgtgcccaaccacctgcagtttccttccttccccgccccttccctagtgacccgtatggagggcggggctcctctttctccctggggctgccattctctccgccagccccctttcggccgcctcctcttcctgcatccccaccgcttgaaggccccttcccttcccagagtgatgtgcatcccctacctgctgagggatacaataaggtagggccaggctatggccctggggagggggctccggagcaggagaaatccaggggtggctacagcagcggcttccgagacagtgtccctatccagggtatcacgctggaggaagtgagtgagatcattggccgagacctgagtggcttccctgcacctcctggagaagagcctcctgcc

SEQ ID NO: 4720 - DNA, 2073 bp, Homo sapiens
  source 1..2073: mol_type = genomic DNA
atggctctccttttgacactaacatcaccagacctggagggtacctgggacaccagagacaaggatggcttcaaagcccaggaggggccgcccctggctgtacctgaatttcctgtgtgtggactgtaccggatctacggagtctgtggctctttcagctccttcttcatcatccggtgcagcctttgtgctctggagaccctcaaatcaccccaacatgatcccttagagatacctgaacagtccctcaaactcatacccctggtgtctgggaaaagggaactcacaaggggccagaaagctggagagaagcccctggctgcaggacccggggaggaggaactgctccggggctcagcccctcatgctcaggacactcagagtgaggaactgccaccctcctgcaccatctcaggagagaagaagccgccagcagtctctggagaagccaccggggctgatgctgggagactgtgcccgcccccccgctccagggctccccacaaagacagaactctagcccgctccaggccccagactcagggggaagattgttccctcccagtgggagaggtgaagataggaaagaggtcctattctccagcccccgggaagcagaaaaagcctaatgccatgggtctggccccaacatcatctccgggtgcccctaactcagcccgtgccacacacaacccagtgccctgtgggtcaggccgggggccctgccacctggccaatctcctcagtacattggcgcagagcaaccaaaacagagaccacaagcaggggcccccggaagtgacctgccaaattaggaaaaagacacgaaccctataccgctcagatcagctggaggagctagagaagatattccaagaagaccactatcctgacagtgataaacgccgagagattgcccagacggtgggggtgaccccccagcgcatcatggtaaagggggccggctcactggtggcagggtggagtggcggagggcccaccattgaaacactcgaattgcagagtgagcgctcagcggtagcctgggtgtggttccagaatcgccgggccaagtggcgaaaaatggagaaactgaatgggaaagaaagcaaggacaatcctgcagcccctggccctgccagcagtcaatgcagctctgcagctgagatcctacctgctgtgcccatggagccaaagcctgaccctttccctcaggagtcccctctggatacctttccagagccccccatgctgctgacttctgaccagactttggcccccacccaacccagtgagggtgctcagagggtggtgacccccccactcttcagccccccacctgtgcgaagggccgatcttcctttcccccttggccctgtccacaccccccaactgatgccactgctgatggatgttgctggcagtgacagcagccacaaggacggcccctgtgggtcctgggggacaagcatcaccctgccacccccctgttcatatttggaggagctggagccccaggattaccaacagagcaaccagccaggacccttccagttctcccaggctccacagcccccgcttttccagtcccctcagcccaagttgccctacctccccactttccccttctccatgcccagttcactgacgcttccaccgcccgaagactctctctttatgtttccctgtggccccagcgggggcacatcgcagggctattgcccaggtgcctcctcaggacagatcctgatgcaaccacctgctgggaatataggtacagcctcctggagtgacccctgtttgccagagctgcccttccctggtccgttctgcccacaagctctggggcatcccccaggaggggatggctactttcctgatctatttccaactccctgcccccaggctctgggcaggcagccttcgtcagctctctcatggatgcctgaaggggccagaccagggactgggcccttactcagcaaggcaaaagaggaaccaccagctgcttccctggatcagccctcagcactggaggaggccagaggggatgacaagaatagccatgtcccc

SEQ ID NO: 4721 - DNA, 1977 bp, Homo sapiens
  source 1..1977: mol_type = genomic DNA
atggctctccttttgacactaacatcaccagacctggagggtacctgggacaccagagacaaggatggcttcaaagcccaggaggggccgcccctggctgtacctgaatttcctgtgtgtggactgtaccggatctacggagtctgtggctctttcagctccttcttcatcatccggtgcagcctttgtgctctggagaccctcaaatcaccccaacatgatcccttagagatacctgaacagtccctcaaactcatacccctggtgtctgggaaaagggaactcacaaggggccagaaagctggagagaagcccctggctgcaggacccggggaggaggaactgctccggggctcagcccctcatgctcaggacactcagagtgaggaactgccaccctcctgcaccatctcaggagagaagaagccgccagcagtctctggagaagccaccggggctgatgctgggagactgtgcccgcccccccgctccagggctccccacaaagacagaactctagcccgctccaggccccagactcagggggaagattgttccctcccagtgggagaggtgaagataggaaagaggtcctattctccagcccccgggaagcagaaaaagcctaatgccatgggtctggccccaacatcatctccgggtgcccctaactcagcccgtgccacacacaacccagtgccctgtgggtcaggccgggggccctgccacctggccaatctcctcagtacattggcgcagagcaaccaaaacagagaccacaagcaggggcccccggaagtgacctgccaaattaggaaaaagacacgaaccctataccgctcagatcagctggaggagctagagaagatattccaagaagaccactatcctgacagtgataaacgccgagagattgcccagacggtgggggtgaccccccagcgcatcatggtgtggttccagaatcgccgggccaagtggcgaaaaatggagaaactgaatgggaaagaaagcaaggacaatcctgcagcccctggccctgccagcagtcaatgcagctctgcagctgagatcctacctgctgtgcccatggagccaaagcctgaccctttccctcaggagtcccctctggatacctttccagagccccccatgctgctgacttctgaccagactttggcccccacccaacccagtgagggtgctcagagggtggtgacccccccactcttcagccccccacctgtgcgaagggccgatcttcctttcccccttggccctgtccacaccccccaactgatgccactgctgatggatgttgctggcagtgacagcagccacaaggacggcccctgtgggtcctgggggacaagcatcaccctgccacccccctgttcatatttggaggagctggagccccaggattaccaacagagcaaccagccaggacccttccagttctcccaggctccacagcccccgcttttccagtcccctcagcccaagttgccctacctccccactttccccttctccatgcccagttcactgacgcttccaccgcccgaagactctctctttatgtttccctgtggccccagcgggggcacatcgcagggctattgcccaggtgcctcctcaggacagatcctgatgcaaccacctgctgggaatataggtacagcctcctggagtgacccctgtttgccagagctgcccttccctggtccgttctgcccacaagctctggggcatcccccaggaggggatggctactttcctgatctatttccaactccctgcccccaggctctgggcaggcagccttcgtcagctctctcatggatgcctgaaggggccagaccagggactgggcccttactcagcaaggcaaaagaggaaccaccagctgcttccctggatcagccctcagcactggaggaggccagaggggatgacaagaatagccatgtcccc

SEQ ID NO: 4722 - DNA, 1932 bp, Homo sapiens
  source 1..1932: mol_type = genomic DNA
atggcagactattcaacagtgcctcccccctcttctggctcagctggtggcggtggtggcggcggtggtggtggaggagttaacgacgctttcaaagatgcactgcagagagcccggcagattgcagcaaaaattggaggtgatgcagggacatcactgaattcaaatgactatggttatgggggacaaaaaagacctttagaagatggagatcaaccagatgctaagaaagttgctcctcaaaatgactcttttggaacacagttaccaccgatgcatcagcagcaaagcagatctgtaatgacagaagaatacaaagttccagatggaatggttggattcataattggcagaggaggtgaacagatctcacgcatacaacaggaatctggatgcaaaatacagatagctcctgacagtggtggccttccagaaaggtcctgtatgttaactggaacacctgaatctgtccagtcagcaaaacggttactggaccagattgttgaaaaaggaagaccagctcctggcttccatcatggcgatggaccgggaaatgcagttcaagaaatcatgattccagctagcaaggcaggattagtcattggaaaagggggagaaactattaaacagcttcaggaacgggctggagttaaaatggttatgattcaagacgggccgcagaacactggtgctgacaaacctcttaggattacaggagacccatataaagttcaacaagccaaggaaatggtgttagagttaattcgtgatcaaggcggtttcagagaagttcggaatgagtatgggtcaagaataggaggaaatgaagggatagatgtccccattccaagatttgctgttggcattgtaataggaagaaatggagagatgatcaaaaaaatacaaaatgatgctggtgttcgcattcagtttaagccagatgatgggacaacacccgaaaggatagcacaaataacaggacctccagaccgatgtcaacatgctgcagaaattattacagaccttcttcgaagtgttcaggctggtaatcctggtggacctggacctggtggtcgaggaagaggtagaggtcaaggcaactggaacatgggaccacctggtggactacaggaatttaattttattgtgccaactgggaaaactggattaataataggaaaaggaggtgaaaccataaaaagcataagccagcagtctggtgcaagaatagaacttcagagaaatcctccaccaaatgcagatcctaatatgaagttatttacaattcgtggcactccacaacagatagactatgctcggcaactcatagaagaaaagattggtggcccagtaaatcctttagggccacctgtaccccatgggccccatggtgtcccaggcccccatggacctcctgggcctccagggcctggaactccaatgggaccatacaaccctgcaccttataatcctggaccaccaggcccggctcctcatggtcctccagccccatatgctccccagggatggggaaatgcatatccacactggcagcagcaggctcctcctgatccagctaaggcaggaacggatccaaattcagcagcttgggctgcttattacgctcactattatcaacagcaagcacagccaccaccagcagcccctgcaggtgcaccaactacaactcaaactaatggacaaggagatcagcagaatccagccccagctggacaggttgattataccaaggcttgggaagagtactacaagaaaatgggtcaggcagttcctgctccgactggggctcctccaggtggtcagccagattatagtgcagcctgggctgagtattatagacaacaagcagcctattatgcccagacaagtccccagggaatgccacagcatcctccagcacctcagggccaa

SEQ ID NO: 4723 - DNA, 1959 bp, Homo sapiens
  source 1..1959: mol_type = genomic DNA
atggcagactattcaacagtgcctcccccctcttctggctcagctggtggcggtggtggcggcggtggtggtggaggagttaacgacgctttcaaagatgcactgcagagagcccggcagattgcagcaaaaattggaggtgatgcagggacatcactgaattcaaatgactatggttatgggggacaaaaaagacctttagaagatggagatcaaccagatgctaagaaagttgctcctcaaaatgactcttttggaacacagttaccaccgatgcatcagcagcaaagatctgtaatgacagaagaatacaaagttccagatggaatggttggattcataattggcagaggaggtgaacagatctcacgcatacaacaggaatctggatgcaaaatacagatagctcctgacagtggtggccttccagaaaggtcctgtatgttaactggaacacctgaatctgtccagtcagcaaaacggttactggaccagattgttgaaaaaggaagaccagctcctggcttccatcatggcgatggaccgggaaatgcagttcaagaaatcatgattccagctagcaaggcaggattagtcattggaaaagggggagaaactattaaacagcttcaggaacgggctggagttaaaatggttatgattcaagacgggccgcagaacactggtgctgacaaacctcttaggattacaggagacccatataaagttcaacaagccaaggaaatggtgttagagttaattcgtgatcaaggcggtttcagagaagttcggaatgagtatgggtcaagaataggaggaaatgaagggatagatgtccccattccaagatttgctgttggcattgtaataggaagaaatggagagatgatcaaaaaaatacaaaatgatgctggtgttcgcattcagtttaagccagatgatgggacaacacccgaaaggatagcacaaataacaggacctccagaccgatgtcaacatgctgcagaaattattacagaccttcttcgaagtgttcaggctggtaatcctggtggacctggacctggtggtcgaggaagaggtagaggtcaaggcaactggaacatgggaccacctggtggactacaggaatttaattttattgtgccaactgggaaaactggattaataataggaaaaggaggtgaaaccataaaaagcataagccagcagtctggtgcaagaatagaacttcagagaaatcctccaccaaatgcagatcctaatatgaagttatttacaattcgtggcactccacaacagatagactatgctcggcaactcatagaagaaaagattggtggcccagtaaatcctttagggccacctgtaccccatgggccccatggtgtcccaggcccccatggacctcctgggcctccagggcctggaactccaatgggaccatacaaccctgcaccttataatcctggaccaccaggcccggctcctcatggtcctccagccccatatgctccccagggatggggaaatgcatatccacactggcagcagcaggctcctcctgatccagctaaggcaggaacggatccaaattcagcagcttgggctgcttattacgctcactattatcaacagcaagcacagccaccaccagcagcccctgcaggtgcaccaactacaactcaaactaatggacaaggagatcagcagaatccagccccagctggacaggttgattataccaaggcttgggaagagtactacaagaaaatgggtcaggcagttcctgctccgactggggctcctccaggtggtcagccagattatagtgcagcctgggctgagtattatagacaacaagcagcctattatgcccagacaagtccccagggaatgccacagcatcctccagcacctcagtgcaggtttgatccagccagtatagaactagctctg

SEQ ID NO: 4724 - DNA, 1290 bp, Homo sapiens
  source 1..1290: mol_type = genomic DNA
atggccagctctgctaagtcagctgagatgcccaccatctccaaaaccgttaaccctactcctgatcctcatcaagaatatctggaccctaggattaccattgccttattcgaaattggatcacattccccttcctcctggggctctctccctttcctaaagaatagcagccatcaagttacagaacaacagactgcacagaagtttaacaatctcttaaaagaaattaaagatattcttaaaaatatggcaggttttgaagagaagatcacagaagcaaaagaactttttgaggaaaccaatattactgaggatgtgtcagcccacaaagaaaatatcagaggacttgacaaaatcaatgaaatgttatcaacaaacctgcctgttagtttagccccagagaaagaagacaatgaaaagaaacaggagatgatattggaaaccaatattactgaggatgtgtcagcccacaaagaaaatatcagaggacttgacaaaatcaatgaaatgttatcaacaaacctgcctgttagtttagccccagagaaagaagacaatgaaaagaaacagcagatgataatggaaaaccagaactctgagaacaccgcacaagtttttgcaagagatttggtaaatcgtttagaagaaaaaaaagtccttaacgaaactcaacaaagtcaggaaaaagcaaaaaacagacttaatgttcaagaagaaactatgaaaattaggaacaacatggagcagttactacaggaagcagaacactggagtaaacaacatactgagctcagtaaactgataaaatcctatcagaaatctcagaaagacataagtgaaactcttggaaataatggagtcggtttccaaacccagccaaataatgaagtgtcggctaagcatgagctggaggaacaggtgaagaaactgagccatgacacctattcattgcagttgatggcagctttgctagagaatgaatgccaaatcttacagcagagagtagagattctcaaggaactccatcatcagaaacagggaactctgcaagagaagccaattcagataaactataaacaggacaagaaaaatcagaagccatcagaagcaaagaaagtagaaatgtataagcagaacaagcaagcaatgaagggtacattttggaaaaaagacagatcctgtagaagcctggatgtttgtcttaataagaaagcttgcaatacccagttcaatattcatgttgcaagaaaagctcttaggggaaaaatgaggtcagctagcagcctaaga

SEQ ID NO: 4725 - DNA, 2811 bp, Homo sapiens
  source 1..2811: mol_type = genomic DNA
atgactgactccaagtatttcacaaccaataaaaaaggagaaatatttgaactaaaagctgaactcaacaatgaaaagaaagaaaagagaaaggaggctgtgaagaaagtgattgctgctatgaccgtggggaaggatgttagttctctctttccagacgtagtgaactgtatgcagactgacaatctggaactaaagaagcttgtgtatctctacttgatgaactacgccaagagtcagccagacatggccatcatggctgtaaacagctttgtgaaggactgtgaagatcctaatcctttgattcgagccttggcagtcagaaccatggggtgcatccgggtagacaaaattacagaatatctctgtgagccgctccgcaagtgcttgaaggatgaggatccctatgttcggaaaacagcagcagtctgcgtggcaaaactccatgatatcaatgcccaaatggtggaagatcagggatttctggattctctacgggatctcatagcagattcaaatccaatggtggtggctaatgccgtagcggcattatctgaaatcagtgagtctcacccaaacagcaacttacttgatctgaacccacagaacattaataagctgctgacagccctgaatgaatgcactgaatggggccagattttcatcctggactgcctgtctaattacaaccctaaagatgatcgggaggctcagagcatctgtgagcgggtaactccccggctatcccatgccaactcagcagtggtgctttcagcggtaaaagtcctaatgaagtttctagaattgttacctaaggattctgactactacaatatgctgctgaagaagttagcccctccacttgtcactttgctgtctggggagccagaagtgcagtatgtcgccctgaggaacatcaacttaattgtccagaaaaggcctgaaatcttgaagcaggaaatcaaagtcttctttgtgaagtacaatgatcccatctatgttaaactagagaagttggacatcatgattcgtttggcatctcaagccaacattgctcaggttctggcagaactgaaagaatatgctacagaggtggatgttgactttgttcgaaaagctgtgcgggccattggacggtgtgccatcaaggtggagcaatctgcagagcgctgtgtaagcacattgcttgatctaatccagaccaaagtgaattatgtggtccaagaagcaattgttgtcatcagggacatcttccgcaaataccccaacaagtatgaaagtatcatcgccactctgtgtgagaacttagactcgctggatgagccagatgctcgagcagctatgatttggattgtgggagaatatgctgaaagaattgacaatgcagatgagttactagaaagcttcctggagggttttcacgatgaaagcacccaggtgcagctcactctgcttactgccatagtgaagctgtttctcaagaaaccatcagaaacacaggagctagtccagcaggtcttgagtttggcaacacaggattctgataatcctgaccttcgagaccggggctatatttattggcgccttctctcaactgaccctgttacagctaaagaagtagtcttgtctgagaagccactgatctctgaggagacggaccttattgagccaactctgctggatgagctaatctgccacattggttctttggcctctgtgtatcataagcctcccaatgcttttgtggaaggaagtcatggaattcatcgtaaacacttgccaattcatcatgggagcactgatgcaggtgacagccctgttggcactaccactgcaacgaacctggaacagcctcaggttatcccctctcaaggtgatcttctaggggatcttttaaaccttgacctcggtcccccagtcaatgtgccacaggtgtcctccatgcagatgggagcagtggatctcctaggaggaggactagatagtctggtgggacaatccttcatcccatcatcggtgcctgcaacctttgctccttcacctacacctgctgtggtcagcagtggactgaatgacctgtttgaactctccacagggataggcatggcacctggtggatatgtggctcctaaggctgtctggctacctgcagtaaaggctaaaggcttggagatttccggaacatttactcaccgccaagggcacatctatatggaaatgaacttcaccaataaagctctgcagcacatgacagattttgcaatccagtttaacaaaaatagctttggtgtcatccccagcactcctctggccatccatacaccactgatgccaaaccagagcattgatgtctccctgcctctcaataccttgggcccagtcatgaagatggaacctctgaataacctccaggtggctgtgaaaaacaatatcgatgtcttctacttcagctgcctcatcccactcaatgtgctttttgtagaagatggcaaaatggagcgccaggtcttccttgcaacatggaaggatattcccaatgaaaatgaacttcagtttcagattaaggaatgtcatttaaatgctgacactgtttccagcaagttgcaaaacaacaatgtttatactattgccaagaggaatgtggaagggcaggacatgctgtaccaatccctgaagctcactaatggcatttggattttggccgaactacgtatccagccaggaaaccccaattacacgctgtcactgaagtgtagagctcctgaagtctctcaatacatctatcaggtctacgacagcattttgaaaaac

SEQ ID NO: 4726 - DNA, 1317 bp, Homo sapiens
  source 1..1317: mol_type = genomic DNA
atggcagacccagatgtcctcactgaagttccagcagcattgaagcggttagccaagtatgtgatccggggattttatggcattgagcatgccttggccttggacatcttgatcaggaactcctgtgtgaaagaggaggatatgctggagctgctcaagtttgatcggaagcaacttcgatcagttttgaataatttaaagggagacaagtttatcaaatgcagaatgagggtagagactgctgcagacgggaaaaccactcgccataactactacttcatcaattatcgtactcttgttaatgtggtaaaatataaactggaccacatgagaagaagaattgagaccgatgagagagattcgaccaaccgggcttccttcaaatgtcctgtctgtagtagtactttcacagacttagaagctaatcagctctttgatcctatgacaggaactttccgctgtactttttgccatacagaggtagaagaggatgaatcagcaatgcccaaaaaagatgcacgcacacttttggcaaggtttaatgaacaaattgagcccatttatgcattgcttcgggagacagaggatgtgaacttggcctatgaaatacttgagccagaacccacagaaatcccagccctgaaacagagcaaggaccatgcagcaactactgctggagctgctagcctagcaggtgggcaccaccgggaagcatgggccaccaaaggtccttcctatgaagacttatacactcagaatgttgtcattaacatggatgaccaagaagatcttcatcgagcctcactggaagggaaatctgccaaagagaggcctatttggttgagagaaagcactgtccaaggggcatatggttctgaagatatgaaagaagggggcatagatatggacgcatttcaggagcgtgaggaaggccatgctgggcctgatgacaacgaagaggtcatgcgagcactgctcattcacgagaaaaagacttcctctgccatggctggttcagtgggggcagctgctccagtgaccgctgccaatggcagtgactcagaaagcgagaccagtgagtcagatgatgattctccaccccgtccggcagctgtggctgtgcataaacgagaagaggatgaagaggaagatgacgagtttgaagaagtagcagatgaccccattgtcatggtggctggccgtccgttctcctacagtgaagtgagccaacggccagagctagtggcccagatgacaccagaagaaaaggaagcatatatagcaatgggacaacgcatgtttgaggacctctttgag

SEQ ID NO: 4727 - DNA, 1503 bp, Homo sapiens
  source 1..1503: mol_type = genomic DNA
atggaggcttcgcgctgccggctcagtcccagcggcgacagtgtcttccatgaagaaatgatgaagatgcgacaggctaagctggattatcagaggctactacttgagaagaggcaaaggaaaaagcgccttgagccatttatggtgcagcccaatccagaagccaggctacgtcgggcaaagccaagggccagtgatgagcagactcccttggtgaactgtcatactccccacagcaatgtcatcttacatggtattgatggtccagctgctgtcctgaaaccagacgaagttcatgctccatcagtaagctcctctgttgtggaagaagatgctgaaaacaccgtggatactgcttccaagccaggacttcaggagcgtctccaaaagcatgatatctctgaaagtgtgaacttcgatgaggagactgatggaatatcccagtcagcatgtttagaaagacccaattctgcatcaagccagaattcaaccgatacaggcacttccggttctgctactgccgcccaaccagctgataacctcctgggagacatagacgacctggaggactttgtgtatagtcctgcccctcaaggtgtcacagtaagatgtcggataatccgggataaaaggggaatggatcggggtctcttccccacctactatatgtacttggaaaaagaagaaaatcagaagatatttcttcttgcagctagaaagcggaaaaagagcaaaacagccaactaccttatctccattgatccagttgatttatctcgtgaaggagaaagttatgtcggcaagcttagatccaacctcatggggaccaagtttacagtttatgaccgtggcatctgccccatgaagggccggggtttggtaggagcggcccacacccggcaggagctggctgccatctcctatgaaacaaacgtacttggatttaaaggtcctaggaaaatgtctgtgatcattcctggaatgacactgaatcataagcagatcccctatcagccacaaaacaaccatgacagtttgctctcaaggtggcagaacagaactatggaaaatctggttgagctgcacaacaaggcccccgtctggaacagtgacactcagtcctatgtcctcaacttccgtggccgggtcactcaggcgtctgtgaagaacttccagatagtccacaaaaatgaccctgattatatagtcatgcagtttggacgtgtggcagatgacgtgttcacactggattacaactacccactttgtgcagtacaggcctttggcatcggtctttctagctttgacaaatgtatccaaaccttgagaatgcaggagctctgtgagctccaccgtcagcaccattcagctgcatcccttgtgcacagaactgtttgccagcgttgggtgggacacccgtggcggctgctccctcagacctcccttctgtggactgacctctcacctccgcctgttgttcctgcaccacatcagataagcatg

SEQ ID NO: 4728 - DNA, 1326 bp, Homo sapiens
  source 1..1326: mol_type = genomic DNA
atggaggcttcgcgctgccggctcagtcccagcggcgacagtgtcttccatgaagaaatgatgaagatgcgacaggctaagctggattatcagaggctactacttgagaagaggcaaaggaaaaagcgccttgagccatttatggtgcagcccaatccagaagccaggctacgtcgggcaaagccaagggccagtgatgagcagactcccttggtgaactgtcatactccccacagcaatgtcatcttacatggtattgatggtccagctgctgtcctgaaaccagacgaagttcatgctccatcagtaagctcctctgttgtggaagaagatgctgaaaacaccgtggatactgcttccaagccaggacttcaggagcgtctccaaaagcatgatatctctgaaagtgtgaacttcgatgaggagactgatggaatatcccagtcagcatgtttagaaagacccaattctgcatcaagccagaattcaaccgatacaggcacttccggttctgctactgccgcccaaccagctgataacctcctgggagacatagacgacctggaggactttgtgtatagtcctgcccctcaaggtgtcacagtaagatgtcggataatccgggataaaaggggaatggatcggggtctcttccccacctactatatgtacttggaaaaagaagaaaatcagaagatatttcttcttgcagctagaaagcggaaaaagagcaaaacagccaactaccttatctccattgatccagttgatttatctcgtgaaggagaaagttatgtcggcaagcttagatccaacctcatggggaccaagtttacagtttatgaccgtggcatctgccccatgaagggccggggtttggtaggagcggcccacacccggcaggagctggctgccatctcctatgaaacaaacgtacttggatttaaaggtcctaggaaaatgtctgtgatcattcctggaatgacactgaatcataagcagatcccctatcagccacaaaacaaccatgacagtttgctctcaaggtggcagaacagaactatggaaaatctggttgagctgcacaacaaggcccccgtctggaacagtgacactcagtcctatgtcctcaacttccgtggccgggtcactcaggcgtctgtgaagaacttccagatagtccacaaaaatgaccctgattatatagtcatgcagtttggacgtgtggcagatgacgtgttcacactggattacaactacccactttgtgcagtacaggcctttggcatcggtctttctagctttgacagtaagctggcgtgtgaa

SEQ ID NO: 4729 - DNA, 1626 bp, Homo sapiens
  source 1..1626: mol_type = genomic DNA
atgcctctgcgggatgaaaccctccgagaggtgtgggcctctgacagtgggcatgaagaagaaagcctgagcccggaggccccgcggcgccccaaacagcgacccgccccggcacagaggctaaggaagaagaggacggaggcccccgaatccccctgccccacgggatccaagccccggaagcccggagctgggcggacggggaggccgcgggaggagccttccccagacccagcccaggcccgggcgccgcagacggtctacgccaggttcctcagggaccccgaggccaagaagcgcgacccccgggaaacctttctggtagcccgtgccccagacgcggaggacgaggaggaggaggaagaggaggacgaggaggacgaggaagaggaggcagaggaaaagaaagagaaaatccttctgcctcccaagaagcccctgagagagaagagctccgcagacctgaaggagaggagggccaaggcccagggcccaaggggagacctgggaagccctgaccccccaccgaaacctctgcgtgttaggaataaggaagctccagcaggggaggggaccaagatgagaaagaccaagaagaaagggtctggggaggccgacaaggacccctcagggagcccagccagtgcgaggaagagcccagcagccatgtttctggttggggaaggcagtcctgacaagaaagccctgaagaagaaaggcactcccaaaggcgcgaggaaggaggaagaagaggaggaggaggcagctacggtgataaagaagagcaatcaaaagggcaaagccaaaggaaaaggcaaaaagaaagcgaaggaggagagggccccgtctccccccgtggaggtggacgaaccccgggagtttgtgctccggcctgccccccagggccgcacggtgcgctgccggctgacccgggacaaaaagggcatggatcgaggcatgtatccctcctacttcctgcacctggacacggagaagaaggtgttcctcttggctggcaggaaacgaaaacggagcaagacagccaattacctcatctccatcgaccctaccaatctgtcccgaggaggggagaatttcatcgggaagctgaggtccaacctcctggggaaccgcttcacggtctttgacaacgggcagaacccacagcgtgggtacagcactaatgtggcaagccttcggcaggagctggcagctgtgatctatgaaaccaacgtgctgggcttccgtggcccccggcgcatgaccgtcatcattcctggcatgagtgcggagaacgagagggtccccatccggccccgaaatgctagtgacggcctgctggtgcgctggcagaacaagacgctggagagcctcatagaactgcacaacaagccacctgtctggaacgatgacagtggctcctacaccctcaacttccaaggccgggtcacccaggcctcagtcaagaacttccagattgtccacgctgatgaccccgactatatcgtgctgcagttcggccgcgtggcggaggacgccttcaccctagactaccggtacccgctgtgcgccctgcaggccttcgccatcgccctctccagtttcgacgggaagctggcctgcgag

SEQ ID NO: 4730 - DNA, 1467 bp, Homo sapiens
  source 1..1467: mol_type = genomic DNA
atgcctctgcgggatgaaaccctccgagaggtgtgggcctctgacagtgggcatgaagaagaaagcctgagcccggaggccccgcggcgccccaaacagcgacccgccccggcacagaggctaaggaagaagaggacggaggcccccgaatccccctgccccacgggatccaagccccggaagcccggagaggaggaggaggaagaggaggacgaggaggacgaggaagaggaggcagaggaaaagaaagagaaaatccttctgcctcccaagaagcccctgagagagaagagctccgcagacctgaaggagaggagggccaaggcccagggcccaaggggagacctgggaagccctgaccccccaccgaaacctctgcgtgttaggaataaggaagctccagcaggggaggggaccaagatgagaaagaccaagaagaaagggtctggggaggccgacaaggacccctcagggagcccagccagtgcgaggaagagcccagcagccatgtttctggttggggaaggcagtcctgacaagaaagccctgaagaagaaaggcactcccaaaggcgcgaggaaggaggaagaagaggaggaggaggcagctacggtgataaagaagagcaatcaaaagggcaaagccaaaggaaaaggcaaaaagaaagcgaaggaggagagggccccgtctccccccgtggaggtggacgaaccccgggagtttgtgctccggcctgccccccagggccgcacggtgcgctgccggctgacccgggacaaaaagggcatggatcgaggcatgtatccctcctacttcctgcacctggacacggagaagaaggtgttcctcttggctggcaggaaacgaaaacggagcaagacagccaattacctcatctccatcgaccctaccaatctgtcccgaggaggggagaatttcatcgggaagctgaggtccaacctcctggggaaccgcttcacggtctttgacaacgggcagaacccacagcgtgggtacagcactaatgtggcaagccttcggcaggagctggcagctgtgatctatgaaaccaacgtgctgggcttccgtggcccccggcgcatgaccgtcatcattcctggcatgagtgcggagaacgagagggtccccatccggccccgaaatgctagtgacggcctgctggtgcgctggcagaacaagacgctggagagcctcatagaactgcacaacaagccacctgtctggaacgatgacagtggctcctacaccctcaacttccaaggccgggtcacccaggcctcagtcaagaacttccagattgtccacgctgatgaccccgactatatcgtgctgcagttcggccgcgtggcggaggacgccttcaccctagactaccggtacccgctgtgcgccctgcaggccttcgccatcgccctctccagtttcgacgggaagctggcctgcgag

SEQ ID NO: 4731 - DNA, 1020 bp, Homo sapiens
  source 1..1020: mol_type = genomic DNA
atggagatctcctctcatcagtctcacctcctgcagcaactgaacgagcagcgcaggcaagatgtattttgtgactgcagtattctagttgaagggaaggtcttcaaagcacatcgaaatgtattattcgctagtagcggctactttaaaatgcttctttctcagaattcaaaggagacgagtcagccaaccacagctacatttcaggctttctcccctgacacttttacagttatcttggacttcgtatattctggcaaactgtctcttactggtcagaatgtcatagaagtgatgtcggctgctagcttccttcagatgactgatgtcataagtgtatgtaagacttttattaaatcttccttagacattagtgagaaagaaaaagatcgctatttcagtctctcagataaagatgccaattctaatggtgtagaacgttcctctttttatagtggtggctggcaagaaggaagcagttctccacgttctcacctaagcccagagcaaggaacaggtataataagtggaaaatcttggaataagtataattatcatccagcctcccagaagaatactcaacaacccttggccaagcatgaaccaaggaaagagtccattaaaaagaccaaacatttgagattgtcacagccttctgaagttactcattataagtcaagcaaacgagaagtacgaacatctgattcttccagccatgtttcccagtctgaagaacaagcacagattgatgctgaaatggactctactcctgttggctatcagtacggtcaaggatctgatgtcacatccaaaagctttccagatgatctgcctcggatgcgattcaagtgcccgtactgcacacatgtggtgaagcggaaggcagacctaaagcgccaccttcgttgtcatacaggagaaaggccctatccatgtcaagcttgtggaaaaagatttagcaggctagaccatctaagtagccattttcgaacaatggagataaggattccagatggcact

SEQ ID NO: 4732 - DNA, 1323 bp, Homo sapiens
  source 1..1323: mol_type = genomic DNA
atggagatctcctctcatcagtctcacctcctgcagcaactgaacgagcagcgcaggcaagatgtattttgtgactgcagtattctagttgaagggaaggtcttcaaagcacatcgaaatgtattattcgctagtagcggctactttaaaatgcttctttctcagaattcaaaggagacgagtcagccaaccacagctacatttcaggctttctcccctgacacttttacagttatcttggacttcgtatattctggcaaactgtctcttactggtcagaatgtcatagaagtgatgtcggctgctagcttccttcagatgactgatgtcataagtgtatgtaagacttttattaaatcttccttagacattagtgagaaagaaaaagatcgctatttcagtctctcagataaagatgccaattctaatggtgtagaacgttcctctttttatagtggtggctggcaagaaggaagcagttctccacgttctcacctaagcccagagcaaggaacaggtataataagtggaaaatcttggaataagtataattatcatccagcctcccagaagaatactcaacaacccttggccaagcatgaaccaaggaaagagtccattaaaaagaccaaacatttgagattgtcacagccttctgaagttactcattataagtcaagcaaacgagaagtacgaacatctgattcttccagccatgtttcccagtctgaagaacaagcacagattgatgctgaaatggactctactcctgttggctatcagtacggtcaaggatctgatgtcacatccaaaagctttccagatgatctgcctcggatgcgattcaagtgcccgtactgcacacatgtggtgaagcggaaggcagacctaaagcgccaccttcgttgtcatacaggagaaaggccctatccatgtcaagcttgtggaaaaagatttagcaggctagaccatctaagtagccattttcgaacaattcaccaggcatgtaaactcatctgcagaaaatgtaaacgtcatgtgacagatctaacagggcaagtggtacaggagggaaccaggcgctacagactgtgtaatgagtgtcttgcagaatttggcatagacagcctccccattgacttggaagctgaacaacatcttatgtccccatcagatggagataaggattccagatggcacttgagtgaagatgagaatagatcctatgtggagattgtagaagatgggtctgctgatctggtcatccaacaggttgatgatagtgaagaagaagaagaaaaagaaattaagcccaacattagg

SEQ ID NO: 4733 - DNA, 1485 bp, Homo sapiens
  source 1..1485: mol_type = genomic DNA
atggagatgcaatcctattatgccaagcttttgggggagctgaatgaacagagaaagagggactttttctgtgactgcagcatcattgtggaagggcggatcttcaaggcccacaggaacattttgtttgctaacagcggctacttccgagccctgctcattcactatatccaggacagcgggcggcatagcaccgcctccttggacattgtcacctctgatgccttctccatcatcttagatttcctctattctgggaagttggatttgtgtggggagaatgtgattgaagtgatgtcggctgccagctacctgcagatgaatgacgtggtgaacttctgcaagacatacattaggtcatccctcgacatttgccgaaagatggagaaggaggctgctgtggctgcagcagtggcggcggcagcggcggcggctgcagcggcggcagcagcggcggctcatcaggttgacagtgaaagccccagttcaggccgggaggggacctcctgtggtaccaagagcttggtctcctctccagccgagggagaaaagagcgtggagtgcctgagagagtccccttgcggtgactgcggagactgccaccccttggaactggtggtgagagacagccttggcggtggctcggctgacagcaacctctctactccacccaaacggatagagcccaaggtggaatttgatgctgatgaagtggaggtggacgttggtgaacagctgcagcagtatgctgccccgctgaacctggcccacgtggaggaggccttgccaagcggccaggcggttgacttggcttacagcaactaccacgtgaagcagttcctggaggcgctcttgcgcaacagcgctgccccgagcaaggatgatgcagaccatcacttttctaggagtttggaaggaagaccagaaggtgcaggagtagccatgagttccatgatggatgtccaggctgactggtatggagaggactcaggtgatgtgctggtggtccccatcaagctccacaagtgtcctttctgcccttacactgccaaacagaagggcatcctcaagcggcacatccgttcacacacaggcgagcggccctacccctgtgagacctgcggcaagaggttcactcgacaagagcacctgcggagccacgcactgagtgtccacagatccaaccgtccaatcatctgcaagggctgcaggagaacattcacgagtcacctgtcccaggggctgcggcgcttcgggctgtgtgacagctgcacctgcgttacagacacacccgatgatgatgatgatttgatgcccatcaaccttagcttggtggaggcttcatctgaaagccaagaaaagagcgacacagacaatgactggccaatctatgtggagtcgggtgaggaaaatgaccctgctggagatgattctgatgacaaaccacaaattcagcctaacttatcagaccgagagacacttacg

SEQ ID NO: 4734 - DNA, 1269 bp, Homo sapiens
  source 1..1269: mol_type = genomic DNA
atggaggacaagcgatcattgagtatggctcgctgtgaagaaagaaattcgaggggacaggatcatggcttggaaagggtgcctttccctccccagttgcagtcagagacctaccttcacccagcagatccttcccctgcctgggacgacccggggtccactgggagccctaacttgaggctgctgacagaagaaatcgctttccaacctctggccgaggaagcttcgttcagaaggccgcaccctgacggtgacgtcccgccccagggagaagataatctcctctccctcccctttccacagaaactgtggagactggtcagcagcaaccagttttcgtccatctggtgggatgacagtggggcttgtagagtgatcaatcaaaaactctttgaaaaggagattctcaaaagggacgtcgcacacaaagtgtttgccacaacttcgataaagagcttcttccgccagctaaacttgtatggcttccgaaaacggcgtcaatgcactttcaggaccttcacccgcattttctccgcaaaaaggctggtctccatcttgaataagttagagttctactgccatccttactttcaaagagactcccctcacctcctcgtgaggatgaagagaagagtgggtgtcaagtctgcaccaagacatcaggaggaggacaagccagaagctgctggatcctgtctggcaccagcagacactgagcaacaagatcacacgtctccgaatgagaatgaccaggtcacaccgcaacaccgggaaccggccggtcccaacacccaaatcaggagtggctctgctccaccagcaactcctgtgatggtgcctgattccgccgtggcgagtgacaacagtccagtgacccagccggccggcgagtggtcagagggcagccaggctcacgtcactccggtggccgctgtccctgggcctgcagcgctgcccttcctctatgtccctggatctcccactcagatgaattcttacgggcctgtggtggcccttcccacagcgtcccgtagtacccttgccatggacaccacaggacttcctgcacctggcatgctgcccttttgccatctctgggtaccggtgaccctagtggctgctggggctgcacagcctgctgcctccatggtcatgttcccccatctcccagctctgcaccaccattgcccccacagccaccgcacgtcacagtacatgccagctagcgatgggccccaggcgtacccagactacgcagaccagagcaca

SEQ ID NO: 4735 - DNA, 1176 bp, Homo sapiens
  source 1..1176: mol_type = genomic DNA
atggaagaacagcagccggaacctaaaagtcagcgcgactcggccctcggcgcggcggcggcggcgactccgggcggcctcagcctgagcctcagtccgggcgccagcggcagcagcggcagcggcagcgatggagacagcgtgccggtgtccccgcagcctgcgcccccctcgccgcccgcggcgccttgcctgccgcccctggcccaccacccgcacctccccccacaccccccgcccccgccgcctcagcatctcgcggcgcctgctcaccagccgcagccagcggcccagctgcaccgcaccaccaactttttcatcgacaacatcctgaggccggacttcggctgcaaaaaggagcagccgccaccgcagcttctggtggctgcggcggccagaggaggcgcaggaggaggaggccgggtcgagcgtgacagaggccagactgccgcaggtagagaccctgtccacccgttgggcacccgggcgccaggcgctgcctcgctcctgtgcgccccggacgcgaactgtggcccacccgacggctcccagccagccgccgccggcgcgggcgcgtctaaagctgggaacccggctgcggcggcggcggcggccgcggcggcagtggcggcggcggcggcggccgcagcagccaagccctcggacaccggtggcggcggcagtggaggcggcgcggggagccccggagcgcagggcaccaaatacccggagcacggcaacccggctatcctacttatgggctcagccaacggcgggcccgtggtcaaaactgactcgcagcagcctctcgtatggcccgcctgggtgtactgcacacgttattcggatcgtccatcctccggtccgcgcaccaggaagctgaagaagaagaagaacgagaaggaggacaagcggccgcggaccgcgttcacggccgagcagctgcagagactcaaggcggagttccaggcaaaccgctacatcacggagcagcggcggcagaccctggcccaggaactcagcctcaacgagtcccagatcaagatctggttccagaacaagcgcgccaagatcaagaaagccacaggcatcaagaacggcctggcgctgcacctcatggcccagggactgtacaaccactccaccaccacggtccaggacaaagacgagagcgag

SEQ ID NO: 4736 - DNA, 999 bp, Homo sapiens
  source 1..999: mol_type = genomic DNA
atggaggagaatgaccccaagcctggcgaagcagcggcggcggtggagggacagcggcagccggaatccagccccggcggcggctcgggcggcggcggcggtagcagcccgggcgaagcggacaccgggcgccggcgggctctgatgctgcccgcggtcctgcaggcgcccggcaaccaccagcacccgcaccgcatcaccaacttcttcatcgacaacatcctgcggcccgagttcggccggcgaaaggacgcggggacctgctgtgcgggcgcgggaggaggaaggggcggcggagccggcggcgaaggcggcgcgagcggtgcggagggaggcggcggcgcgggcggctcggagcagctcttgggctcgggctcccgagagccccggcagaacccgccatgtgcgcccggcgcgggcgggccgctcccagccgccggcagcgactctccgggtgacggggaaggcggctccaagacgctctcgctgcacggtggcgccaagaaaggcggcgaccccggcggccccctggacgggtcgctcaaggcccgcggcttgggcggcggcgacctgtcggtgagctcggactcggacagctcgcaagccggcgccaacctgggcgcgcagcccatgctctggccggcgtgggtctactgtacgcgctactcggaccggccttcttcaggtcccaggtctcgaaaaccaaagaagaagaacccgaacaaagaggacaagcggccgcgcacggcctttaccgccgagcagctgcagaggctcaaggccgagttccagaccaacaggtacctgacggagcagcggcgccagagcctggcgcaggagctgagcctcaacgagtcacagatcaagatttggttccagaacaagcgcgccaagatcaagaaggccacgggcaacaagaacacgctggccgtgcacctcatggcacagggcttgtacaaccactccaccacagccaaggagggcaagtcggacagcgag

SEQ ID NO: 4737 - DNA, 1269 bp, Homo sapiens
  source 1..1269: mol_type = genomic DNA
atggaggacaagcgatcattgagtatggctcgctgtgaagaaagaaattcgagaggacaggatcatggcttggaaagggtgcctttccctccccagttgcagtcagagacctaccttcacccagcagatccttcccctgcctgggacgacccggggtccactgggagccctaacttgaggctgctgacagaagaaatcgctttccaacctctggccgaggaagcttcgttcagaaggccgcaccctgacggtgacgtcccgccccagggagaagataatctcctctccctcccctttccacagaaactgtggagactggtcagcagcaaccagttttcgtccatctggtgggatgacagtggggcttgtagagtgatcaatcaaaaactctttgaaaaggagattctcaaaagggacgtcgcacacaaagtgtttgccacaacttcgataaagagcttcttccgccagctaaacttgtatggcttccgaaaacggcgtcaatgcactttcaggaccttcacccgcattttctccgcaaaaaggctggtctccatcttgaataagttagagttctactgccatccttactttcaaagagactcccctcacctcctcgtgaggatgaagagaagagtgggtgtcaagtctgcaccaagacatcaggaggaggacaagccagaagctgctggatcctgtctggcaccagcagacactgagcaacaagatcacacgtctccgaatgagaatgaccaggtcacaccgcaacaccgggaaccggccggtcccaacacccaaatcaggagtggctctgctccaccagcaactcctgtgatggtgcctgattccgccgtggcgagtgacaacagtccagtgacccagccggccggcgagtggtcagagggcagccaggctcacgtcactccggtggccgctgtccctgggcctgcagcgctgcccttcctctatgtccctggatctcccactcagatgaattcttacgggcctgtggtggcccttcccacagcgtcccgtagtacccttgccatggacaccacaggacttcctgcacctggcatgctgcccttttgccatctctgggtaccggtgaccctagtggctgctggggctgcacagcctgctgcctccatggtcatgttcccccatctcccagctctgcaccaccattgcccccacagccaccgcacgtcacagtacatgccagctagcgatgggccccaggcgtacccagactacgcagaccagagcaca

SEQ ID NO: 4738 - DNA, 1512 bp, Homo sapiens
  source 1..1512: mol_type = genomic DNA
atggcctgggtgctcaagatggacgaggtgatcgagtccgggctggtgcacgacttcgacgccagcctctcgggcatcgggcaggaactgggcgccggcgcttacagcatgagtgatgtcttggcattgcccattttcaagcaggaagattccagccttccattggatggtgaaacagagcacccaccctttcagtatgtgatgtgtgctgcaacgtcaccagcagtaaaactgcatgatgaaacgcttacttatttgaaccaaggtcagtcatatgaaattcggatgctggataatcggaaaatgggtgatatgcctgagatcaatggaaaattagtaaagagcatcataagggttgtattccatgacagacggctacaatacacagagcatcagcaacttgaaggatggaagtggaatcgcccaggagacagacttcttgatttagatattccaatgtctgtgggaataattgacacaaggacgaatccaagccagttaaatgcggttgaatttctgtgggacccagcaaaacgcacctctgctttcattcaggtacactgcatcagcacagaatttactccacggaagcacggaggtgaaaagggagtgccctttaggatccaggttgacacctttaagcagaatgaaaatggagaatacacagatcatctacactcagctagctgccaaatcaaagtttttaagcctaaaggtgcagacaggaaacaaaaaactgaccgagagaagatggagaagagaacagctcatgaaaaagaaaagtatcagccgtcctatgataccacaatcctcacagagtgttctccgtggcccgatgcccccacagcctatgtgaataacagcccttccccagcgcccactttcacctccccacagcagagcacttgcagtgtcccagacagcaattcttcttccccaaatcatcagggagatggagcttcacagacctctggtgaacaaattcagccttcagctacgatccaggaaacacagcaatggctgctcaaaaacagattctcttcctacacaagactgttctctaatttttcaggtgccgacttattaaaactgacaaaggaggatttagttcaaatttgtggtgcagccgatggaattcggctctataattcactgaagtcaaggtcggttagaccccgtttaaccatctatgtctgccgggagcagccaagcagcacagtgctgcaagggcagcagcaagctgcaagcagtgcaagcgagaatggcagtggggcaccctatgtttatcatgcaatctacttggaagaaatgattgcctcagaagttgctcgaaaacttgcgctggtgtttaatatccctctccaccaaattaatcaggtttacagacagggtcccaccggtattcacattcttgttagtgatcagatggttcagaattttcaagatgagagttgttttttattctccacagtaaaagctgaaagtagtgatggcatccacataattttgaag

SEQ ID NO: 4739 - DNA, 1620 bp, Homo sapiens
  source 1..1620: mol_type = genomic DNA
atggcctgggtgctcaagatggacgaggtgatcgagtccgggctggtgcacgacttcgacgccagcctctcgggcatcgggcaggaactgggcgccggcgcttacagcatgagtgatgtcttggcattgcccattttcaagcaggaagattccagccttccattggatggtgaaacagagcacccaccctttcagtatgtgatgtgtgctgcaacgtcaccagcagtaaaactgcatgatgaaacgcttacttatttgaaccaaggtcagtcatatgaaattcggatgctggataatcggaaaatgggtgatatgcctgagatcaatggaaaattagtaaagagcatcataagggttgtattccatgacagacggctacaatacacagagcatcagcaacttgaaggatggaagtggaatcgcccaggagacagacttcttgatttagatattccaatgtctgtgggaataattgacacaaggacgaatccaagccagttaaatgcggttgaatttctgtgggacccagcaaaacgcacctctgctttcattcaggtacactgcatcagcacagaatttactccacggaagcacggaggtgaaaagggagtgccctttaggatccaggttgacacctttaagcagaatgaaaatggagaatacacagatcatctacactcagctagctgccaaatcaaagtttttaagcctaaaggtgcagacaggaaacaaaaaactgaccgagagaagatggagaagagaacagctcatgaaaaagaaaagtatcagccgtcctatgataccacaatcctcacagagatgaggcttgagcctataattgaagatgcagttgaacatgagcagaaaaagtccagcaagcggactttgccagcagactacggtgattctctggcaaagcgaggcagttgttctccgtggcccgatgcccccacagcctatgtgaataacagcccttccccagcgcccactttcacctccccacagcagagcacttgcagtgtcccagacagcaattcttcttccccaaatcatcagggagatggagcttcacagacctctggtgaacaaattcagccttcagctacgatccaggaaacacagcaatggctgctcaaaaacagattctcttcctacacaagactgttctctaatttttcaggtgccgacttattaaaactgacaaaggaggatttagttcaaatttgtggtgcagccgatggaattcggctctataattcactgaagtcaaggtcggttagaccccgtttaaccatctatgtctgccgggagcagccaagcagcacagtgctgcaagggcagcagcaagctgcaagcagtgcaagcgagaatggcagtggggcaccctatgtttatcatgcaatctacttggaagaaatgattgcctcagaagttgctcgaaaacttgcgctggtgtttaatatccctctccaccaaattaatcaggtttacagacagggtcccaccggtattcacattcttgttagtgatcagatggttcagaattttcaagatgagagttgttttttattctccacagtaaaagctgaaagtagtgatggcatccacataattttgaag

SEQ ID NO: 4740 - DNA, 2880 bp, Homo sapiens
  source 1..2880: mol_type = genomic DNA
atggccttgctgggtaagcgctgtgacgtccccaccaacggctgcggacccgaccgctggaactccgcgttcacccgcaaagacgagatcatcaccagcctcgtgtctgccttagactccatgtgctcagcgctgtccaaactgaacgccgaggtggcctgtgtcgccgtgcacgatgagagcgcctttgtggtgggcacagagaaggggagaatgttcctgaatgcccggaaggagctacagtcagacttcctcaggttctgccgagggcccccgtggaaggatccggaggcagagcaccccaagaaggtgcagcggggcgagggtggaggccgtagcctccctcggtcctccctggaacatggctcagatgtgtaccttctgcggaagatggtagaggaggtgtttgatgttctttatagcgaggccctgggaagggccagtgtggtgccactgccctatgagaggctgctcagggagccagggctgctggccgtgcaggggctgcccgaaggcctggccttccgaaggccagccgagtatgaccccaaggccctcatggccatcctggaacacagccaccgcatccgcttcaagctcaagaggccacttgaggatggcgggcgggactcgaaggccctggtggagctgaacggtgtctccctgattcccaaggggtcacgggactgtggcctgcatggccaggcccccaaggtgccaccccaggacctgcccccaaccgccacctcctcctccatggccagcttcctgtacagcacggcgctccccaaccacgccatccgagagctcaagcaggaagcaccttcctgcccccttgcccccagcgacctgggcctgagtcggcccatgccagagcccaaggccaccggtgcccaagacttctccgactgttgtggacagaagcccactgggcctggtgggcctctcatccagaacgtccatgcctccaagcgcattctcttctccatcgtccatgacaagtcagagaagtgggacgccttcataaaggaaaccgaggacatcaacacgctccgggagtgtgtgcagatcctgtttaacagcagatatgcggaagccctgggcctggaccacatggtccccgtgccctaccggaagattgcctgtgacccggaggctgtggagatcgtgggcatcccggacaagatccccttcaagcgcccctgcacttatggagtccccaagctgaagcggatcctggaggagcgccatagtatccacttcatcattaagaggatgtttgatgagcgaattttcacagggaacaagtttaccaaagacaccacgaagctggagccagccagcccgccagaggacacctctgcagaggtctctagggccaccgtccttgaccttgctgggaatgctcggtcagacaagggcagcatgtctgaagactgtgggccaggaacctccggggagctgggcgggctgaggccgatcaaaattgagccagaggatctggacatcattcaggtcaccgtcccagacccctcgccaacctctgaggaaatgacagactcgatgcctgggcacctgccatcggaggattctggttatgggatggagatgctgacagacaaaggtctgagtgaggacgcgcggcccgaggagaggcccgtggaggacagccacggtgacgtgatccggcccctgcggaagcaggtggagctgctcttcaacacacgatacgccaaggccattggcatctcggagcccgtcaaggtgccgtactccaagtttctgatgcacccggaggagctgtttgtggtgggactgcctgaaggcatctccctccgcaggcccaactgcttcgggatcgccaagctccggaagattctggaggccagcaacagcatccagtttgtcatcaagaggcccgagctgctcactgagggagtcaaagagcccatcatggatagtcaagagagggattccggggaccctctggtggacgagagcctgaagagacagggctttcaagaaaattatgacgcgaggctctcacggatcgacatcgccaacacactaagggagcaggtccaggaccttttcaataagaaatacggggaagccttgggcatcaagtacccggtccaggtcccctacaagcggatcaagagtaaccccggctccgtgatcatcgaggggctgcccccaggaatcccgttccgaaagccctgtaccttcggctcccagaacctggagaggattcttgctgtggctgacaagatcaagttcacagtcaccaggcctttccaaggactcatcccaaagcctgatgaagatgacgccaacagactcggggagaaggtgatcctgcgggagcaggtgaaggaactcttcaacgagaaatacggtgaggccctgggcctgaaccggccggtgctggtcccttataaactaatccgggacagcccagacgccgtggaggtcacgggtctgcctgatgacatccccttccggaaccccaacacgtacgacatccaccggctggagaagatcctgaaggcccgagagcatgtccgcatggtcatcattaaccagctccaaccctttgcagaaatctgcaatgatgccaaggtgccagccaaagacagcagcattcccaagcgcaagagaaagcgggtctcggaaggaaattccgtctcctcttcctcctcgtcttcctcttcctcgtcctctaacccggattcagtggcatcggccaaccagatctcactcgtggtaaagttgcaccgatttggactccggcactcatctctgtggccctcacccctctgtctggcagggccgtctactctgggatgtgggcccaggggacggggaggcactgggctt

SEQ ID NO: 4741 - DNA, 2832 bp, Homo sapiens
  source 1..2832: mol_type = genomic DNA
atggccttgctgggtaagcgctgtgacgtccccaccaacggctgcggacccgaccgctggaactccgcgttcacccgcaaagacgagatcatcaccagcctcgtgtctgccttagactccatgtgctcagcgctgtccaaactgaacgccgaggtggcctgtgtcgccgtgcacgatgagagcgcctttgtggtgggcacagagaaggggagaatgttcctgaatgcccggaaggagctacagtcagacttcctcaggttctgccgagggcccccgtggaaggatccggaggcagagcaccccaagaaggtgcagcggggcgagggtggaggccgtagcctccctcggtcctccctggaacatggctcagatgtgtaccttctgcggaagatggtagaggaggtgtttgatgttctttatagcgaggccctgggaagggccagtgtggtgccactgccctatgagaggctgctcagggagccagggctgctggccgtgcaggggctgcccgaaggcctggccttccgaaggccagccgagtatgaccccaaggccctcatggccatcctggaacacagccaccgcatccgcttcaagctcaagaggccacttgaggatggcgggcgggactcgaaggccctggtggagctgaacggtgtctccctgattcccaaggggtcacgggactgtggcctgcatggccaggcccccaaggtgccaccccaggacctgcccccaaccgccacctcctcctccatggccagcttcctgtacagcacggcgctccccaaccacgccatccgagagctcaagcaggaagcaccttcctgcccccttgcccccagcgacctgggcctgagtcggcccatgccagagcccaaggccaccggtgcccaagacttctccgactgttgtggacagaagcccactgggcctggtgggcctctcatccagaacgtccatgcctccaagcgcattctcttctccatcgtccatgacaagtcagagaagtgggacgccttcataaaggaaaccgaggacatcaacacgctccgggagtgtgtgcagatcctgtttaacagcagatatgcggaagccctgggcctggaccacatggtccccgtgccctaccggaagattgcctgtgacccggaggctgtggagatcgtgggcatcccggacaagatccccttcaagcgcccctgcacttatggagtccccaagctgaagcggatcctggaggagcgccatagtatccacttcatcattaagaggatgtttgatgagcgaattttcacagggaacaagtttaccaaagacaccacgaagctggagccagccagcccgccagaggacacctctgcagaggtctctagggccaccgtccttgaccttgctgggaatgctcggtcagacaagggcagcatgtctgaagactgtgggccaggaacctccggggagctgggcgggctgaggccgatcaaaattgagccagaggatctggacatcattcaggtcaccgtcccagacccctcgccaacctctgaggaaatgacagactcgatgcctgggcacctgccatcggaggattctggttatgggatggagatgctgacagacaaaggtctgagtgaggacgcgcggcccgaggagaggcccgtggaggacagccacggtgacgtgatccggcccctgcggaagcaggtggagctgctcttcaacacacgatacgccaaggccattggcatctcggagcccgtcaaggtgccgtactccaagtttctgatgcacccggaggagctgtttgtggtgggactgcctgaaggcatctccctccgcaggcccaactgcttcgggatcgccaagctccggaagattctggaggccagcaacagcatccagtttgtcatcaagaggcccgagctgctcactgagggagtcaaagagcccatcatggatagtcaagagagggattccggggaccctctggtggacgagagcctgaagagacagggctttcaagaaaattatgacgcgaggctctcacggatcgacatcgccaacacactaagggagcaggtccaggaccttttcaataagaaatacggggaagccttgggcatcaagtacccggtccaggtcccctacaagcggatcaagagtaaccccggctccgtgatcatcgaggggctgcccccaggaatcccgttccgaaagccctgtaccttcggctcccagaacctggagaggattcttgctgtggctgacaagatcaagttcacagtcaccaggcctttccaaggactcatcccaaagcctgatgaagatgacgccaacagactcggggagaaggtgatcctgcgggagcaggtgaaggaactcttcaacgagaaatacggtgaggccctgggcctgaaccggccggtgctggtcccttataaactaatccgggacagcccagacgccgtggaggtcacgggtctgcctgatgacatccccttccggaaccccaacacgtacgacatccaccggctggagaagatcctgaaggcccgagagcatgtccgcatggtcatcattaaccagctccaaccctttgcagaaatctgcaatgatgccaaggtgccagccaaagacagcagcattcccaagcgcaagagaaagcgggtctcggaaggaaattccgtctcctcttcctcctcgtcttcctcttcctcgtcctctaacccggattcagtggcatcggccaaccagatctcactcgtgcaatggccaatgtacatggtggactatgccggcctgaacgtgcagctcccgggacctcttaattac

SEQ ID NO: 4742 - DNA, 2877 bp, Homo sapiens
  source 1..2877: mol_type = genomic DNA
atggccttgctgggtaagcgctgtgacgtccccaccaacggctgcggacccgaccgctggaactccgcgttcacccgcaaagacgagatcatcaccagcctcgtgtctgccttagactccatgtgctcagcgctgtccaaactgaacgccgaggtggcctgtgtcgccgtgcacgatgagagcgcctttgtggtgggcacagagaaggggagaatgttcctgaatgcccggaaggagctacagtcagacttcctcaggttctgccgagggcccccgtggaaggatccggaggcagagcaccccaagaaggtgcagcggggcgagggtggaggccgtagcctccctcggtcctccctggaacatggctcagatgtgtaccttctgcggaagatggtagaggaggtgtttgatgttctttatagcgaggccctgggaagggccagtgtggtgccactgccctatgagaggctgctcagggagccagggctgctggccgtgcaggggctgcccgaaggcctggccttccgaaggccagccgagtatgaccccaaggccctcatggccatcctggaacacagccaccgcatccgcttcaagctcaagaggccacttgaggatggcgggcgggactcgaaggccctggtggagctgaacggtgtctccctgattcccaaggggtcacgggactgtggcctgcatggccaggcccccaaggtgccaccccaggacctgcccccaaccgccacctcctcctccatggccagcttcctgtacagcacggcgctccccaaccacgccatccgagagctcaagcaggaagcaccttcctgcccccttgcccccagcgacctgggcctgagtcggcccatgccagagcccaaggccaccggtgcccaagacttctccgactgttgtggacagaagcccactgggcctggtgggcctctcatccagaacgtccatgcctccaagcgcattctcttctccatcgtccatgacaagtcagagaagtgggacgccttcataaaggaaaccgaggacatcaacacgctccgggagtgtgtgcagatcctgtttaacagcagatatgcggaagccctgggcctggaccacatggtccccgtgccctaccggaagattgcctgtgacccggaggctgtggagatcgtgggcatcccggacaagatccccttcaagcgcccctgcacttatggagtccccaagctgaagcggatcctggaggagcgccatagtatccacttcatcattaagaggatgtttgatgagcgaattttcacagggaacaagtttaccaaagacaccacgaagctggagccagccagcccgccagaggacacctctgcagaggtctctagggccaccgtccttgaccttgctgggaatgctcggtcagacaagggcagcatgtctgaagactgtgggccaggaacctccggggagctgggcgggctgaggccgatcaaaattgagccagaggatctggacatcattcaggtcaccgtcccagacccctcgccaacctctgaggaaatgacagactcgatgcctgggcacctgccatcggaggattctggttatgggatggagatgctgacagacaaaggtctgagtgaggacgcgcggcccgaggagaggcccgtggaggacagccacggtgacgtgatccggcccctgcggaagcaggtggagctgctcttcaacacacgatacgccaaggccattggcatctcggagcccgtcaaggtgccgtactccaagtttctgatgcacccggaggagctgtttgtggtgggactgcctgaaggcatctccctccgcaggcccaactgcttcgggatcgccaagctccggaagattctggaggccagcaacagcatccagtttgtcatcaagaggcccgagctgctcactgagggagtcaaagagcccatcatggatagtcaaggaactgcctcctcacttggcttctctccccctgccctgcccccagagagggattccggggaccctctggtggacgagagcctgaagagacagggctttcaagaaaattatgacgcgaggctctcacggatcgacatcgccaacacactaagggagcaggtccaggaccttttcaataagaaatacggggaagccttgggcatcaagtacccggtccaggtcccctacaagcggatcaagagtaaccccggctccgtgatcatcgaggggctgcccccaggaatcccgttccgaaagccctgtaccttcggctcccagaacctggagaggattcttgctgtggctgacaagatcaagttcacagtcaccaggcctttccaaggactcatcccaaagcctgatgaagatgacgccaacagactcggggagaaggtgatcctgcgggagcaggtgaaggaactcttcaacgagaaatacggtgaggccctgggcctgaaccggccggtgctggtcccttataaactaatccgggacagcccagacgccgtggaggtcacgggtctgcctgatgacatccccttccggaaccccaacacgtacgacatccaccggctggagaagatcctgaaggcccgagagcatgtccgcatggtcatcattaaccagctccaaccctttgcagaaatctgcaatgatgccaaggtgccagccaaagacagcagcattcccaagcgcaagagaaagcgggtctcggaaggaaattccgtctcctcttcctcctcgtcttcctcttcctcgtcctctaacccggattcagtggcatcggccaaccagatctcactcgtgcaatggccaatgtacatggtggactatgccggcctgaacgtgcagctcccgggacctcttaattac

SEQ ID NO: 4743 - DNA, 2928 bp, Homo sapiens
  source 1..2928: mol_type = genomic DNA
atggccttgctgggtaagcgctgtgacgtccccaccaacggctgcggacccgaccgctggaactccgcgttcacccgcaaagacgagatcatcaccagcctcgtgtctgccttagactccatgtgctcagcgctgtccaaactgaacgccgaggtggcctgtgtcgccgtgcacgatgagagcgcctttgtggtgggcacagagaaggggagaatgttcctgaatgcccggaaggagctacagtcagacttcctcaggttctgcctctccgcagctcagcacagggcagcgacatcccagctcgaaggccgggtggtgagacgggtgctcactgtggcctcgcgtgctctgtgtcccacaggagggcccccgtggaaggatccggaggcagagcaccccaagaaggtgcagcggggcgagggtggaggccgtagcctccctcggtcctccctggaacatggctcagatgtgtaccttctgcggaagatggtagaggaggtgtttgatgttctttatagcgaggccctgggaagggccagtgtggtgccactgccctatgagaggctgctcagggagccagggctgctggccgtgcaggggctgcccgaaggcctggccttccgaaggccagccgagtatgaccccaaggccctcatggccatcctggaacacagccaccgcatccgcttcaagctcaagaggccacttgaggatggcgggcgggactcgaaggccctggtggagctgaacggtgtctccctgattcccaaggggtcacgggactgtggcctgcatggccaggcccccaaggtgccaccccaggacctgcccccaaccgccacctcctcctccatggccagcttcctgtacagcacggcgctccccaaccacgccatccgagagctcaagcaggaagcaccttcctgcccccttgcccccagcgacctgggcctgagtcggcccatgccagagcccaaggccaccggtgcccaagacttctccgactgttgtggacagaagcccactgggcctggtgggcctctcatccagaacgtccatgcctccaagcgcattctcttctccatcgtccatgacaagtcagagaagtgggacgccttcataaaggaaaccgaggacatcaacacgctccgggagtgtgtgcagatcctgtttaacagcagatatgcggaagccctgggcctggaccacatggtccccgtgccctaccggaagattgcctgtgacccggaggctgtggagatcgtgggcatcccggacaagatccccttcaagcgcccctgcacttatggagtccccaagctgaagcggatcctggaggagcgccatagtatccacttcatcattaagaggatgtttgatgagcgaattttcacagggaacaagtttaccaaagacaccacgaagctggagccagccagcccgccagaggacacctctgcagaggtctctagggccaccgtccttgaccttgctgggaatgctcggtcagacaagggcagcatgtctgaagactgtgggccaggaacctccggggagctgggcgggctgaggccgatcaaaattgagccagaggatctggacatcattcaggtcaccgtcccagacccctcgccaacctctgaggaaatgacagactcgatgcctgggcacctgccatcggaggattctggttatgggatggagatgctgacagacaaaggtctgagtgaggacgcgcggcccgaggagaggcccgtggaggacagccacggtgacgtgatccggcccctgcggaagcaggtggagctgctcttcaacacacgatacgccaaggccattggcatctcggagcccgtcaaggtgccgtactccaagtttctgatgcacccggaggagctgtttgtggtgggactgcctgaaggcatctccctccgcaggcccaactgcttcgggatcgccaagctccggaagattctggaggccagcaacagcatccagtttgtcatcaagaggcccgagctgctcactgagggagtcaaagagcccatcatggatagtcaagagagggattccggggaccctctggtggacgagagcctgaagagacagggctttcaagaaaattatgacgcgaggctctcacggatcgacatcgccaacacactaagggagcaggtccaggaccttttcaataagaaatacggggaagccttgggcatcaagtacccggtccaggtcccctacaagcggatcaagagtaaccccggctccgtgatcatcgaggggctgcccccaggaatcccgttccgaaagccctgtaccttcggctcccagaacctggagaggattcttgctgtggctgacaagatcaagttcacagtcaccaggcctttccaaggactcatcccaaagcctgatgaagatgacgccaacagactcggggagaaggtgatcctgcgggagcaggtgaaggaactcttcaacgagaaatacggtgaggccctgggcctgaaccggccggtgctggtcccttataaactaatccgggacagcccagacgccgtggaggtcacgggtctgcctgatgacatccccttccggaaccccaacacgtacgacatccaccggctggagaagatcctgaaggcccgagagcatgtccgcatggtcatcattaaccagctccaaccctttgcagaaatctgcaatgatgccaaggtgccagccaaagacagcagcattcccaagcgcaagagaaagcgggtctcggaaggaaattccgtctcctcttcctcctcgtcttcctcttcctcgtcctctaacccggattcagtggcatcggccaaccagatctcactcgtgcaatggccaatgtacatggtggactatgccggcctgaacgtgcagctcccgggacctcttaattac

SEQ ID NO: 4744 - DNA, 2847 bp, Homo sapiens
  source 1..2847: mol_type = genomic DNA
atggcccaggtagcagtgtccaccctgcctgttgaagaagagtcctcctcagagaccaggatggtggtgacattcctcgtgtctgccctcgaatccatgtgtaaagaactggccaagtccaaggcagaagtggcctgcatcgcagtgtacgaaacagacgtgtttgtcgtcggaaccgagagaggatgcgcttttgttaatgccaggacggattttcagaaagattttgcaaaatactgcgttgcagagggactgtgtgaggtgaaacctccctgccctgtgaacgggatgcaggtccactcaggcgaaacggaaatactcaggaaggcagtggaggactatttctgcttttgttatggtaaagccttagggacaacagtgatggtgcctgttccctatgagaagatgctgcgagaccagtcggctgtggtagtgcaggggcttccggaaggcgttgcctttcaacaccctgagaattacgaccttgcaaccctgaaatggattttggagaacaaagcagggatttcattcatcataaatagacccttcctaggaccagagagtcagctgggtggccctgggatggtaacagatgcggagagatccatagtatcaccaagtgaaagctgcggccccatcaatgtgaaaactgaacccatggaagattctggcatttcactgaaagcagaagctgtctcagtcaagaaagaatcagaagatcctaattactatcaatataatatgcaaggaagccacccttcttccacaagcaatgaagtaatagaaatggaattaccaatggaagattccactccgctggtcccttcagaagaaccaaatgaggaccctgaagccgaggtgaaaatcgaaggaaacacaaattcatccagtgttacaaattctgcagcaggtgttgaagatcttaacatcgttcaagtgactgttccagataatgagaaggaaagattatcaagcattgaaaagattaaacagctaagagaacaagttaatgacctctttagccgaaaatttggtgaagcaattggcgtggatttccctgtgaaagttccctacaggaagatcacattcaaccctggctgtgtggtgattgatggcatgcccccgggggtggtattcaaggcccccggctatctggaaatcagttccatgaggaggatcttggaggcagctgagtttatcaaattcacagtcatcaggccgcttccagggcttgagctcagtaatgtgggaaaacgcaagatagaccaggagggccgtgtgtttcaagaaaagtgggagagagcgtatttcttcgtggaagtacagaatattccaacatgtctcatatgcaaacaaagcatgtctgtgtccaaagaatataacctaagacgccactatcaaaccaatcacagcaagcattatgaccagtatatggaaagaatgcgtgacgagaagcttcacgagctgaaaaaagggctcaggaagtatctcttaggctcatcagacaccgagtgtcccgagcaaaaacaagtgtttgcaaacccaagtccaacccagaaatcccccgtgcagcctgtagaggacctagctgggaacttatgggagaagttacgtgaaaaaatcaggtcttttgtggcatattctatcgcaatcgatgagatcacggatataaataataccacccagttggccatattcatccgtggtgtcgatgagaatttcgatgtgtccgaagaacttctggacacggtgcccatgacgggtacaaaatctggcaacgagatcttttcgcgtgttgagaaaagcctgaaaaacttctgtatcgactggtcgaaattagtaagcgtggcctccactggcaccccagcgatggtggatgccaataacgggcttgtcacaaaactgaagtccagggtggcgacgttctgcaagggtgcggaactgaagtccatctgttgtataattcatccggaatcactctgtgctcagaagttgaagatggaccacgtcatggacgtggtagtgaagtccgtgaactggatatgctcccggggactgaaccacagtgagttcacaaccttgctctatgagctggacagccagtatggtagcctcctgtactacacggagattaagtggctcagtcgcgggctcgtgctaaagagatttttcgaatccttggaagaaatcgactccttcatgtcatccagagggaaacccctgcctcaactgagctccatagattggatccgagacctggccttcttggttgacatgacgatgcatctgaacgctttgaacatctctctccaaggacactcccaaatcgtcacgcagatgtatgacctgatccgggcgttcctagcaaaactgtgcctctgggagactcatttgacgaggaataatctggcccactttcccaccctgaaattggcttccagaaatgaaagcgatggcctgaactacattcccaaaatcgcggaactccagaccgaattccagaaaaggctgtctgatttcaaactctacgaaagcgaactgactctgttcagctccccgttctccacgaagatcgacagtgtgcacgaggagctccagatggaggttatcgacctgcaatgcaacacggtcctgaagacgaaatacgacaaggtgggaataccagaattctacaagtacctctggggtagctacccgaaatacaagcaccattgcgcaaagattctttccatgttcgggagcacctacatctgcgaacagctgttctccattatgaaactgagcaaaacaaaatactgctcccagttaaaggattcccagtgggattctgtactccacatcgcaacg

SEQ ID NO: 4745 - DNA, 324 bp, Homo sapiens
  source 1..324: mol_type = genomic DNA
atggcccaggtagcagtgtccaccctgcctgttgaagaagagtcctcctcagagaccaggatggtggtgacattcctcgtgtctgccctcgaatccatgtgtaaagaactggccaagtccaaggcagaagtggcctgcatcgcagtgtacgaaacagacgtgtttgtcgtcggaaccgagagaggatgcgcttttgttaatgccaggacggattttcagaaagattttgcaaaatactgtaggtgttttaattttatcctttgtattcccaatctcaaaaggatcgcaggcaagacttccacagtattttcttctaagctatca

SEQ ID NO: 4746 - DNA, 2610 bp, Homo sapiens
  source 1..2610: mol_type = genomic DNA
atgacagctgacaaggagaagaaaaggagtagctcggagaggaggaaggagaagtcccgggatgctgcgcggtgccggcggagcaaggagacggaggtgttctatgagctggcccatgagctgcctctgccccacagtgtgagctcccatctggacaaggcctccatcatgcgactggcaatcagcttcctgcgaacacacaagctcctctcctcagtttgctctgaaaacgagtccgaagccgaagctgaccagcagatggacaacttgtacctgaaagccttggagggtttcattgccgtggtgacccaagatggcgacatgatctttctgtcagaaaacatcagcaagttcatgggacttacacaggtggagctaacaggacatagtatctttgacttcactcatccctgcgaccatgaggagattcgtgagaacctgagtctcaaaaatggctctggttttgggaaaaaaagcaaagacatgtccacagagcgggacttcttcatgaggatgaagtgcacggtcaccaacagaggccgtactgtcaacctcaagtcagccacctggaaggtcttgcactgcacgggccaggtgaaagtctacaacaactgccctcctcacaatagtctgtgtggctacaaggagcccctgctgtcctgcctcatcatcatgtgtgaaccaatccagcacccatcccacatggacatccccctggatagcaagaccttcctgagccgccacagcatggacatgaagttcacctactgtgatgacagaatcacagaactgattggttaccaccctgaggagctgcttggccgctcagcctatgaattctaccatgcgctagactccgagaacatgaccaagagtcaccagaacttgtgcaccaagggtcaggtagtaagtggccagtaccggatgctcgcaaagcatgggggctacgtgtggctggagacccaggggacggtcatctacaaccctcgcaacctgcagccccagtgcatcatgtgtgtcaactacgtcctgagtgagattgagaagaatgacgtggtgttctccatggaccagactgaatccctgttcaagccccacctgatggccatgaacagcatctttgatagcagtggcaagggggctgtgtctgagaagagtaacttcctattcaccaagctaaaggaggagcccgaggagctggcccagctggctcccaccccaggagacgccatcatctctctggatttcgggaatcagaacttcgaggagtcctcagcctatggcaaggccatcctgcccccgagccagccatgggccacggagttgaggagccacagcacccagagcgaggctgggagcctgcctgccttcaccgtgccccaggcagctgccccgggcagcaccacccccagtgccaccagcagcagcagcagctgctccacgcccaatagccctgaagactattacacatctttggataacgacctgaagattgaagtgattgagaagctcttcgccatggacacagaggccaaggaccaatgcagtacccagacggatttcaatgagctggacttggagacactggcaccctatatccccatggacggggaagacttccagctaagccccatctgccccgaggagcggctcttggcggagaacccacagtccaccccccagcactgcttcagtgccatgacaaacatcttccagccactggcccctgtagccccgcacagtcccttcctcctggacaagtttcagcagcagctggagagcaagaagacagagcccgagcaccggcccatgtcctccatcttctttgatgccggaagcaaagcatccctgccaccgtgctgtggccaggccagcacccctctctcttccatggggggcagatccaatacccagtggcccccagatccaccattacattttgggcccacaaagtgggccgtcggggatcagcgcacagagttcttgggagcagcgccgttggggccccctgtctctccaccccatgtctccaccttcaagacaaggtctgcaaagggttttggggctcgaggcccagacgtgctgagtccggccatggtagccctctccaacaagctgaagctgaagcgacagctggagtatgaagagcaagccttccaggacctgagcgggggggacccacctggtggcagcacctcacatttgatgtggaaacggatgaagaacctcaggggtgggagctgccctttgatgccggacaagccactgagcgcaaatgtacccaatgataagttcacccaaaaccccatgaggggcctgggccatcccctgagacatctgccgctgccacagcctccatctgccatcagtcccggggagaacagcaagagcaggttccccccacagtgctacgccacccagtaccaggactacagcctgtcgtcagcccacaaggtgtcaggcatggcaagccggctgctcgggccctcatttgagtcctacctgctgcccgaactgaccagatatgactgtgaggtgaacgtgcccgtgctgggaagctccacgctcctgcaaggaggggacctcctcagagccctggaccaggccacc

SEQ ID NO: 4747 - DNA, 324 bp, Homo sapiens
  source 1..324: mol_type = genomic DNA
atgatcacatcccagggatcagtgtcgtttagggatgtgactgtgggcttcactcaagaggagtggcagcatctggaccctgctcagaggaccctgtacagggatgtgatgctggagaactacagccaccttgtctcagtagggtattgcattcctaaaccagaagtgattctcaagttggagaaaggcgaggagccatggatattagaggaaaaatttccaagccagagtcatctgggctccacaaggctgacttcaggacctgggcctgcatggatttgtgccgagaccagctcggtcgtggagactccaaccgagcggcac

SEQ ID NO: 4748 - DNA, 7326 bp, Homo sapiens
  source 1..7326: mol_type = genomic DNA
atggctgagaacttgctggacggaccgcccaaccccaaaagagccaaactcagctcgcccggtttctcggcgaatgacagcacagattttggatcattgtttgacttggaaaatgatcttcctgatgagctgatacccaatggaggagaattaggccttttaaacagtgggaaccttgttccagatgctgcttccaaacataaacaactgtcggagcttctacgaggaggcagcggctctagtatcaacccaggaataggaaatgtgagcgccagcagccccgtgcagcagggcctgggtggccaggctcaagggcagccgaacagtgctaacatggccagcctcagtgccatgggcaagagccctctgagccagggagattcttcagcccccagcctgcctaaacaggcagccagcacctctgggcccacccccgctgcctcccaagcactgaatccgcaagcacaaaagcaagtggggctggcgactagcagccctgccacgtcacagactggacctggtatctgcatgaatgctaactttaaccagacccacccaggcctcctcaatagtaactctggccatagcttaattaatcaggcttcacaagggcaggcgcaagtcatgaatggatctcttggggctgctggcagaggaaggggagctggaatgccgtaccctactccagccatgcagggcgcctcgagcagcgtgctggctgagaccctaacgcaggtttccccgcaaatgactggtcacgcgggactgaacaccgcacaggcaggaggcatggccaagatgggaataactgggaacacaagtccatttggacagccctttagtcaagctggagggcagccaatgggagccactggagtgaacccccagttagccagcaaacagagcatggtcaacagtttgcccaccttccctacagatatcaagaatacttcagtcaccaacgtgccaaatatgtctcagatgcaaacatcagtgggaattgtacccacacaagcaattgcaacaggccccactgcagatcctgaaaaacgcaaactgatacagcagcagctggttctactgcttcatgctcataagtgtcagagacgagagcaagcaaacggagaggttcgggcctgctcgctcccgcattgtcgaaccatgaaaaacgttttgaatcacatgacgcattgtcaggctgggaaagcctgccaagttgcccattgtgcatcttcacgacaaatcatctctcattggaagaactgcacacgacatgactgtcctgtttgcctccctttgaaaaatgccagtgacaagcgaaaccaacaaaccatcctggggtctccagctagtggaattcaaaacacaattggttctgttggcacagggcaacagaatgccacttctttaagtaacccaaatcccatagaccccagctccatgcagcgagcctatgctgctctcggactcccctacatgaaccagccccagacgcagctgcagcctcaggttcctggccagcaaccagcacagcctcaaacccaccagcagatgaggactctcaaccccctgggaaataatccaatgaacattccagcaggaggaataacaacagatcagcagcccccaaacttgatttcagaatcagctcttccgacttccctgggggccacaaacccactgatgaacgatggctccaactctggtaacattggaaccctcagcactataccaacagcagctcctccttctagcaccggtgtaaggaaaggctggcacgaacatgtcactcaggacctgcggagccatctagtgcataaactcgtccaagccatcttcccaacacctgatcccgcagctctaaaggatcgccgcatggaaaacctggtagcctatgctaagaaagtggaaggggacatgtacgagtctgccaacagcagggatgaatattatcacttattagcagagaaaatctacaagatacaaaaagaactagaagaaaaacggaggtcgcgtttacataaacaaggcatcttggggaaccagccagccttaccagccccgggggctcagccccctgtgattccacaggcacaacctgtgagacctccaaatggacccctgtccctgccagtgaatcgcatgcaagtttctcaagggatgaattcatttaaccccatgtccttggggaacgtccagttgccacaagcacccatgggacctcgtgcagcctccccaatgaaccactctgtccagatgaacagcatgggctcagtgccagggatggccatttctccttcccgaatgcctcagcctccgaacatgatgggtgcacacaccaacaacatgatggcccaggcgcccgctcagagccagtttctgccacagaaccagttcccgtcatccagcggggcgatgagtgtgggcatggggcagccgccagcccaaacaggcgtgtcacagggacaggtgcctggtgctgctcttcctaaccctctcaacatgctggggcctcaggccagccagctaccttgccctccagtgacacagtcaccactgcacccaacaccgcctcctgcttccacggctgctggcatgccatctctccagcacacgacaccacctgggatgactcctccccagccagcagctcccactcagccatcaactcctgtgtcgtcttccgggcagactcccaccccgactcctggctcagtgcccagtgctacccaaacccagagcacccctacagtccaggcagcagcccaggcccaggtgaccccgcagcctcaaaccccagttcagcccccgtctgtggctacccctcagtcatcgcagcaacagccgacgcctgtgcacgcccagcctcctggcacaccgctttcccaggcagcagccagcattgataacagagtccctaccccctcctcggtggccagcgcagaaaccaattcccagcagccaggacctgacgtacctgtgctggaaatgaagacggagacccaagcagaggacactgagcccgatcctggtgaatccaaaggggagcccaggtctgagatgatggaggaggatttgcaaggagcttcccaagttaaagaagaaacagacatagcagagcagaaatcagaaccaatggaagtggatgaaaagaaacctgaagtgaaagtagaagttaaagaggaagaagagagtagcagtaacggcacagcctctcagtcaacatctccttcgcagccgcgcaaaaaaatctttaaaccagaggagttacgccaggccctcatgccaaccctagaagcactgtatcgacaggacccagagtcattacctttccggcagcctgtagatccccagctcctcggaattccagactattttgacatcgtaaagaatcccatggacctctccaccatcaagcggaagctggacacagggcaataccaagagccctggcagtacgtggacgacgtctggctcatgttcaacaatgcctggctctataatcgcaagacatcccgagtctataagttttgcagtaagcttgcagaggtctttgagcaggaaattgaccctgtcatgcagtcccttggatattgctgtggacgcaagtatgagttttccccacagactttgtgctgctatgggaagcagctgtgtaccattcctcgcgatgctgcctactacagctatcagaataggtatcatttctgtgagaagtgtttcacagagatccagggcgagaatgtgaccctgggtgacgacccttcacagccccagacgacaatttcaaaggatcagtttgaaaagaagaaaaatgataccttagaccccgaacctttcgttgattgcaaggagtgtggccggaagatgcatcagatttgcgttctgcactatgacatcatttggccttcaggttttgtgtgcgacaactgcttgaagaaaactggcagacctcgaaaagaaaacaaattcagtgctaagaggctgcagaccacaagactgggaaaccacttggaagaccgagtgaacaaatttttgcggcgccagaatcaccctgaagccggggaggtttttgtccgagtggtggccagctcagacaagacggtggaggtcaagcccgggatgaagtcacggtttgtggattctggggaaatgtctgaatctttcccatatcgaaccaaagctctgtttgcttttgaggaaattgacggcgtggatgtctgcttttttggaatgcacgtccaagaatacggctctgattgcccccctccaaacacgaggcgtgtgtacatttcttatctggatagtattcatttcttccggccacgttgcctccgcacagccgtttaccatgagatccttattggatatttagagtatgtgaagaaattagggtatgtgacagggcacatctgggcctgtcctccaagtgaaggagatgattacatcttccattgccacccacctgatcaaaaaatacccaagccaaaacgactgcaggagtggtacaaaaagatgctggacaaggcgtttgcagagcggatcatccatgactacaaggatattttcaaacaagcaactgaagacaggctcaccagtgccaaggaactgccctattttgaaggtgatttctggcccaatgtgttagaagagagcattaaggaactagaacaagaagaagaggagaggaaaaaggaagagagcactgcagccagtgaaaccactgagggcagtcagggcgacagcaagaatgccaagaagaagaacaacaagaaaaccaacaagaacaaaagcagcatcagccgcgccaacaagaagaagcccagcatgcccaacgtgtccaatgacctgtcccagaagctgtatgccaccatggagaagcacaaggaggtcttcttcgtgatccacctgcacgctgggcctgtcatcaacaccctgccccccatcgtcgaccccgaccccctgctcagctgtgacctcatggatgggcgcgacgccttcctcaccctcgccagagacaagcactgggagttctcctccttgcgccgctccaagtggtccacgctctgcatgctggtggagctgcacacccagggccaggaccgctttgtctacacctgcaacgagtgcaagcaccacgtggagacgcgctggcactgcactgtgtgcgaggactacgacctctgcatcaactgctataacacgaagagccatgcccataagatggtgaagtgggggctgggcctggatgacgagggcagcagccagggcgagccacagtcaaagagcccccaggagtcacgccggctgagcatccagcgctgcatccagtcgctggtgcacgcgtgccagtgccgcaacgccaactgctcgctgccatcctgccagaagatgaagcgggtggtgcagcacaccaagggctgcaaacgcaagaccaacgggggctgcccggtgtgcaagcagctcatcgccctctgctgctaccacgccaagcactgccaagaaaacaaatgccccgtgcccttctgcctcaacatcaaacacaagctccgccagcagcagatccagcaccgcctgcagcaggcccagctcatgcgccggcggatggccaccatgaacacccgcaacgtgcctcagcagagtctgccttctcctacctcagcaccgcccgggacccccacacagcagcccagcacaccccagacgccgcagccccctgcccagccccaaccctcacccgtgagcatgtcaccagctggcttccccagcgtggcccggactcagccccccaccacggtgtccacagggaagcctaccagccaggtgccggcccccccacccccggcccagccccctcctgcagcggtggaagcggctcggcagatcgagcgtgaggcccagcagcagcagcacctgtaccgggtgaacatcaacaacagcatgcccccaggacgcacgggcatggggaccccggggagccagatggcccccgtgagcctgaatgtgccccgacccaaccaggtgagcgggcccgtcatgcccagcatgcctcccgggcagtggcagcaggcgccccttccccagcagcagcccatgccaggcttgcccaggcctgtgatatccatgcaggcccaggcggccgtggctgggccccggatgcccagcgtgcagccacccaggagcatctcacccagcgctctgcaagacctgctgcggaccctgaagtcgcccagctcccctcagcagcaacagcaggtgctgaacattctcaaatcaaacccgcagctaatggcagctttcatcaaacagcgcacagccaagtacgtggccaatcagcccggcatgcagccccagcctggcctccagtcccagcccggcatgcaaccccagcctggcatgcaccagcagcccagcctgcagaacctgaatgccatgcaggctggcgtgccgcggcccggtgtgcctccacagcagcaggcgatgggaggcctgaacccccagggccaggccttgaacatcatgaacccaggacacaaccccaacatggcgagtatgaatccacagtaccgagaaatgttacggaggcagctgctgcagcagcagcagcaacagcagcagcaacaacagcagcaacagcagcagcagcaagggagtgccggcatggctgggggcatggcggggcacggccagttccagcagcctcaaggacccggaggctacccaccggccatgcagcagcagcagcgcatgcagcagcatctccccctccagggcagctccatgggccagatggcggctcagatgggacagcttggccagatggggcagccggggctgggggcagacagcacccccaacatccagcaagccctgcagcagcggattctgcagcaacagcagatgaagcagcagattgggtccccaggccagccgaaccccatgagcccccagcaacacatgctctcaggacagccacaggcctcgcatctccctggccagcagatcgccacgtcccttagtaaccaggtgcggtctccagcccctgtccagtctccacggccccagtcccagcctccacattccagcccgtcaccacggatacagccccagccttcgccacaccacgtctcaccccagactggttccccccaccccggactcgcagtcaccatggccagctccatagatcagggacacttggggaaccccgaacagagtgcaatgctcccccagctgaacacccccagcaggagtgcgctgtccagcgaactgtccctggtcggggacaccacgggggacacgctagagaagtttgtggagggcttg

SEQ ID NO: 4749 - DNA, 7212 bp, Homo sapiens
  source 1..7212: mol_type = genomic DNA
atggctgagaacttgctggacggaccgcccaaccccaaaagagccaaactcagctcgcccggtttctcggcgaatgacagcacagattttggatcattgtttgacttggaaaatgatcttcctgatgagctgatacccaatggaggagaattaggccttttaaacagtgggaaccttgttccagatgctgcttccaaacataaacaactgtcggagcttctacgaggaggcagcggctctagtatcaacccaggaataggaaatgtgagcgccagcagccccgtgcagcagggcctgggtggccaggctcaagggcagccgaacagtgctaacatggccagcctcagtgccatgggcaagagccctctgagccagggagattcttcagcccccagcctgcctaaacaggcagccagcacctctgggcccacccccgctgcctcccaagcactgaatccgcaagcacaaaagcaagtggggctggcgactagcagccctgccacgtcacagactggacctggtatctgcatgaatgctaactttaaccagacccacccaggcctcctcaatagtaactctggccatagcttaattaatcaggcttcacaagggcaggcgcaagtcatgaatggatctcttggggctgctggcagaggaaggggagctggaatgccgtaccctactccagccatgcagggcgcctcgagcagcgtgctggctgagaccctaacgcaggtttccccgcaaatgactggtcacgcgggactgaacaccgcacaggcaggaggcatggccaagatgggaataactgggaacacaagtccatttggacagccctttagtcaagctggagggcagccaatgggagccactggagtgaacccccagttagccagcaaacagagcatggtcaacagtttgcccaccttccctacagatatcaagaatacttcagtcaccaacgtgccaaatatgtctcagatgcaaacatcagtgggaattgtacccacacaagcaattgcaacaggccccactgcagatcctgaaaaacgcaaactgatacagcagcagctggttctactgcttcatgctcataagtgtcagagacgagagcaagcaaacggagaggttcgggcctgctcgctcccgcattgtcgaaccatgaaaaacgttttgaatcacatgacgcattgtcaggctgggaaagcctgccaagccatcctggggtctccagctagtggaattcaaaacacaattggttctgttggcacagggcaacagaatgccacttctttaagtaacccaaatcccatagaccccagctccatgcagcgagcctatgctgctctcggactcccctacatgaaccagccccagacgcagctgcagcctcaggttcctggccagcaaccagcacagcctcaaacccaccagcagatgaggactctcaaccccctgggaaataatccaatgaacattccagcaggaggaataacaacagatcagcagcccccaaacttgatttcagaatcagctcttccgacttccctgggggccacaaacccactgatgaacgatggctccaactctggtaacattggaaccctcagcactataccaacagcagctcctccttctagcaccggtgtaaggaaaggctggcacgaacatgtcactcaggacctgcggagccatctagtgcataaactcgtccaagccatcttcccaacacctgatcccgcagctctaaaggatcgccgcatggaaaacctggtagcctatgctaagaaagtggaaggggacatgtacgagtctgccaacagcagggatgaatattatcacttattagcagagaaaatctacaagatacaaaaagaactagaagaaaaacggaggtcgcgtttacataaacaaggcatcttggggaaccagccagccttaccagccccgggggctcagccccctgtgattccacaggcacaacctgtgagacctccaaatggacccctgtccctgccagtgaatcgcatgcaagtttctcaagggatgaattcatttaaccccatgtccttggggaacgtccagttgccacaagcacccatgggacctcgtgcagcctccccaatgaaccactctgtccagatgaacagcatgggctcagtgccagggatggccatttctccttcccgaatgcctcagcctccgaacatgatgggtgcacacaccaacaacatgatggcccaggcgcccgctcagagccagtttctgccacagaaccagttcccgtcatccagcggggcgatgagtgtgggcatggggcagccgccagcccaaacaggcgtgtcacagggacaggtgcctggtgctgctcttcctaaccctctcaacatgctggggcctcaggccagccagctaccttgccctccagtgacacagtcaccactgcacccaacaccgcctcctgcttccacggctgctggcatgccatctctccagcacacgacaccacctgggatgactcctccccagccagcagctcccactcagccatcaactcctgtgtcgtcttccgggcagactcccaccccgactcctggctcagtgcccagtgctacccaaacccagagcacccctacagtccaggcagcagcccaggcccaggtgaccccgcagcctcaaaccccagttcagcccccgtctgtggctacccctcagtcatcgcagcaacagccgacgcctgtgcacgcccagcctcctggcacaccgctttcccaggcagcagccagcattgataacagagtccctaccccctcctcggtggccagcgcagaaaccaattcccagcagccaggacctgacgtacctgtgctggaaatgaagacggagacccaagcagaggacactgagcccgatcctggtgaatccaaaggggagcccaggtctgagatgatggaggaggatttgcaaggagcttcccaagttaaagaagaaacagacatagcagagcagaaatcagaaccaatggaagtggatgaaaagaaacctgaagtgaaagtagaagttaaagaggaagaagagagtagcagtaacggcacagcctctcagtcaacatctccttcgcagccgcgcaaaaaaatctttaaaccagaggagttacgccaggccctcatgccaaccctagaagcactgtatcgacaggacccagagtcattacctttccggcagcctgtagatccccagctcctcggaattccagactattttgacatcgtaaagaatcccatggacctctccaccatcaagcggaagctggacacagggcaataccaagagccctggcagtacgtggacgacgtctggctcatgttcaacaatgcctggctctataatcgcaagacatcccgagtctataagttttgcagtaagcttgcagaggtctttgagcaggaaattgaccctgtcatgcagtcccttggatattgctgtggacgcaagtatgagttttccccacagactttgtgctgctatgggaagcagctgtgtaccattcctcgcgatgctgcctactacagctatcagaataggtatcatttctgtgagaagtgtttcacagagatccagggcgagaatgtgaccctgggtgacgacccttcacagccccagacgacaatttcaaaggatcagtttgaaaagaagaaaaatgataccttagaccccgaacctttcgttgattgcaaggagtgtggccggaagatgcatcagatttgcgttctgcactatgacatcatttggccttcaggttttgtgtgcgacaactgcttgaagaaaactggcagacctcgaaaagaaaacaaattcagtgctaagaggctgcagaccacaagactgggaaaccacttggaagaccgagtgaacaaatttttgcggcgccagaatcaccctgaagccggggaggtttttgtccgagtggtggccagctcagacaagacggtggaggtcaagcccgggatgaagtcacggtttgtggattctggggaaatgtctgaatctttcccatatcgaaccaaagctctgtttgcttttgaggaaattgacggcgtggatgtctgcttttttggaatgcacgtccaagaatacggctctgattgcccccctccaaacacgaggcgtgtgtacatttcttatctggatagtattcatttcttccggccacgttgcctccgcacagccgtttaccatgagatccttattggatatttagagtatgtgaagaaattagggtatgtgacagggcacatctgggcctgtcctccaagtgaaggagatgattacatcttccattgccacccacctgatcaaaaaatacccaagccaaaacgactgcaggagtggtacaaaaagatgctggacaaggcgtttgcagagcggatcatccatgactacaaggatattttcaaacaagcaactgaagacaggctcaccagtgccaaggaactgccctattttgaaggtgatttctggcccaatgtgttagaagagagcattaaggaactagaacaagaagaagaggagaggaaaaaggaagagagcactgcagccagtgaaaccactgagggcagtcagggcgacagcaagaatgccaagaagaagaacaacaagaaaaccaacaagaacaaaagcagcatcagccgcgccaacaagaagaagcccagcatgcccaacgtgtccaatgacctgtcccagaagctgtatgccaccatggagaagcacaaggaggtcttcttcgtgatccacctgcacgctgggcctgtcatcaacaccctgccccccatcgtcgaccccgaccccctgctcagctgtgacctcatggatgggcgcgacgccttcctcaccctcgccagagacaagcactgggagttctcctccttgcgccgctccaagtggtccacgctctgcatgctggtggagctgcacacccagggccaggaccgctttgtctacacctgcaacgagtgcaagcaccacgtggagacgcgctggcactgcactgtgtgcgaggactacgacctctgcatcaactgctataacacgaagagccatgcccataagatggtgaagtgggggctgggcctggatgacgagggcagcagccagggcgagccacagtcaaagagcccccaggagtcacgccggctgagcatccagcgctgcatccagtcgctggtgcacgcgtgccagtgccgcaacgccaactgctcgctgccatcctgccagaagatgaagcgggtggtgcagcacaccaagggctgcaaacgcaagaccaacgggggctgcccggtgtgcaagcagctcatcgccctctgctgctaccacgccaagcactgccaagaaaacaaatgccccgtgcccttctgcctcaacatcaaacacaagctccgccagcagcagatccagcaccgcctgcagcaggcccagctcatgcgccggcggatggccaccatgaacacccgcaacgtgcctcagcagagtctgccttctcctacctcagcaccgcccgggacccccacacagcagcccagcacaccccagacgccgcagccccctgcccagccccaaccctcacccgtgagcatgtcaccagctggcttccccagcgtggcccggactcagccccccaccacggtgtccacagggaagcctaccagccaggtgccggcccccccacccccggcccagccccctcctgcagcggtggaagcggctcggcagatcgagcgtgaggcccagcagcagcagcacctgtaccgggtgaacatcaacaacagcatgcccccaggacgcacgggcatggggaccccggggagccagatggcccccgtgagcctgaatgtgccccgacccaaccaggtgagcgggcccgtcatgcccagcatgcctcccgggcagtggcagcaggcgccccttccccagcagcagcccatgccaggcttgcccaggcctgtgatatccatgcaggcccaggcggccgtggctgggccccggatgcccagcgtgcagccacccaggagcatctcacccagcgctctgcaagacctgctgcggaccctgaagtcgcccagctcccctcagcagcaacagcaggtgctgaacattctcaaatcaaacccgcagctaatggcagctttcatcaaacagcgcacagccaagtacgtggccaatcagcccggcatgcagccccagcctggcctccagtcccagcccggcatgcaaccccagcctggcatgcaccagcagcccagcctgcagaacctgaatgccatgcaggctggcgtgccgcggcccggtgtgcctccacagcagcaggcgatgggaggcctgaacccccagggccaggccttgaacatcatgaacccaggacacaaccccaacatggcgagtatgaatccacagtaccgagaaatgttacggaggcagctgctgcagcagcagcagcaacagcagcagcaacaacagcagcaacagcagcagcagcaagggagtgccggcatggctgggggcatggcggggcacggccagttccagcagcctcaaggacccggaggctacccaccggccatgcagcagcagcagcgcatgcagcagcatctccccctccagggcagctccatgggccagatggcggctcagatgggacagcttggccagatggggcagccggggctgggggcagacagcacccccaacatccagcaagccctgcagcagcggattctgcagcaacagcagatgaagcagcagattgggtccccaggccagccgaaccccatgagcccccagcaacacatgctctcaggacagccacaggcctcgcatctccctggccagcagatcgccacgtcccttagtaaccaggtgcggtctccagcccctgtccagtctccacggccccagtcccagcctccacattccagcccgtcaccacggatacagccccagccttcgccacaccacgtctcaccccagactggttccccccaccccggactcgcagtcaccatggccagctccatagatcagggacacttggggaaccccgaacagagtgcaatgctcccccagctgaacacccccagcaggagtgcgctgtccagcgaactgtccctggtcggggacaccacgggggacacgctagagaagtttgtggagggcttg

SEQ ID NO: 4750 - DNA, 735 bp, Homo sapiens
  source 1..735: mol_type = genomic DNA
atgtgtgctgaggtgggccctgctctctgcaggggtatggagagaaatagcttggggtgctgtgaggccccgaagaagctgagcctgtccttctccattgaggcgatcctaaagaggcctgccaggaggagtgatatggacagaccagaagggccaggtgaagagggccccggagaagctgcggcctcaggctctgggctagaaaagcctccaaaggaccagccccaggaaggaaggaagagcaagcggagggttcgtaccaccttcaccactgagcagctgcatgagctggagaagatcttccactttacccactacccagacgttcacatccgcagccagctggcagccaggatcaacctcccagaagctcgggtgcagatctggttccagaatcagcgagccaagtggcggaagcaggagaagattggcaacctgggggctccacagcagctgagtgaagccagtgtggccctgcccacaaatctggatgtggctgggcccacgtggacatccactgctctgcgcaggctggctcctcccacgagctgttgtccatcggctcaagatcagctggcctctgcctggttccctgcctggatcaccctcctcccagcgcacccatgggaaacacagcctgtcccaggtcttcccatccatcaaacttgcatccctgtgctatgcatccttccacctccacaccccaaatggggcagcatctgtgctacttcaaca

SEQ ID NO: 4751 - DNA, 1347 bp, Homo sapiens
  source 1..1347: mol_type = genomic DNA
atgcccggcatgatggagaaagggcccgagttactggggaagaaccgatcggccaacggcagcgccaagagcccggcaggcggcggcggcagcggcgcctcgtccaccaacggcgggctgcactactcagagcccgagagcggctgcagcagcgacgacgagcacgatgttgggatgagagtcggagccgaataccaagctcggatccctgaatttgatccaggtgctacaaagtacacagataaagacaatggagggatgcttgtatggtctccatatcacagtatcccagatgccaaattggatgaatacattgcaattgcaaaggaaaagcatggctacaatgtggaacaggcacttggcatgttgttctggcataaacataacattgagaagtcccttgctgatctccctaatttcactccctttccggatgagtggacagtggaagataaagtcctatttgaacaagcctttagttttcatggaaagagctttcacaggattcagcaaatgcttccagataagacaattgcaagccttgtaaaatattactattcttggaaaaaaactcgctctaggacaagtttgatggatcgccaggctcgtaaactagctaatagacataatcagggtgacagtgatgatgatgtagaagaaacacatccaatggatgggaatgatagtgattatgatcccaaaaaagaagccaaaaaagagggtaatactgaacaacctgtccaaactagcaagattggacttggaagaagagagtatcagagtttacaacatcgccatcattctcagcgttctaagtgccgtccacctaagggcatgtatttaacccaggaagatgtggtagcagtttcctgtagtcccaatgcagccaacaccatcctgaggcaactggacatggagttgatctctctaaaacgtcaggttcagaatgctaagcaagtaaacagtgcacttaaacagaaaatggaaggtggaattgaagaattcaaacctcctgagtcaaatcagaaaattaatgcccgttggaccacagaggagcagcttctagcagtgcaaggtgtccgcaaatatggtaaagattttcaagctattgcagatgtaattggcaacaagactgttggccaagtgaagaacttctttgtaaactacaggcgtcggtttaacttagaggaggtattgcaggagtgggaagcagaacaaggaacccaggcttctaatggtgatgcttctactttaggggaggagacaaaaagtgcttctaatgtgccatcagggaagagcactgatgaagaagaggaggtgtgtttgtgtatggaatttgagctaata

SEQ ID NO: 4752 - DNA, 1485 bp, Homo sapiens
  source 1..1485: mol_type = genomic DNA
atgagagtcggagccgaataccaagctcggatccctgaatttgatccaggtgctacaaagtacacagataaagacaatggagggatgcttgtatggtctccatatcacagtatcccagatgccaaattggatgaatacattgcaattgcaaaggaaaagcatggctacaatgtggaacaggcacttggcatgttgttctggcataaacataacattgagaagtcccttgctgatctccctaatttcactccctttccggatgagtggacagtggaagataaagtcctatttgaacaagcctttagttttcatggaaagagctttcacaggattcagcaaatgcttccagataagacaattgcaagccttgtaaaatattactattcttggaaaaaaactcgctctaggacaagtttgatggatcgccaggctcgtaaactagctaatagacataatcagggtgacagtgatgatgatgtagaagaaacacatccaatggatgggaatgatagtgattatgatcccaaaaaagaagccaaaaaagagggtaatactgaacaacctgtccaaactagcaagattggacttggaagaagagagtatcagagtttacaacatcgccatcattctcagcgttctaagtgccgtccacctaagggcatgtatttaacccaggaagatgtggtagcagtttcctgtagtcccaatgcagccaacaccatcctgaggcaactggacatggagttgatctctctaaaacgtcaggttcagaatgctaagcaagtaaacagtgcacttaaacagaaaatggaaggtggaattgaagaattcaaacctcctgagtcaaatcagaaaattaatgcccgttggaccacagaggagcagcttctagcagtgcaaggtgtccgcaaatatggtaaagattttcaagctattgcagatgtaattggcaacaagactgttggccaagtgaagaacttctttgtaaactacaggcgtcggtttaacttagaggaggtattgcaggagtgggaagcagaacaaggaacccaggcttctaatggtgatgcttctactttaggggaggagacaaaaagtgcttctaatgtgccatcagggaagagcactgatgaagaagaggaggcacagaccccacaggctcctcggacactgggtccatcacctcctgccccatcatccactccaacaccaacagcccctattgccactctgaaccagcctccaccacttcttcgtccaacactgcctgctgccccggctcttcaccggcagcctcctccactccagcagcaggctcggttcatccagccccggccaactttaaatcagcctccaccacctcttattcgccctgctaattccatgccaccccgtctaaacccaagaccggtgttgtccacggttggtggtcaacagccaccatcacttattggaattcagacagattcacagtcctcactgcac

SEQ ID NO: 4753 - DNA, 1659 bp, Homo sapiens
  source 1..1659: mol_type = genomic DNA
atgcccggcatgatggagaaagggcccgagttactggggaagaaccgatcggccaacggcagcgccaagagcccggcaggcggcggcggcagcggcgcctcgtccaccaacggcgggctgcactactcagagcccgagagcggctgcagcagcgacgacgagcacgatgttgggatgagagtcggagccgaataccaagctcggatccctgaatttgatccaggtgctacaaagtacacagataaagacaatggagggatgcttgtatggtctccatatcacagtatcccagatgccaaattggatgaatacattgcaattgcaaaggaaaagcatggctacaatgtggaacaggcacttggcatgttgttctggcataaacataacattgagaagtcccttgctgatctccctaatttcactccctttccggatgagtggacagtggaagataaagtcctatttgaacaagcctttagttttcatggaaagagctttcacaggattcagcaaatgcttccagataagacaattgcaagccttgtaaaatattactattcttggaaaaaaactcgctctaggacaagtttgatggatcgccaggctcgtaaactagctaatagacataatcagggtgacagtgatgatgatgtagaagaaacacatccaatggatgggaatgatagtgattatgatcccaaaaaagaagccaaaaaagagggtaatactgaacaacctgtccaaactagcaagattggacttggaagaagagagtatcagagtttacaacatcgccatcattctcagcgttctaagtgccgtccacctaagggcatgtatttaacccaggaagatgtggtagcagtttcctgtagtcccaatgcagccaacaccatcctgaggcaactggacatggagttgatctctctaaaacgtcaggttcagaatgctaagcaagtaaacagtgcacttaaacagaaaatggaaggtggaattgaagaattcaaacctcctgagtcaaatcagaaaattaatgcccgttggaccacagaggagcagcttctagcagtgcaaggtgtccgcaaatatggtaaagattttcaagctattgcagatgtaattggcaacaagactgttggccaagtgaagaacttctttgtaaactacaggcgtcggtttaacttagaggaggtattgcaggagtgggaagcagaacaaggaacccaggcttctaatggtgatgcttctactttaggggaggagacaaaaagtgcttctaatgtgccatcagggaagagcactgatgaagaagaggaggcacagaccccacaggctcctcggacactgggtccatcacctcctgccccatcatccactccaacaccaacagcccctattgccactctgaaccagcctccaccacttcttcgtccaacactgcctgctgccccggctcttcaccggcagcctcctccactccagcagcaggctcggttcatccagccccggccaactttaaatcagcctccaccacctcttattcgccctgctaattccatgccaccccgtctaaacccaagaccggtgttgtccacggttggtggtcaacagccaccatcacttattggaattcagacagattcacagtcctcactgcac

SEQ ID NO: 4754 - DNA, 1308 bp, Homo sapiens
  source 1..1308: mol_type = genomic DNA
atgcccggcatgatggagaaagggcccgagttactggggaagaaccgatcggccaacggcagcgccaagagcccggcaggcggcggcggcagcggcgcctcgtccaccaacggcgggctgcactactcagagcccgagagcggctgcagcagcgacgacgagcacgatgttgggatgagagtcggagccgaataccaagctcggatccctgaatttgatccaggtgctacaaagtacacagataaagacaatggagggatgcttgtatggtctccatatcacagtatcccagatgccaaattggatgaatacattgcaattgcaaaggaaaagcatggctacaatgtggaacaggcacttggcatgttgttctggcataaacataacattgagaagtcccttgctgatctccctaatttcactccctttccggatgagtggacagtggaagataaagtcctatttgaacaagcctttagttttcatggaaagagctttcacaggattcagcaaatgcttccagataagacaattgcaagccttgtaaaatattactattcttggaaaaaaactcgctctaggacaagtttgatggatcgccaggctcgtaaactagctaatagacataatcagggtgacagtgatgatgatgtagaagaaacacatccaatggatgggaatgatagtgattatgatcccaaaaaagaagccaaaaaagagggtaatactgaacaacctgtccaaactagcaagattggacttggaagaagagagtatcagagtttacaacatcgccatcattctcagcgttctaagtgccgtccacctaagggcatgtatttaacccaggaagatgtggtagcagtttcctgtagtcccaatgcagccaacaccatcctgaggcaactggacatggagttgatctctctaaaacgtcaggttcagaatgctaagcaagtaaacagtgcacttaaacagaaaatggaaggtggaattgaagaattcaaacctcctgagtcaaatcagaaaattaatgcccgttggaccacagaggagcagcttctagcagtgcaaggcacagaccccacaggctcctcggacactgggtccatcacctcctgccccatcatccactccaacaccaacagcccctattgccactctgaaccagcctccaccacttcttcgtccaacactgcctgctgccccggctcttcaccggcagcctcctccactccagcagcaggctcggttcatccagccccggccaactttaaatcagcctccaccacctcttattcgccctgc

SEQ ID NO: 4755 - DNA, 1569 bp, Homo sapiens
  source 1..1569: mol_type = genomic DNA
atgccctcagtgatggagaagccgagcgcgggctctgggatcctgtcccgtagccgggccaagacggtgcccaacggcggacagccccactcggaggatgacagcagcgaggaggagcactcgcacgacagcatgatccgcgttggaaccaattaccaggccgtaattccggagtgcaagcctgagagccccgcacgctacagcaacaaggagctgaaggggatgctggtgtggtcacccaaccactgtgtgtcagatgccaagcttgacaagtacattgcgatggccaaggagaagcatggctacaacattgagcaggcgctgggcatgcttctgtggcataagcacgatgtggagaagtcgctggccgacctggccaacttcaccccattccctgacgagtggacagtagaggacaaggtgctgtttgaacaggcctttggcttccatggcaaatgcttccagcggatccagcagatgctgcctgacaagttgattcccagcctggtgaaatactactactcttggaagaagacccgcagccgaactagtgtgatggacagacaggcccggcggctggggggccgcaaggacaaagaagacagtgatgagctcgaagagggtcgaggaggcgtgagtgagggagagcccgatcctgcagatcccaagagagagcctctaccctctcggcccctgaatgcacgcccaggccctgggaaaaaggaggtccaggtgtctcagtaccgccaccatcccttgcgaacccggcgtcgcccacccaagggcatgtacctgagccctgaaggcctcacggcagtgtcaggaagcccggaccttgccaacctcacgctccgaggtcttgactctcagctcatctccctcaagcgccaggtacagagcatgaagcagacgaacagcagcctgcgccaagccctggagggcggtattgatccactacgccccccggaggccaacaccaagttcaactcccgctggaccacagatgagcagcttttggctgttcaagccatccgtaggtatggcaaagactttggggctattgcagaggtgattgggaacaagactctgacccaggtgaagactttctttgtgagctaccggcgccgcttcaatctggaggaggtgctgcaggaatgggaggctgagcaggatggggcccctggagccccagtccccatggaggaggctaggagaggggctccattgccagccccagccctagaggaagatgatgaggtccagattacatcggtctccacgtccgtgccccgatcagtgccccctgcgccaccaccccctccacctcccacctcgctgtcccagccacccccgctgctgaggccacctttgcccacggctcccactctgctccgacagccacccccactgcagcagggccgcttcctccagccccggctggcccccaaccagcccccaccgcctctcatccgccccgctctggctgccccccgccacagcgcccgccctggccctcagcccccacccaccctgattggaacccctctggagcccccagcaccctcactc

SEQ ID NO: 4756 - DNA, 1455 bp, Homo sapiens
  source 1..1455: mol_type = genomic DNA
atgccggccatggtggagaagggccccgaggtctcagggaagcggagagggaggaacaacgcggccgcctccgcctccgccgccgccgcctccgccgccgcctcggccgcctgcgcctcgccagccgccactgccgcctcgggcgccgccgcctcctcagcctcggccgccgccgcctcagccgccgccgcccccaataatggccagaataaaagtttggcggcggcggcgcccaatggcaacagcagcagcaactcctgggaggaaggcagctcgggctcgtccagcgacgaggagcacggtggcggtggcatgagggtcggaccccagtaccaggcggtggtgcccgacttcgaccccgccaaactggcaagacgcagtcaagaacgggacaatcttggcatgttggtctggtcacccaatcaaaatctgtcagaagcaaagttggatgaatacattgccattgccaaagaaaagcatgggtacaacatggaacaggctcttgggatgctcttctggcataaacataatatcgaaaagtcattggctgatttgcccaactttacccctttcccagatgagtggactgtggaagataaagtcttatttgagcaagcctttagttttcatgggaaaacttttcatagaatccaacaaatgcttccagataaatctatagcaagtctggtgaaattttactattcttggaagaagacgaggactaaaactagtgtgatggatcgccatgcccggaaacaaaaacgggagcgggaggagagcgaggatgaactggaagaggcaaatggaaacaatcccattgacattgaggttgatcaaaacaaggaaagcaaaaaggaggttccccctactgagacagttcctcaggtcaaaaaagaaaaacatagcacacaagctaaaaatagagcaaaaaggaaacctccaaaaggaatgtttctttctcaagaagatgtggaggctgtttctgccaatgccactgctgctaccacggtgctgagacaactagacatggaattggtttcagtcaaacgacagatccagaatattaaacagacaaacagtgctctcaaagaaaaacttgatggtggaatagaaccatatcgacttccagaggtcattcagaaatgtaatgcacgttggactacagaagagcagcttctcgccgtacaagccatcaggaaatatggccgagattttcaggcaatctcagacgtgattgggaacaaatcagtggtacaagtgaaaaacttttttgtaaattatcgacgccgcttcaacatagatgaagttttacaagaatgggaggcagaacatggtaaagaagagaccaatgggcccagtaaccagaagcctgtgaagtccccagataattccattaagatgcccgaagaggaagacgaggctcctgttctggatgtcagatatgcatctgcctcc

SEQ ID NO: 4757 - DNA, 3747 bp, Homo sapiens
  source 1..3747: mol_type = genomic DNA
atgtcttcaatgtggtctgaatatacaattggtggggtgaagatttactttccttataaagcttacccgtcacagcttgctatgatgaattctattctcagaggattaaacagcaagcaacattgtttgttggagagtcccacaggaagtggaaaaagcttagccttactttgttctgctttagcatggcaacaatctcttagtgggaaaccagcagatgagggcgtaagtgaaaaagctgaagtacaattgtcatgttgttgtgcatgccattcaaaggattttacaaacaatgacatgaaccaaggaacttcacgtcatttcaactatccaagcacaccaccttctgaaagaaatggcacttcatcaacttgtcaagactcccctgaaaaaaccactctggctgcaaagttatctgctaagaaacaggcatccatatacagagatgaaaatgatgattttcaagtagagaagaaaagaattcgacccttagaaactacacagcagattagaaaacgtcattgctttggaacagaagtacacaatttggatgcaaaagttgattcaggaaagactgtaaaactcaactctccactggaaaagataaactccttttcgccacagaaaccccctggccactgttctaggtgctgttgttctactaaacaaggaaacagtcaagagtcatcgaataccattaagaaggatcatacagggaaatccaagatacccaaaatatattttgggacacgcacacacaagcagattgctcagattactagagagctccggaggacggcatattcaggggttccaatgactattctttccagcagggatcatacttgtgtccatcctgaggtagtcggtaacttcaacagaaatgagaagtgcatggaattgctagatgggaaaaacggaaaatcctgctatttttatcatggagttcataaaattagtgatcagcacacattacagactttccaagggatgtgcaaagcctgggatatagaagaacttgtcagcctggggaagaaactaaaggcctgtccatattacacagcccgagaactaatacaagatgctgacatcatattttgtccctacaactatcttctagatgcacaaataagggaaagtatggatttaaatctgaaagaacaggttgtcattttagatgaagctcataacatcgaggactgtgctcgggaatcagcaagttacagtgtaacagaagttcagcttcggtttgctcgggatgaactagatagtatggtcaacaataatataaggaagaaagatcatgaacccctacgagctgtgtgctgtagcctcattaattggttagaagcaaacgctgaatatcttgtagaaagagattatgaatcagcttgtaaaatatggagtggaaatgaaatgctcttaactttacacaaaatgggtatcaccactgctacttttcccattttgcagggacatttttctgctgttcttcaaaaagaggaaaaaatctcaccaatttatggtaaagaggaggcaagagaagtacctgttattagtgcatcaactcaaataatgcttaaaggactttttatggtacttgactatctttttaggcaaaatagcagatttgcagatgattataaaattgcgattcaacagacttactcctggacaaatcagattgatatttcagacaaaaatgggttgttggttctaccaaaaaataagaaacgttcacgacagaaaactgcagttcatgtgctaaacttttggtgcttaaatccagctgtggccttttcagatattaatggcaaagttcagaccattgttttgacatctggtacattatcaccaatgaaatccttttcgtcagaacttggtgttacatttactatccagctggaggctaatcatatcattaaaaattcacaggtttgggttggtaccattgggtcaggccccaagggtcggaatctctgtgctaccttccagaatactgaaacatttgagttccaagatgaagtgggagcacttttgttatctgtgtgccagactgtgagccaaggaattttgtgtttcttgccatcttacaagttattagaaaaattaaaagaacgttggctctctactggtttatggcataatctggagttggtgaagacagtcattgtagaaccacagggaggagaaaaaacaaattttgatgaattactgcaggtgtactatgacgcaatcaaatacaaaggagagaaagatggagctctcctggtagcagtttgtcgtggtaaagtgagtgagggtctggatttctcagatgacaatgcccgtgctgtcataacaataggaattccttttccaaatgtgaaagatctacaggttgaactaaaacgacaatacaatgaccaccattcaaaattgagaggtcttctacctggccgtcagtggtatgaaattcaagcatacagggccttaaaccaggcccttggtagatgtattagacacagaaatgattggggagctcttattctagtggatgatcgctttaggaataacccaagtcgctatatatctggactttctaaatgggtacggcagcagattcagcaccattcaacctttgaaagtgcactggaatccttggctgaattttccaaaaagcatcaaaaagttcttaatgtatccataaaggacagaaccaatatacaggacaatgagtctacacttgaagtgacctctttaaagtacagtacctcaccttatttactggaagcagcaagtcatctatcaccagaaaattttgtggaagatgaagcaaagatatgtgtccaggaactacagtgtcctaaaattattaccaaaaattcacctctaccaagtagcattatctccagaaaggagaaaaatgatccagtattcctggaagaagcagggaaagcagaaaaaattgtgatttccagatccacaagcccaactttcaacaaacaaacaaagagagttagctggtcaagctttaattctttgggacagtattttactggtaaaataccgaaggcaacacctgagctcgggtcatcagagaatagtgcctctagtcctccccgtttcaaaacagagaagatggaaagtaaaactgttttgcccttcactgataaatgtgaatcctcaaatctgacagtaaacacatcgtttggatcatgccctcaatcagaaaccattatttcatcattaaagattgatgccacccttactagaaaaaatcattctgaacatccgctctgttctgaagaagccctggatccagacattgaattgtctctagtaagtgaagaagataaacagtccacttcaaatagagattttgaaacagaagcagaagatgaatctatctattttacacctgaactttatgatcctgaagatacagatgaagaaaaaaatgacctagctgaaactgatagaggaaatagattggctaacaattcagattgcattttagctaaagacctttttgaaattagaactataaaagaagtagattcagccagagaagtgaaagctgaggattgcatagatacaaagttgaatggaattctgcatattgaagaaagtaaaattgatgacattgatggtaatgtaaaaacaacttggataaatgaactggaactgggaaaaactcatgaaatagaaataaagaactttaaaccatctccttccaaaaataaaggcatgtttcctggttttaag

SEQ ID NO: 4758 - DNA, 630 bp, Homo sapiens
  source 1..630: mol_type = genomic DNA
atggaccaaccattggctgaacatttcagtactctcgcaaaaaactcaaatttagtgcgacttaacctttctgggtgttctggattctctgaatttgccctgcagactttgctaagcagctgttccagactggatgagctgaacctctcctggtgttttgatttcactgaaaagcatgtacaggtggctgttgcgcatgtgtcagagaccatcacccagctgaatcttagcggctacagaaagaatctccagaaatcagatctctctactttagttagaagatgccccaatcttgtccatctagacttaagtgatagtgtcatgctaaagaatgactgctttcaggaatttttccagctcaactacctccaacacctatcactcagtcggtgctatgatataatacctgaaactttacttgaacttggagaaattcccacactaaaaacactacaagtttttggaatcgtgccagatggtacccttcaactgttaaaggaagcccttcctcatctacagattaattgctcccatttcaccaccattgccaggccaactattggcaacaaaaagaaccaggagatatggggcatcaaatgccgactgacactgcaaaagcccagttgtcta

SEQ ID NO: 4759 - DNA, 1665 bp, Homo sapiens
  source 1..1665: mol_type = genomic DNA
atgaatgtgatgttagagaactacaaaaacctggtcttcttggcaggtattgctgtctctaagcaagacccgatcaccagtctagagcaagaaaaagagccctggaatatgaagatatgtgagatggtggatgaatccccagctatgtgttcttcttttaccagagacctttggccagagcaagacataaaagattcttttcaacaagtgatactgagaagacatggcaaatgtgaacatgagaatttacagttaagaaaaggctccgcaaatgtggttgagtgtaaggtgtacaaaaaaggttataatgaactaaaccagtgtttgacaactacccagagcaaaatatttccatgtgataaatatataaaagtctttcataaaattttcaattcaaatagacacaagacaagacatactggagagaaacctttcaaatgtaaaaaatgtgatgaatcattttgcatgcttttacacctacatcaacataaaagaattcatattagagagaattcttaccaatgtgaagaatgtgacaaagtgtttaagcggttctcaacccttactagacacaagagagttcatactggagagaaacccttcaaatgtgaagaatgtggcaaagcttttaagcactcctcaacccttactacacataagatgattcatactggagagaaaccctacagatgtgaagaatgtggcaaagccttctaccattcttcacaccttactacacataaggtaattcatactggagagaagcccttcaaatgtgaagaatgtggtaaagcttttaaccacccttcagcccttactacacataagttcattcatgttaaagaaaaaccctacaaatgtgaagaatgtgacaaagcttttaaccgattctcataccttactaaacataagataattcattctggagagaaatcttacaaatgtgaacaatgtggcaaaggctttaactggtcttcaacccttacaaaacataaaagaattcatactggagagaaaccctacaaatgtgaagaatgtggcaaagcctttaatgtgtcttcacaccttactacacataagatgattcatactggagagaaaccctacaaatgtgaagaatgtggcaaagcctttaaccactcctcaaaacttactatacataagataattcatactggagagaaaccttacaaatgtgaagaatgtggcaaagcttttaaccaatcctcaaaccttaccaaacataagataattcatactggagagaaactctacaaatgtgaagaatgtggcaaagcttttaaccgatcctcaaaccttactacacataagagaattcacactggagagaaaccctacaaatgtgaagaatgtggcaaagctttcaaccgatcctcaaaccttactaaacataacataattcatactggagagaaatcttacaaatgtgaagaatgtggtaaagcctttaaccaatcctcaactcttactaaacataggaaaattcagcagggcatggtggctcatgcctgtaatcccaacactttgagaggactaggtgagcagatcgcgaggtcaggagttcaagaccagcctggccaacatggtaaaaccccatctctactaaaaatacaaaaatttgctgggtgtggtggcaggcgcctg

SEQ ID NO: 4760 - DNA, 2187 bp, Homo sapiens
  source 1..2187: mol_type = genomic DNA
atgggaaaaaaatacaagaacattgttctactaaaaggattagaggtcatcaatgattatcattttagaatggttaagtccttactgagcaacgatttaaaacttaatttaaaaatgagagaagagtatgacaaaattcagattgctgacttgatggaagaaaagttccgaggtgatgctggtttgggcaaactaataaaaattttcgaagatataccaacgcttgaagacctggctgaaactcttaaaaaagaaaagttaaaagtaaaaggaccagccctatcaagaaagaggaagaaggaagtggatgctacttcacctgcaccctccacaagcagcactgtcaaaactgaaggagcagaggcaactcctggagctcagaacccgaaaacagtggccaaatgtcaggtaactcccagaagaaatgttctccaaaaacgcccagtgatagtgaaggtactgagtacaacaaagccatttgaatatgagaccccagaaatggagaaaaaaataatgtttcatgctacagtggctacacagacacagttcttccatgtgaaggttttaaacaccagcttgaaggagaaattcaatggaaagaaaatcatcatcatatcagattatttggaatatgatagtctcctagaggtcaatgaagaatctactgtatctgaagctggtcctaaccaaacgtttgaggttccaaataaaatcatcaacagagcaaaggaaactctgaagattgatattcttcacaaacaagcttcaggaaatattgtatatggggtatttatgctacataagaaaacagtaaatcagaagaccacaatctacgaaattcaggatgatagaggaaaaatggatgtagtggggacaggacaatgtcacaatatcccctgtgaagaaggagataagctccaacttttctgctttcgacttagaaaaaagaaccagatgtcaaaactgatttcagaaatgcatagttttatccagataaagaaaaaaacaaacccgagaaacaatgaccccaagagcatgaagctaccccaggaacagcgtcagcttccatatccttcagaggccagcacaaccttccctgagagccatcttcggactcctcagatgccaccaacaactccatccagcagtttcttcaccaagaaaagtgaagacacaatctccaaaatgaatgacttcatgaggatgcagatactgaaggaagggagtcattttccaggaccgttcatgaccagcataggcccagctgagagccatccccacactcctcagatgcctccatcaacaccaagcagcagtttcttaaccacgaaaagtgaagacacaatctccaaaatgaatgacttcatgaggatgcagatactgaaggaagggagtcattttccaggaccgttcatgaccagcataggcccagctgagagccatccccacactcctcagatgcctccatcaacaccaagcagcagtttcttaaccacgttgaaaccaagactgaagactgaacctgaagaagtttccatagaagacagtgcccagagtgacctcaaagaagtgatggtgctgaacgcaacagaatcatttgtatatgagcccaaagagcagaagaaaatgtttcatgccacagtggcaactgagaatgaagtcttccgagtgaaggtttttaatattgacctaaaggagaagttcaccccaaagaagatcattgccatagcaaattatgtttgccgcaatgggttcctggaggtatatcctttcacacttgtggctgatgtgaatgctgaccgaaacatggagatcccaaaaggattgattagaagtgccagcgtaactcctaaaatcaatcagctttgctcacaaactaaaggaagttttgtgaatggggtgtttgaggtacataagaaaaatgtaaggggtgaattcacttattatgaaatacaagataatacagggaagatggaagtggtggtgcatggacgactgaccacaatcaactgtgaggaaggagataaactgaaactcacctgctttgaattggcaccgaaaagtgggaataccggggagttgagatctgtaattcatagtcacatcaaggtcatcaagaccaggaaaaacaagaaagacatactcaatcctgattcaagtatggaaacttcaccagactttttcttc

SEQ ID NO: 4761 - DNA, 2187 bp, Homo sapiens
  source 1..2187: mol_type = genomic DNA
atgggaaaaaaatacaagaacattgttctactaaaaggattagaggtcatcaatgattatcattttagaatggttaagtccttactgagcaacgatttaaaacttaatttaaaaatgagagaagagtatgacaaaattcagattgctgacttgatggaagaaaagttccgaggtgatgctggtttgggcaaactaataaaaattttcgaagatataccaacgcttgaagacctggctgaaactcttaaaaaagaaaagttaaaagtaaaaggaccagccctatcaagaaagaggaagaaggaagtggatgctacttcacctgcaccctccacaagcagcactgtcaaaactgaaggagcagaggcaactcctggagctcagaaaagaaaaaaatcaaccaaagaaaaggctggacccaaagggagtaaggtgtccgaggaacagactcagcctccctctcctgcaggagccggcatgtccacagccatgggccgttccccatctcccaagacctcattgtcagctccacccaacagttcttcaactgagaacccgaaaacagtggccaaatgtcaggtaactcccagaagaaatgttctccaaaaacgcccagtgatagtgaaggtactgagtacaacaaagccatttgaatatgagaccccagaaatggagaaaaaaataatgtttcatgctacagtggctacacagacacagttcttccatgtgaaggttttaaacaccagcttgaaggagaaattcaatggaaagaaaatcatcatcatatcagattatttggaatatgatagtctcctagaggtcaatgaagaatctactgtatctgaagctggtcctaaccaaacgtttgaggttccaaataaaatcatcaacagagcaaaggaaactctgaagattgatattcttcacaaacaagcttcaggaaatattgtatatggggtatttatgctacataagaaaacagtaaatcagaagaccacaatctacgaaattcaggatgatagaggaaaaatggatgtagtggggacaggacaatgtcacaatatcccctgtgaagaaggagataagctccaacttttctgctttcgacttagaaaaaagaaccagatgtcaaaactgatttcagaaatgcatagttttatccagataaagaaaaaaacaaacccgagaaacaatgaccccaagagcatgaagctaccccaggaacagcgtcagcttccatatccttcagaggccagcacaaccttccctgagagccatcttcggactcctcagatgccaccaacaactccatccagcagtttcttcaccaagaaaagtgaagacacaatctccaaaatgaatgacttcatgaggatgcagatactgaaggaagggagtcattttccaggaccgttcatgaccagcataggcccagctgagagccatccccacactcctcagatgcctccatcaacaccaagcagcagtttcttaaccacgttgaaaccaagactgaagactgaacctgaagaagtttccatagaagacagtgcccagagtgacctcaaagaagtgatggtgctgaacgcaacagaatcatttgtatatgagcccaaagagcagaagaaaatgtttcatgccacagtggcaactgagaatgaagtcttccgagtgaaggtttttaatattgacctaaaggagaagttcaccccaaagaagatcattgccatagcaaattatgtttgccgcaatgggttcctggaggtatatcctttcacacttgtggctgatgtgaatgctgaccgaaacatggagatcccaaaaggattgattagaagtgccagcgtaactcctaaaatcaatcagctttgctcacaaactaaaggaagttttgtgaatggggtgtttgaggtacataagaaaaatgtaaggggtgaattcacttattatgaaatacaagataatacagggaagatggaagtggtggtgcatggacgactgaccacaatcaactgtgaggaaggagataaactgaaactcacctgctttgaattggcaccgaaaagtgggaataccggggagttgagatctgtaattcatagtcacatcaaggtcatcaagaccaggaaaaacaagaaagacatactcaatcctgattcaagtatggaaacttcaccagactttttcttc

SEQ ID NO: 4762 - DNA, 855 bp, Homo sapiens
  source 1..855: mol_type = genomic DNA
atgtcggaagcgggcgaggagcagcccatggagacgacgggcgccaccgagaacggacatgaggccgtccccgaaggcgagtcgccggccggggctggcacgggcgccgcggcgggggctggaggcgcgaccgcggcgcccccgagcgggaatcagaacggcgccgagggcgaccagatcaacgccagcaagaacgaggaggacgcgggaaaaatgttcgttggtggcctgagctgggatactagcaaaaaagatttaaaagactattttactaaatttggagaggtcgttgactgtacaataaaaatggatcccaacactggacggtcaagagggtttgggtttatcctgttcaaagatgcagccagtgtggagaaggtcctagaccagaaggagcacaggctggatggccgtgtcattgaccctaaaaaggccatggctatgaagaaggacccggtgaagaaaatcttcgttgggggtctgaatcctgaagccactgaggaaaagatcagggagtactttggcgagtttggggagattgaggccattgaattgccaatggatccaaagttgaacaaaagacgaggttttgtgtttatcacctttaaagaagaagaacccgtgaagaaggttctggagaaaaagttccatactgtcagtggaagcaagtgtgagatcaaggtggcccagcccaaagaagtctatcagcagcagcagtatggctctgggggccgtggaaaccgcaaccgagggaaccgaggcagcggaggtggtggtggaggtggaggtcagggtagtacaaactacggcaagagccagcgacgtggtggccatcagaataactacaagccatac

SEQ ID NO: 4763 - DNA, 996 bp, Homo sapiens
  source 1..996: mol_type = genomic DNA
atgtcggaagcgggcgaggagcagcccatggagacgacgggcgccaccgagaacggacatgaggccgtccccgaaggcgagtcgccggccggggctggcacgggcgccgcggcgggggctggaggcgcgaccgcggcgcccccgagcgggaatcagaacggcgccgagggcgaccagatcaacgccagcaagaacgaggaggacgcgggaaaaatgttcgttggtggcctgagctgggatactagcaaaaaagatttaaaagactattttactaaatttggagaggtcgttgactgtacaataaaaatggatcccaacactggacggtcaagagggtttgggtttatcctgttcaaagatgcagccagtgtggagaaggtcctagaccagaaggagcacaggctggatggccgtgtcattgaccctaaaaaggccatggctatgaagaaggacccggtgaagaaaatcttcgttgggggtctgaatcctgaagccactgaggaaaagatcagggagtactttggcgagtttggggagattgaggccattgaattgccaatggatccaaagttgaacaaaagacgaggttttgtgtttatcacctttaaagaagaagaacccgtgaagaaggttctggagaaaaagttccatactgtcagtggaagcaagtgtgagatcaaggtggcccagcccaaagaagtctatcagcagcagcagtatggctctgggggccgtggaaaccgcaaccgagggaaccgaggcagcggaggtggtggtggaggtggaggtcagagtcagagttggaatcagggctacggcaactactggaaccagggctacggctaccagcagggctacgggcctggctatggcggctacgactactcgccctatggctattacggctacggccccggctacgactacagtcagggtagtacaaactacggcaagagccagcgacgtggtggccatcagaataactacaagccatac

SEQ ID NO: 4764 - DNA, 2733 bp, Homo sapiens
  source 1..2733: mol_type = genomic DNA
atggaggtaaattgtttaacactaaaagacctgatcagccccaggcagcccagactagattttgcagttgaagatggggaaaatgcacaaaaggaaaatatatttgttgatcgatcaaggatggccccgaagactccaataaaaaatgaaccaattgatttatcgaagcaaaaaaaatttactccagaaagaaatcccattactccagttaagtttgttgacagacagcaagcggaaccatggacacccacagctaacctgaagatgctcattagtgctgccagcccagatataagggaccgggagaagaaaaagggactattccgacccattgaaaacaaggacgatgcatttacagattctctacagcttgatgttgttggggacagtgctgtggacgaatttgaaaagcaaaggccaagcagaaaacagaaaagtttaggactcctgtgccagaagtttctagctcgctatccaagttatcccttgtcaactgagaaaactaccatctccctagatgaagttgctgtcagtcttggtgtggaaaggagacgcatctatgacattgtaaatgtgctggagtcgctgcatctggtcagccgggtggctaagaatcagtatggctggcatggacggcacagcctgccaaaaaccctgaggaacctccagagactaggagaggagcagaaatatgaagagcaaatggcctacctccaacagaaagagctggacctgatagattataaatttggagaacgtaaaaaagatggtgatccagattcccaggaacaacagttactggatttctctgaacccgactgtccctcttcatctgcaaacagtagaaaagacaagtctctgagaattatgagccagaagtttgtcatgctgttcctcgtctccaaaaccaagattgtcactctggatgtggctgccaaaatactgatagaagaaagccaagatgccccagaccatagtaaatttaaaacaaaggtacgacgcctctatgacatagccaatgttctgaccagcttggctctgataaagaaagtgcatgtaacagaagagcgaggtcgtaaaccagccttcaagtggatcgggcctgtggacttcagctcaagtgatgaagaactggtggatgtttctgcatctgtcttaccagaattgaaaagagaaacatatggccagattcaagtctgtgcaaaacagaagctggctcgccatggttcttttaacacagttcaggcttctgagaggatccagaggaaagtgaactcagaaccgagcagcccgtacagagaagaacaaggatcaggtggctactctttagaaattggaagcctggcagctgtctatagacagaaaatagaagacaattcacagggaaaagcctttgccagtaagagagtggtgcctccatcaagcagcttggaccctgttgctcctttccctgtcctctctgttgacccagaatattgtgttaatcctttagcccacccagtattttctgttgctcagacggacctgcaggcattctccatgcagaacggtctgaatggacaagtggatgtctcacttgcttctgcagcctctgctgtggagagcctgaagccagcactccttgctggccagcctctagtgtatgtgccctctgcctcactgttcatgctgtatggaagtctgcaggagggaccagcgtcagggtcagggtcagagagggatgacagaagctcagaagccccagccacagtagagctgtcatctgcaccctcagctcagaagcgcctctgtgaggagaggaaacctcaggaggaggatgagccagccactaaaaggcaaagtagggaatatgaagacggcccgctgtcgcttgtcatgcccaagaaaccctcagattccacagaccttgcctctcccaagactatgggtaacagggcatctatacccctcaaagacattcatgtgaatggccaactccctgctgcagaagagatttcaggaaaggcaacagcaaactctcttgtttcttctgagtggggaaatccttcaagaaatacagatgttgaaaagccttcaaaagaaaatgaaagcaccaaagagccttctttgctacaatatctttgtgtgcagtctcctgcaggattaaatggtttcaatgtacttttatctggcagtcaaaccccccctactgtgggcccgtcctcaggtcagctgccgtctttcagtgtcccttgcatggtcttaccatctccacctctgggcccttttcctgttctctattctcctgcaatgccgggcccggtttcttctactcttggtgctctcccaaacacaggacctgtgaatttcagcttgcctggccttggatcaatagcccagcttctcgtcggccccacagctgtggttaatccaaagtcgtccacactcccttctgcagaccctcagcttcagagtcagccctcactaaacctaagtccagtgatgtcaaggtcacacagtgtcgtccaacaacctgagtcccccgtttacgtgggacatccagtctcagtagtaaaattacatcagtcaccagttccagtgacccccaagagcatccaacgcacacatcgtgagacgtttttcaagacacccggcagccttggagaccctgtcctgaagagaagagaaaggaaccagtcacgaaacaccagctcggcccagaggagactagaaatccccagcggcggcgctgac

SEQ ID NO: 4765 - DNA, 1302 bp, Homo sapiens
  source 1..1302: mol_type = genomic DNA
atgtctattctcaagatccatgccagggagatctttgactctcgcgggaatcccactgttgaggttgatctcttcacctcaaaaggtctcttcagagctgctgtgcccagtggtgcttcaactggtatctatgaggccctagagctccgggacaatgataagactcgctatatggggaagggtgtctcaaaggctgttgagcacatcaataaaactattgcgcctgccctggttagcaagaaactgaacgtcacagaacaagagaagattgacaaactgatgatcgagatggatggaacagaaaataaatctaagtttggtgcgaacgccattctgggggtgtcccttgccgtctgcaaagctggtgccgttgagaagggggtccccctgtaccgccacatcgctgacttggctggcaactctgaagtcatcctgccagtcccggcgttcaatgtcatcaatggcggttctcatgctggcaacaagctggccatgcaggagttcatgatcctcccagtcggtgcagcaaacttcagggaagccatgcgcattggagcagaggtttaccacaacctgaagaatgtcatcaaggagaaatatgggaaagatgccaccaatgtgggggatgaaggcgggtttgctcccaacatcctggagaataaagaaggcctggagctgctgaagactgctattgggaaagctggctacactgataaggtggtcatcggcatggacgtagcggcctccgagttcttcaggtctgggaagtatgacctggacttcaagtctcccgatgaccccagcaggtacatctcgcctgaccagctggctgacctgtacaagtccttcatcaaggactacccagtggtgtctatcgaagatccctttgaccaggatgactggggagcttggcagaagttcacagccagtgcaggaatccaggtagtgggggatgatctcacagtgaccaacccaaagaggatcgccaaggccgtgaacgagaagtcctgcaactgcctcctgctcaaagtcaaccagattggctccgtgaccgagtctcttcaggcgtgcaagctggcccaggccaatggttggggcgtcatggtgtctcatcgttcgggggagactgaagataccttcatcgctgacctggttgtggggctgtgcactgggcagatcaagactggtgccccttgccgatctgagcgcttggccaagtacaaccagctcctcagaattgaagaggagctgggcagcaaggctaagtttgccggcaggaacttcagaaaccccttggccaag

SEQ ID NO: 4766 - DNA, 714 bp, Homo sapiens
  source 1..714: mol_type = genomic DNA
atgccgaagtcgtgcgcggcccggcagtgctgcaaccgctacagcagccgcaggaagcagctcaccttccaccggtttccgttcagccgcccggagctgctgaaggaatgggtgctgaacatcggccggggcaacttcaagcccaagcagcacacggtcatctgctccgagcacttccggccagagtgcttcagcgcctttggaaaccgcaagaacctaaagcacaatgccgtgcccacggtgttcgcctttcaggaccccacacaggtgagggagaacacagaccctgccagtgagagaggaaatgccagctcttctcagaaagaaaaggtcctccctgaggcgggggccggagaggacagtcctgggagaaacatggacactgcacttgaagagcttcagttgcccccaaatgccgaaggccacgtaaaacaggtctcgccacggaggccgcaagcaacagaggctgttggccggccgactggccctgcaggcctgagaaggacccccaacaagcagccatctgatcacagctatgcccttttggacttagattccctgaagaaaaaactcttcctcactctgaaggaaaatgaaaagctccggaagcgcttgcaggcccagaggctggtgatgcgaaggatgtccagccgcctccgtgcttgcaaagggcaccagggactccaggccagacttgggccagagcagcagagc

SEQ ID NO: 4767 - DNA, 525 bp, Homo sapiens
  source 1..525: mol_type = genomic DNA
atgccgaagtcgtgcgcggcccggcagtgctgcaaccgctacagcagccgcaggaagcagctcaccttccaccggtttccgttcagccgcccggagctgctgaaggaatgggtgctgaacatcggccggggcaacttcaagcccaagcagcacacggtcatctgctccgagcacttccggccagagtgcttcagcgcctttggaaaccgcaagaacctaaagcacaatgccgtgcccacggtgttcgcctttcaggaccccacacagcaggtgagggagaacacagaccctgccagtgagagaggaaatgccagctcttctcagaaagaaaagacttcaccctgccgttcccaggtcctccctgaggcgggggccggagaggacagtcctgggagaaacatggacactgcacttgaagagcttcagttgcccccaaatgccgaaggccacgtaaaacaggcaatgttgtttaatgtagaaaatggaaccccagcttcacgtgaagccttgtggttgagtgaggag

SEQ ID NO: 4768 - DNA, 717 bp, Homo sapiens
  source 1..717: mol_type = genomic DNA
atgccgaagtcgtgcgcggcccggcagtgctgcaaccgctacagcagccgcaggaagcagctcaccttccaccggtttccgttcagccgcccggagctgctgaaggaatgggtgctgaacatcggccggggcaacttcaagcccaagcagcacacggtcatctgctccgagcacttccggccagagtgcttcagcgcctttggaaaccgcaagaacctaaagcacaatgccgtgcccacggtgttcgcctttcaggaccccacacagcaggtgagggagaacacagaccctgccagtgagagaggaaatgccagctcttctcagaaagaaaaggtcctccctgaggcgggggccggagaggacagtcctgggagaaacatggacactgcacttgaagagcttcagttgcccccaaatgccgaaggccacgtaaaacaggtctcgccacggaggccgcaagcaacagaggctgttggccggccgactggccctgcaggcctgagaaggacccccaacaagcagccatctgatcacagctatgcccttttggacttagattccctgaagaaaaaactcttcctcactctgaaggaaaatgaaaagctccggaagcgcttgcaggcccagaggctggtgatgcgaaggatgtccagccgcctccgtgcttgcaaagggcaccagggactccaggccagacttgggccagagcagcagagc

SEQ ID NO: 4769 - DNA, 2502 bp, Homo sapiens
  source 1..2502: mol_type = genomic DNA
atgatgaaggaggtcttgtcaacagggcaaggcaatagagaagtgatccacacagggacattgcaaagacatcaaagttatcacattggagacttttgcttccaggaaattgagaaagaaattcataacattgagtttcagtgtcaagaagatgaaagaaatggccatgaagcacccacgacaaaaataaaaaagttgactggtagcacagaccaacatgatcacaggcatgctggaaacaagcctattaaagatcagcttggatcaagcttttattcacatctgcctgaactccacatatttcagatcaaaggtgaaattgctaatcaacttgagaagtctaccagtgatgcttcctcagtttcaacatcccaaagaatttcctgtaggccccaaatccatatttctaataactatgggaataatcccctgaattcttcattactcccacaaaaacaggaagtacacatgagagaaaaatctttcccatgtaatgagagtggcaaagcctttaattgtagctcactcttaaggaaacaccagataccccatttaggagacaaacaatataaatgtgatgtatgtggcaagctctttaatcacaagcaataccttgcatgccatcgtagatgtcacactggagagaaaccttacaagtgtaaagagtgtggaaagtccttcagttacaagtcatcccttacatgccatcatagacttcatactggagtaaaaccttacaagtgtaatgagtgtggcaaggtctttcgtcaaaattcagcccttgtaattcataaggcaattcatactggagagaaaccttacaagtgtaatgaatgtggcaaggcttttaatcaacaatcacacctttcacgccatcaaagacttcatactggagtgaaaccttacaaatgtaagatttgtgagaaggcttttgcgtgtcattcctatctggcaaaccatactagaattcatagtggagagaaaacatacaagtgtaatgagtgtggtaaggcttttaatcatcaatcaagccttgcacgtcatcatatacttcatactggagagaaaccttacaaatgtgaagaatgtgacaaagttttcagtcagaaatcaacccttgagagacataagagaattcatactggagagaaaccatacaaatgtaaggtttgtgatacagctttcacgtgtaattcacagctggcacgacatagaagaattcacactggagagaaaacttacaagtgtaatgagtgtcgcaagaccttcagccgcaggtcatcccttctatgccatcgtagacttcatagtggtgaaaaaccttacaagtgtaatcagtgtggcaataccttccgtcaccgggcatcccttgtataccatcgtagacttcacactctagagaaatcttacaaatgtacggtttgtaacaaggttttcatgcgtaattcagtcctggctgtacatactagaattcacactgcaaagaaaccttacaagtgtaatgaatgtgggaaagcttttaatcaacaatcacatctttcacgtcatcgtagacttcatactggagagaaaccttacaaatgtgaagcatgtgacaaagtttttggtcagaaatcagctcttgagtcacataagagaattcatactggagagaaaccatacagatgtcaggtttgtgacacagctttcacgtggaattcacagctggcacgacatacaagaattcacactggagaaaaaacttacaagtgtaatgagtgtgggaagaccttcagttacaagtcatcacttgtatggcatcgtagacttcatggtggagagaaatcttacaaatgtaaggtttgtgacaaggctttcgtgtgtcgttcctatgtggcaaaacatactagaattcacagtggaatgaaaccttacaagtgtaatgagtgcagcaagaccttcagtaacaggtcatcccttgtatgccatcgtagaattcatagtggtgagaaaccttacaagtgtagtgagtgcagcaagacgttcagtcagaaggcaacccttctatgccatcgtagacttcatagtggtgagaaaccttacaagtgtaacgactgtggcaataccttccgtcactggtcatcccttgtataccatcgtagacttcatactggagagaaatcttacaaatgtacggtttgtgacaaggctttcgtgcgtaattcatacctggcaagacatattagaattcacactgcagagaaaccttacaagtgtaatgaatgtggaaaggcttttaatgaacaatcacacctttcacgtcatcatagaattcatactggagagaaaccttacaaatgtgaagcatgtgacaaagttttcagtcgcaaatcacaccttaaaagacataggataattcatactggagagaaaccttacaagtgtaatgagtgtggcaaagcctttagtgaccggtcaacacttattcaccatcaggcaattcatggtatagggaaatttgat

SEQ ID NO: 4770 - DNA, 2709 bp, Homo sapiens
  source 1..2709: mol_type = genomic DNA
atgttacgtgaggaagcagctcagaagaggaaaggaaaggagtcaggcatggctcttcctcagggacgcttgactttcagggatgtggctatagaattctcattggcagagtggaaattcctgaaccctgcacagagggctttgtacagggaagtgatgttggagaactacaggaacctggaggctgtggatatctcttccaaacacatgatgaaggaggtcttgtcaacagggcaaggcaatagagaagtgatccacacagggacattgcaaagacatcaaagttatcacattggagacttttgcttccaggaaattgagaaagaaattcataacattgagtttcagtgtcaagaagatgaaagaaatggccatgaagcacccacgacaaaaataaaaaagttgactggtagcacagaccaacatgatcacaggcatgctggaaacaagcctattaaagatcagcttggatcaagcttttattcacatctgcctgaactccacatatttcagatcaaaggtgaaattgctaatcaacttgagaagtctaccagtgatgcttcctcagtttcaacatcccaaagaatttcctgtaggccccaaatccatatttctaataactatgggaataatcccctgaattcttcattactcccacaaaaacaggaagtacacatgagagaaaaatctttcccatgtaatgagagtggcaaagcctttaattgtagctcactcttaaggaaacaccagataccccatttaggagacaaacaatataaatgtgatgtatgtggcaagctctttaatcacaagcaataccttgcatgccatcgtagatgtcacactggagagaaaccttacaagtgtaaagagtgtggaaagtccttcagttacaagtcatcccttacatgccatcatagacttcatactggagtaaaaccttacaagtgtaatgagtgtggcaaggtctttcgtcaaaattcagcccttgtaattcataaggcaattcatactggagagaaaccttacaagtgtaatgaatgtggcaaggcttttaatcaacaatcacacctttcacgccatcaaagacttcatactggagtgaaaccttacaaatgtaagatttgtgagaaggcttttgcgtgtcattcctatctggcaaaccatactagaattcatagtggagagaaaacatacaagtgtaatgagtgtggtaaggcttttaatcatcaatcaagccttgcacgtcatcatatacttcatactggagagaaaccttacaaatgtgaagaatgtgacaaagttttcagtcagaaatcaacccttgagagacataagagaattcatactggagagaaaccatacaaatgtaaggtttgtgatacagctttcacgtgtaattcacagctggcacgacatagaagaattcacactggagagaaaacttacaagtgtaatgagtgtcgcaagaccttcagccgcaggtcatcccttctatgccatcgtagacttcatagtggtgaaaaaccttacaagtgtaatcagtgtggcaataccttccgtcaccgggcatcccttgtataccatcgtagacttcacactctagagaaatcttacaaatgtacggtttgtaacaaggttttcatgcgtaattcagtcctggctgtacatactagaattcacactgcaaagaaaccttacaagtgtaatgaatgtgggaaagcttttaatcaacaatcacatctttcacgtcatcgtagacttcatactggagagaaaccttacaaatgtgaagcatgtgacaaagtttttggtcagaaatcagctcttgagtcacataagagaattcatactggagagaaaccatacagatgtcaggtttgtgacacagctttcacgtggaattcacagctggcacgacatacaagaattcacactggagaaaaaacttacaagtgtaatgagtgtgggaagaccttcagttacaagtcatcacttgtatggcatcgtagacttcatggtggagagaaatcttacaaatgtaaggtttgtgacaaggctttcgtgtgtcgttcctatgtggcaaaacatactagaattcacagtggaatgaaaccttacaagtgtaatgagtgcagcaagaccttcagtaacaggtcatcccttgtatgccatcgtagaattcatagtggtgagaaaccttacaagtgtagtgagtgcagcaagacgttcagtcagaaggcaacccttctatgccatcgtagacttcatagtggtgagaaaccttacaagtgtaacgactgtggcaataccttccgtcactggtcatcccttgtataccatcgtagacttcatactggagagaaatcttacaaatgtacggtttgtgacaaggctttcgtgcgtaattcatacctggcaagacatattagaattcacactgcagagaaaccttacaagtgtaatgaatgtggaaaggcttttaatgaacaatcacacctttcacgtcatcatagaattcatactggagagaaaccttacaaatgtgaagcatgtgacaaagttttcagtcgcaaatcacaccttaaaagacataggataattcatactggagagaaaccttacaagtgtaatgagtgtggcaaagcctttagtgaccggtcaacacttattcaccatcaggcaattcatggtatagggaaatttgat

SEQ ID NO: 4771 - DNA, 2982 bp, Homo sapiens
  source 1..2982: mol_type = genomic DNA
atgcggcggcgcccgccgagccggggcggacgcggggcggcccgggcccgggagacgcgccggcagccccggcaccgcagcggtcgcaggatggccgaggctatcagctgtactctgaactgtagttgccaaagtttcaaacccgggaaaataaaccaccgtcagtgtgaccaatgcaagcatggatgggtggcccacgctctaagtaagctaaggatcccccccatgtatccaacaagccaggtggagattgtccagtccaatgtagtgtttgatattagcagcctcatgctctatgggacccaggccatccccgttcgcctaaaaatcctactggaccggctcttcagtgtgttgaagcaagatgaggttctccagatcctccatgccttggactggacacttcaggattatatccgtggatacgtactgcaggatgcatcaggaaaggtgttggatcactggagcatcatgaccagtgaggaagaagtggccaccttgcagcagttccttcgttttggagagaccaaatctatagttgaactcatggcaattcaagagaaagaagagcaatccatcatcataccaccttccacagcaaatgtagatatcagggctttcatcgagagctgcagtcacaggagttctagcctccccactcctgtggacaaaggaaaccccagcagtatacacccctttgagaacctcataagcaacatgactttcatgctgcctttccagttcttcaaccctctgcctcctgcactgatagggtcattgcccgaacaatatatgttggagcagggtcatgaccaaagtcaggaccccaaacaggaagtccatgggcccttccctgacagcagcttcttaacttccagttccacaccatttcaggttgaaaaagatcagtgtttaaactgtccggatgctattactaaaaaagaagacagcacccatttaagtgactccagctcatacaacattgtcactaagtttgaaaggacacagttatcccctgaggccaaagtgaagcctgagaggaatagccttggtacaaagaagggccgggtgttctgcactgcatgtgagaagaccttctatgacaaaggcaccctcaaaatccactacaatgccgtccacttgaagatcaagcataagtgcaccatcgaagggtgtaacatggtgttcagctccctaaggagccggaatcgccatagcgccaaccccaaccctcggctgcacatgccaatgaacagaaataaccgggacaaagacctcaggaacagcctgaacctggccagctctgagaactacaagtgcccaggtttcacagtgacgtccccagactgtaggcctcctcccagctaccctggttcaggagaggattccaaaggccaaccagccttcccaaacattgggcaaaatggtgtgctttttcccaacctaaagacagtccagccagtccttcctttctaccgcagtccagccacgcctgccgaggtagcaaacacgcctgggatactcccttccctcccgctgttgtcctcttcaatcccagaacagctcatttcaaacgaaatgccatttgatgcccttcccaagaagaaatccaggaagtccagtatgcctatcaaaatagagaaagaagctgtggaaatagctaatgagaaaagacacaacctcagctcagatgaagacatgcccctacaggtggtcagtgaagatgagcaggaggcctgcagtcctcagtcacacagagtatctgaggagcagcatgtacagtcaggaggcttagggaagcctttccctgaaggggagaggccctgccatcgtgaatcagtaattgagtccagtggagccatcagccaaacccctgagcaggccacacacaattcagagagggagactgagcagacaccagcattgatcatggtgccaagggaggtcgaggatggtggccatgaacactacttcacacctgggatggaaccccaagttcctttttctgactacatggaactgcagcagcgcctgctggctgggggactcttcagtgctttgtccaacaggggaatggcttttccttgtcttgaagattctaaagaactggagcacgtgggtcagcatgcattagcaaggcagatagaagaaaatcgcttccagtgtgacatctgcaagaagacctttaaaaatgcttgtagtgtgaaaattcatcacaagaatatgcatgtcaaagaaatgcacacatgcacagtggagggctgtaatgctacctttccctcccgcaggagcagagacagacacagctcaaacctaaacctccaccaaaaagcattgagccaggaagcattggagagtagtgaagatcatttccgtgcagcttaccttctgaaagatgtggctaaggaagcctatcaggatgtggcttttacacagcaagcctcccagacatctgtcatcttcaaaggaacaagtcgaatgggcagtctggtttacccaataacgcaagtccacagtgccagcctggagagctacaactctggccccttgagcgagggcaccatcctggatttgagcactacctcgagcatgaagtcagagagtagcagccattcttcctgggactctgacggggtgagtgaggaaggcactgtgcttatggaggacagtgatgggaactgtgaagggtcgagccttgtccctggggaagatgagtaccccatctgtgtcctgatggagaaggctgaccagagccttgctagcctgccttctgggttgcccataacctgtcatctctgccaaaagacatacagtaacaaagggacctttagggcccactacaaaactgtgcacctccggcagctccacaaatgcaaagtaccaggctgcaacaccatgttttcgtctgttcgcagtcgaaacagacacagccagaatcccaacctgcacaaaagcctggcctcatctccaagtcacctccag

SEQ ID NO: 4772 - DNA, 2961 bp, Homo sapiens
  source 1..2961: mol_type = genomic DNA
atgcggtgtagaaacatgttcttctcatttaaggcatctctttgtggctgcggggctgccaccgctccgagtctgacagctatcagctgtactctgaactgtagttgccaaagtttcaaacccgggaaaataaaccaccgtcagtgtgaccaatgcaagcatggatgggtggcccacgctctaagtaagctaaggatcccccccatgtatccaacaagccaggtggagattgtccagtccaatgtagtgtttgatattagcagcctcatgctctatgggacccaggccatccccgttcgcctaaaaatcctactggaccggctcttcagtgtgttgaagcaagatgaggttctccagatcctccatgccttggactggacacttcaggattatatccgtggatacgtactgcaggatgcatcaggaaaggtgttggatcactggagcatcatgaccagtgaggaagaagtggccaccttgcagcagttccttcgttttggagagaccaaatctatagttgaactcatggcaattcaagagaaagaagagcaatccatcatcataccaccttccacagcaaatgtagatatcagggctttcatcgagagctgcagtcacaggagttctagcctccccactcctgtggacaaaggaaaccccagcagtatacacccctttgagaacctcataagcaacatgactttcatgctgcctttccagttcttcaaccctctgcctcctgcactgatagggtcattgcccgaacaatatatgttggagcagggtcatgaccaaagtcaggaccccaaacaggaagtccatgggcccttccctgacagcagcttcttaacttccagttccacaccatttcaggttgaaaaagatcagtgtttaaactgtccggatgctattactaaaaaagaagacagcacccatttaagtgactccagctcatacaacattgtcactaagtttgaaaggacacagttatcccctgaggccaaagtgaagcctgagaggaatagccttggtacaaagaagggccgggtgttctgcactgcatgtgagaagaccttctatgacaaaggcaccctcaaaatccactacaatgccgtccacttgaagatcaagcataagtgcaccatcgaagggtgtaacatggtgttcagctccctaaggagccggaatcgccatagcgccaaccccaaccctcggctgcacatgccaatgaacagaaataaccgggacaaagacctcaggaacagcctgaacctggccagctctgagaactacaagtgcccaggtttcacagtgacgtccccagactgtaggcctcctcccagctaccctggttcaggagaggattccaaaggccaaccagccttcccaaacattgggcaaaatggtgtgctttttcccaacctaaagacagtccagccagtccttcctttctaccgcagtccagccacgcctgccgaggtagcaaacacgcctgggatactcccttccctcccgctgttgtcctcttcaatcccagaacagctcatttcaaacgaaatgccatttgatgcccttcccaagaagaaatccaggaagtccagtatgcctatcaaaatagagaaagaagctgtggaaatagctaatgagaaaagacacaacctcagctcagatgaagacatgcccctacaggtggtcagtgaagatgagcaggaggcctgcagtcctcagtcacacagagtatctgaggagcagcatgtacagtcaggaggcttagggaagcctttccctgaaggggagaggccctgccatcgtgaatcagtaattgagtccagtggagccatcagccaaacccctgagcaggccacacacaattcagagagggagactgagcagacaccagcattgatcatggtgccaagggaggtcgaggatggtggccatgaacactacttcacacctgggatggaaccccaagttcctttttctgactacatggaactgcagcagcgcctgctggctgggggactcttcagtgctttgtccaacaggggaatggcttttccttgtcttgaagattctaaagaactggagcacgtgggtcagcatgcattagcaaggcagatagaagaaaatcgcttccagtgtgacatctgcaagaagacctttaaaaatgcttgtagtgtgaaaattcatcacaagaatatgcatgtcaaagaaatgcacacatgcacagtggagggctgtaatgctacctttccctcccgcaggagcagagacagacacagctcaaacctaaacctccaccaaaaagcattgagccaggaagcattggagagtagtgaagatcatttccgtgcagcttaccttctgaaagatgtggctaaggaagcctatcaggatgtggcttttacacagcaagcctcccagacatctgtcatcttcaaaggaacaagtcgaatgggcagtctggtttacccaataacgcaagtccacagtgccagcctggagagctacaactctggccccttgagcgagggcaccatcctggatttgagcactacctcgagcatgaagtcagagagtagcagccattcttcctgggactctgacggggtgagtgaggaaggcactgtgcttatggaggacagtgatgggaactgtgaagggtcgagccttgtccctggggaagatgagtaccccatctgtgtcctgatggagaaggctgaccagagccttgctagcctgccttctgggttgcccataacctgtcatctctgccaaaagacatacagtaacaaagggacctttagggcccactacaaaactgtgcacctccggcagctccacaaatgcaaagtaccaggctgcaacaccatgttttcgtctgttcgcagtcgaaacagacacagccagaatcccaacctgcacaaaagcctggcctcatctccaagtcacctccag

SEQ ID NO: 4773 - DNA, 2175 bp, Homo sapiens
  source 1..2175: mol_type = genomic DNA
atggaacaatctaatgattcattaagagtcaaccataatgacggtgaagagtcaaaaaccagtgctcaagtatttgagcatctaatctgtatggactccagggattcttcctttggacaaaatgattctcctacagttttgcccatcactactcgtgaagcaaataattcactcatatcacagaatataccagggcccctgactcagacacagactctttctgcagagcaattccatctagtggaccaaaatgggcaggctattcaatatgaacttcagtcattgggggaatccaatgcacaaatgatgatcgttgccagcccaacagaaaatggacaggtacttcgtgtaattccacctacccagacaggaatggcacaagtgattatacctcaggggcaacttgtggatgtgaatagtcctcgggatgtccctgaagagaaacccagtaacagaaacttaccaactgtaagagtggatactctagcagacaataccagcaattacattcttcatcctcaaacatccttcccattgcccaaaaagtcagtgaccggaatgctggaagaaccccttctggggcctcttcagccactttcttctaatacacctatatgggcctgccgtcttaggagctgtgagaaaattggagattcataccgtggctactgtgtaagtgagactgaattagaaagtgtcctaacatttcacaagcagcaaacacagagtgtttgggggacccgtcagtctccaagcccagccaagcctgctacacgcttgatgtggaaatcccagtatgttccatatgatggaatcccatttgttaatgcagggagtagagctgtggtaatggagtgtcagtatgggccaagaagaaaaggtttccagttaaaaaaagtcagtgagcaggaaagcaggtcttgtcagctctacaaagccacttgtccagctcggatttacattaaaaaggtacagaagtttcctgaatatagagttcctacagaccccaaaattgacaagaaaattatcagaatggagcaggagaaagcttttaacatgctaaagaagaacttggtagatgctggtggtgttcttaggtggtatgtacagttacctacacagcaagctcatcagtatcatgaattagagactccctgcctcactttgtcaccttctccttttcctgtgtcttctcttgaagaagaggaaactgcagttagagatgagaattgtgcattaccctcacgtttacatcctcaagtagcacataagattcaagaattagtatcacagggaatagaacaagtgtatgcagtaaggaaacagctaagaaaatttgtggaaagggaactgttcaaacccgatgaggtacctgaaagacataatttatctttttttccaactgtaaatgatataaaaaatcacatccatgaggtacagaaatccttgagaaatggagatacggtatataactcagagattattccagcaacgcttcaatggactacagacagtgggaatattctcaaagagaccatgacagttacatttgcagaaggaaattcaccaggagaatcaattaccaccaaagtggaaacaaatcagaccaggggttctttgtctcctgagccaacccacttgctctcctcactctcctcatttcagcccaaaatatttacacaactacagggtttgcagttacaaccaaggtacacctctcctgatgaatcaccagctgtggtatcagtaaataaccagccgtcctctagtccttcaggacttctggatacaataggaagtgctgtaatgaataataattctctactgcttggtcaaagtcatagccttcaaagagatacatgcttaacccaaaacaatagtactgcctccaccatgggtaaccttccagaaccagatcaaaatctagttgcaatggacgagctggtagaagttggagatgttgaggatacagggaatctggaaggaactgttcatcggattctgttgggagatgtgcagactattccaatacagattatagacaaccactcagctcttattgaagaaaatccagaaagtaccatttctgtgagccaagttaaacaagaacccaaagaaccagcattgtctatggaagcaaaaaaaactgtggactataagaaattatctgctaca

SEQ ID NO: 4774 - DNA, 1869 bp, Homo sapiens
  source 1..1869: mol_type = genomic DNA
atgatcgttgccagcccaacagaaaatggacaggtacttcgtgtaattccacctacccagacaggaatggcacaagtgattatacctcaggggcaacttgtggatgtgaatagtcctcgggatgtccctgaagagaaacccagtaacagaaacttaccaactgtaagagtggatactctagcagacaataccagcaattacattcttcatcctcaaacatccttcccattgcccaaaaagtcagtgaccggaatgctggaagaaccccttctggggcctcttcagccactttcttctaatacacctatatgggcctgccgtcttaggagctgtgagaaaattggagattcataccgtggctactgtgtaagtgagactgaattagaaagtgtcctaacatttcacaagcagcaaacacagagtgtttgggggacccgtcagtctccaagcccagccaagcctgctacacgcttgatgtggaaatcccagtatgttccatatgatggaatcccatttgttaatgcagggagtagagctgtggtaatggagtgtcagtatgggccaagaagaaaaggtttccagttaaaaaaagtcagtgagcaggaaagcaggtcttgtcagctctacaaagccacttgtccagctcggatttacattaaaaaggtacagaagtttcctgaatatagagttcctacagaccccaaaattgacaagaaaattatcagaatggagcaggagaaagcttttaacatgctaaagaagaacttggtagatgctggtggtgttcttaggtggtatgtacagttacctacacagcaagctcatcagtatcatgaattagagactccctgcctcactttgtcaccttctccttttcctgtgtcttctcttgaagaagaggaaactgcagttagagatgagaattgtgcattaccctcacgtttacatcctcaagtagcacataagattcaagaattagtatcacagggaatagaacaagtgtatgcagtaaggaaacagctaagaaaatttgtggaaagggaactgttcaaacccgatgaggtacctgaaagacataatttatctttttttccaactgtaaatgatataaaaaatcacatccatgaggtacagaaatccttgagaaatggagatacggtatataactcagagattattccagcaacgcttcaatggactacagacagtgggaatattctcaaagagaccatgacagttacatttgcagaaggaaattcaccaggagaatcaattaccaccaaagtggaaacaaatcagaccaggggttctttgtctcctgagccaacccacttgctctcctcactctcctcatttcagcccaaaatatttacacaactacagggtttgcagttacaaccaaggtacacctctcctgatgaatcaccagctgtggtatcagtaaataaccagccgtcctctagtccttcaggacttctggatacaataggaagtgctgtaatgaataataattctctactgcttggtcaaagtcatagccttcaaagagatacatgcttaacccaaaacaatagtactgcctccaccatgggtaaccttccagaaccagatcaaaatctagttgcaatggacgagctggtagaagttggagatgttgaggatacagggaatctggaaggaactgttcatcggattctgttgggagatgtgcagactattccaatacagattatagacaaccactcagctcttattgaagaaaatccagaaagtaccatttctgtgagccaagttaaacaagaacccaaagaaccagcattgtctatggaagcaaaaaaaactgtggactataagaaattatctgctaca

SEQ ID NO: 4775 - DNA, 1947 bp, Homo sapiens
  source 1..1947: mol_type = genomic DNA
atggaacaatctaatgattcattaagagtcaaccataatgacggtgaagagtcaaaaaccagtgctcaagtatttgagatgatcgttgccagcccaacagaaaatggacaggtacttcgtgtaattccacctacccagacaggaatggcacaagtgattatacctcaggggcaacttgtggatgtgaatagtcctcgggatgtccctgaagagaaacccagtaacagaaacttaccaactgtaagagtggatactctagcagacaataccagcaattacattcttcatcctcaaacatccttcccattgcccaaaaagtcagtgaccggaatgctggaagaaccccttctggggcctcttcagccactttcttctaatacacctatatgggcctgccgtcttaggagctgtgagaaaattggagattcataccgtggctactgtgtaagtgagactgaattagaaagtgtcctaacatttcacaagcagcaaacacagagtgtttgggggacccgtcagtctccaagcccagccaagcctgctacacgcttgatgtggaaatcccagtatgttccatatgatggaatcccatttgttaatgcagggagtagagctgtggtaatggagtgtcagtatgggccaagaagaaaaggtttccagttaaaaaaagtcagtgagcaggaaagcaggtcttgtcagctctacaaagccacttgtccagctcggatttacattaaaaaggtacagaagtttcctgaatatagagttcctacagaccccaaaattgacaagaaaattatcagaatggagcaggagaaagcttttaacatgctaaagaagaacttggtagatgctggtggtgttcttaggtggtatgtacagttacctacacagcaagctcatcagtatcatgaattagagactccctgcctcactttgtcaccttctccttttcctgtgtcttctcttgaagaagaggaaactgcagttagagatgagaattgtgcattaccctcacgtttacatcctcaagtagcacataagattcaagaattagtatcacagggaatagaacaagtgtatgcagtaaggaaacagctaagaaaatttgtggaaagggaactgttcaaacccgatgaggtacctgaaagacataatttatctttttttccaactgtaaatgatataaaaaatcacatccatgaggtacagaaatccttgagaaatggagatacggtatataactcagagattattccagcaacgcttcaatggactacagacagtgggaatattctcaaagagaccatgacagttacatttgcagaaggaaattcaccaggagaatcaattaccaccaaagtggaaacaaatcagaccaggggttctttgtctcctgagccaacccacttgctctcctcactctcctcatttcagcccaaaatatttacacaactacagggtttgcagttacaaccaaggtacacctctcctgatgaatcaccagctgtggtatcagtaaataaccagccgtcctctagtccttcaggacttctggatacaataggaagtgctgtaatgaataataattctctactgcttggtcaaagtcatagccttcaaagagatacatgcttaacccaaaacaatagtactgcctccaccatgggtaaccttccagaaccagatcaaaatctagttgcaatggacgagctggtagaagttggagatgttgaggatacagggaatctggaaggaactgttcatcggattctgttgggagatgtgcagactattccaatacagattatagacaaccactcagctcttattgaagaaaatccagaaagtaccatttctgtgagccaagttaaacaagaacccaaagaaccagcattgtctatggaagcaaaaaaaactgtggactataagaaattatctgctaca

SEQ ID NO: 4776 - DNA, 2424 bp, Homo sapiens
  source 1..2424: mol_type = genomic DNA
atgaccagccccgcggccgctcaaagccgggagatcgactgtttgagcccggaagcgcagaagctggcggaagcccggctcgctgcaaaacgggcggcccgcgcggaggctcgcgagatccgcatgaaggagctggagcggcagcagaaggaggaagacagtgagcgctactctcgtagatccagaagaaacacatcggcttctgatgaagacgagcgcatgtcagtgggtagtcgtggaagcctgagggtagaagagagaccagaaaaagattttactgagaaggggtctcgtaacatgccgggcctgtctgcagccacgctggcctctctgggtgggacttcctctcggagaggcagcggagacacctccatctccatcgacaccgaggcatccatcagggaaatcaaggaactcaatgagttaaaggaccagattcaggatgtagaaggcaaatacatgcagggattgaaagagatgaaggactctctagcagaagttgaagagaaatataagaaggctatggtttccaatgctcagctagacaatgaaaagacaaacttcatgtaccaggttgataccctaaaagatatgttgctggagcttgaagaacagctggctgaatctaggcggcagtacgaagagaaaaacaaagaatttgaaagggaaaaacacgcccacagtatactgcaatttcagtttgctgaagtcaaggaggccctgaagcaaagagaggaaatgctcgagaaacatggaataatcctaaattcagaaatagctaccaatggagagacttccgacaccctcaataatgttggataccaaggtcctaccaagatgacaaaagaagagttaaatgccctcaagtcgacaggggatgggaccctaggaagagccagtgaagtggaggtgaaaaatgaaatcgtggcgaatgtggggaaaagagaaatcttgcacaatactgagaaagaacaacacacagaggacacagtgaaggactgtgtggacatagaggtattccctgctggtgagaataccgaggaccagaaatcctctgaagacactgccccattcctaggaaccttagcaggtgctacctatgaggaacaggttcaaagccaaattcttgagagcagttctctccctgaaaacacagtacaggttgagtcaaatgaggtcatgggtgcaccagatgacaggaccagaactccccttgagccatccaactgttggagtgacttagatggtgggaaccacacagagaatgtgggagaggcagcagtgactcaggttgaagagcaggcaggcacagtggcctcgtgtcctttagggcatagtgatgacacagtttatcatgatgacaaatgtatggtagaggtcccccaagagttagagacaagcacagggcatagtttagagaaagaattcaccaaccaggaagcagctgagcccaaggaggttccagcgcacagtacagaagtaggtagggatcacaacgaagaagagggtgaagaaacaggattaagggacgagaaaccaatcaagacagaagttcctggttctccagcaggaactgagggcaactgtcaggaagcgacaggtccaagtacagtagacactcaaaatgaacccttagatatgaaagagcccgatgaagaaaagagtgaccaacagggagaggcattggactcatcgcagaagaagacaaagaacaagaaaaagaaaaacaagaagaaaaaatccccagtacccgtagaaacccttaaagatgttaaaaaagagttaacgtatcagaacacagatttaagtgaaattaaggaagaagagcaggtaaagtctactgacagaaagtcagcagtggaagcccaaaacgaggtgactgaaaatccaaaacagaaaattgcagcagaaagcagtgaaaatgttgattgtccggagaatcctaaaattaagttggatggaaaacttgaccaagaaggtgatgatgtacaaacagcagctgaggaggtactagctgatggagacacattagattttgaggatgacaccgttcaatcatcaggcccgagggctggtggtgaagaattagatgaaggtgttgcaaaagataatgctaaaatagatggtgccactcaaagcagtcctgcagaaccaaagagcgaagacgcagatcgctgcaccctgcccgaacatgaaagtccctcacaggacattagtgatgcctgtgaagcagaaagtacagagaggtgtgagatgtcagaacatccaagtcagaccgtcaggaaagctttagacagcaatagcctagagaacgatgacttgtcggcaccaggaagagagccagggcacttcaatccagaaagcagagaagataccagaggagggaatgagaagggcaaaagcaaagaagactgtaccatgtcc

SEQ ID NO: 4777 - DNA, 1920 bp, Homo sapiens
  source 1..1920: mol_type = genomic DNA
atggacatgggcacccagggatcggggcgcaagcggctccccaaccgggagcggctcacggcggaggacgacgcgctcaaccagatcgcgcgggaggcggaagcccggctcgctgcaaaacgggcggcccgcgcggaggctcgcgagatccgcatgaaggagctggagcggcagcagaaggagatctatcaggtccaaaagaaatattatgggctggatacaaaatggggtgacatcgagcagtggatggaagacagtgagcgctactctcgtagatccagaagaaacacatcggcttctgatgaagacgagcgcatgtcagtgggtagtcgtggaagcctgaggtcgcagcctgacttggagtatgggggtccttacgcctggacaaatggttatgatggagaattgtatggatcacagtccctgaatagaagatctggcaggccctcctgtctgtacagcgctgcccggccttcggggagttaccgggcgtctgtgttggatgaaggcagcttcggtgggacccgacggggcagcacctccggctcccgtgctccctcggagtacagcggccacctcaactccagctcccgcgcctcctccagggccagctcggcccgggccagccctgtggtagaagagagaccagaaaaagattttactgagaaggggtctcgtaacatgccgggcctgtctgcagccacgctggcctctctgggtgggacttcctctcggagaggcagcggagacacctccatctccatcgacaccgaggcatccatcagggaaatcaaggaactcaatgagttaaaggaccagattcaggatgtagaaggcaaatacatgcagggattgaaagagatgaaggactctctagcagaagttgaagagaaatataagaaggctatggtttccaatgctcagctagacaatgaaaagacaaacttcatgtaccaggttgataccctaaaagatatgttgctggagcttgaagaacagctggctgaatctaggcggcagtacgaagagaaaaacaaagaatttgaaagggaaaaacacgcccacagtatactgcaatttcagtttgctgaagtcaaggaggccctgaagcaaagagaggaaatgctcgaggaaatccgacagctacagcagaaacaggcgagttctatcagggagatttctgatcttcaggaaacaatagagtggaaagacaaaaagataggggcattagagaggcagaaagagttctttgattccgtaaggagtgaacgggatgatcttagagaagaagtagtcatgctgaaagaggaattaaagaaacatggaataatcctaaattcagaaatagctaccaatggagagacttccgacaccctcaataatgttggataccaaggtcctaccaagatgacaaaagaagagttaaatgccctcaagtcgacaggggatgggaccctagatattaggttgaaaaagctggttgatgaacgggaatgcttattggaacagattaagaaactcaaagggcagctggaggagagacagaagattggcaaactagacaatcttcgatctgaagatgatgtcttggaaaacgggacagacatgcatgtaatggacctacaaagggatgccaacagacagatcagcgacctcaaatttaaacttgcaaaatctgagcaagagataactgcattagaacaaaatgtaataaggttagagagtcaagtatcacgttacaaatcagcggctgaaaatgcagaaaaaatagaagatgaacttaaggcagaaaaacggaaactccaaagagagctccgctctgcattggataaaacagaagagctcgaggtgagcaacggccacttagtgaagcgtctggaaaaaatgaaagcaaatcggagtgcactcttgtcccagcag

SEQ ID NO: 4778 - DNA, 2256 bp, Homo sapiens
  source 1..2256: mol_type = genomic DNA
atgaccagccccgcggccgctcaaagccgggagatcgactgtttgagcccggaagcgcagaagctggcggaagcccggctcgctgcaaaacgggcggcccgcgcggaggctcgcgagatccgcatgaaggagctggagcggcagcagaaggaggtagaagagagaccagaaaaagattttactgagaaggggtctcgtaacatgccgggcctgtctgcagccacgctggcctctctgggtgggacttcctctcggagaggcagcggagacacctccatctccatcgacaccgaggcatccatcagggaaatcaaggactctctagcagaagttgaagagaaatataagaaggctatggtttccaatgctcagctagacaatgaaaagacaaacttcatgtaccaggttgataccctaaaagatatgttgctggagcttgaagaacagctggctgaatctaggcggcagtacgaagagaaaaacaaagaatttgaaagggaaaaacacgcccacagtatactgcaatttcagtttgctgaagtcaaggaggccctgaagcaaagagaggaaatgctcgagaaacatggaataatcctaaattcagaaatagctaccaatggagagacttccgacaccctcaataatgttggataccaaggtcctaccaagatgacaaaagaagagttaaatgccctcaagtcgacaggggatgggaccctaggaagagccagtgaagtggaggtgaaaaatgaaatcgtggcgaatgtggggaaaagagaaatcttgcacaatactgagaaagaacaacacacagaggacacagtgaaggactgtgtggacatagaggtattccctgctggtgagaataccgaggaccagaaatcctctgaagacactgccccattcctaggaaccttagcaggtgctacctatgaggaacaggttcaaagccaaattcttgagagcagttctctccctgaaaacacagtacaggttgagtcaaatgaggtcatgggtgcaccagatgacaggaccagaactccccttgagccatccaactgttggagtgacttagatggtgggaaccacacagagaatgtgggagaggcagcagtgactcaggttgaagagcaggcaggcacagtggcctcgtgtcctttagggcatagtgatgacacagtttatcatgatgacaaatgtatggtagaggtcccccaagagttagagacaagcacagggcatagtttagagaaagaattcaccaaccaggaagcagctgagcccaaggaggttccagcgcacagtacagaagtaggtagggatcacaacgaagaagagggtgaagaaacaggattaagggacgagaaaccaatcaagacagaagttcctggttctccagcaggaactgagggcaactgtcaggaagcgacaggtccaagtacagtagacactcaaaatgaacccttagatatgaaagagcccgatgaagaaaagagtgaccaacagggagaggcattggactcatcgcagaagaagacaaagaacaagaaaaagaaaaacaagaagaaaaaatccccagtacccgtagaaacccttaaagatgttaaaaaagagttaacgtatcagaacacagatttaagtgaaattaaggaagaagagcaggtaaagtctactgacagaaagtcagcagtggaagcccaaaacgaggtgactgaaaatccaaaacagaaaattgcagcagaaagcagtgaaaatgttgattgtccggagaatcctaaaattaagttggatggaaaacttgaccaagaaggtgatgatgtacaaacagcagctgaggaggtactagctgatggagacacattagattttgaggatgacaccgttcaatcatcaggcccgagggctggtggtgaagaattagatgaaggtgttgcaaaagataatgctaaaatagatggtgccactcaaagcagtcctgcagaaccaaagagcgaagacgcagatcgctgcaccctgcccgaacatgaaagtccctcacaggacattagtgatgcctgtgaagcagaaagtacagagaggtgtgagatgtcagaacatccaagtcagaccgtcaggaaagctttagacagcaatagcctagagaacgatgacttgtcggcaccaggaagagagccagggcacttcaatccagaaagcagagaagataccagaggagggaatgagaagggcaaaagcaaagaagactgtaccatgtcc

SEQ ID NO: 4779 - DNA, 2352 bp, Homo sapiens
  source 1..2352: mol_type = genomic DNA
atgaccagccccgcggccgctcaaagccgggagatcgactgtttgagcccggaagcgcagaagctggcggaagcccggctcgctgcaaaacgggcggcccgcgcggaggctcgcgagatccgcatgaaggagctggagcggcagcagaaggaggaagacagtgagcgctactctcgtagatccagaagaaacacatcggcttctgatgaagacgagcgcatgtcagtgggtagtcgtggaagcctgagggtagaagagagaccagaaaaagattttactgagaaggggtctcgtaacatgccgggcctgtctgcagccacgctggcctctctgggtgggacttcctctcggagaggcagcggagacacctccatctccatcgacaccgaggcatccatcagggaaatcaaggactctctagcagaagttgaagagaaatataagaaggctatggtttccaatgctcagctagacaatgaaaagacaaacttcatgtaccaggttgataccctaaaagatatgttgctggagcttgaagaacagctggctgaatctaggcggcagtacgaagagaaaaacaaagaatttgaaagggaaaaacacgcccacagtatactgcaatttcagtttgctgaagtcaaggaggccctgaagcaaagagaggaaatgctcgagaaacatggaataatcctaaattcagaaatagctaccaatggagagacttccgacaccctcaataatgttggataccaaggtcctaccaagatgacaaaagaagagttaaatgccctcaagtcgacaggggatgggaccctaggaagagccagtgaagtggaggtgaaaaatgaaatcgtggcgaatgtggggaaaagagaaatcttgcacaatactgagaaagaacaacacacagaggacacagtgaaggactgtgtggacatagaggtattccctgctggtgagaataccgaggaccagaaatcctctgaagacactgccccattcctaggaaccttagcaggtgctacctatgaggaacaggttcaaagccaaattcttgagagcagttctctccctgaaaacacagtacaggttgagtcaaatgaggtcatgggtgcaccagatgacaggaccagaactccccttgagccatccaactgttggagtgacttagatggtgggaaccacacagagaatgtgggagaggcagcagtgactcaggttgaagagcaggcaggcacagtggcctcgtgtcctttagggcatagtgatgacacagtttatcatgatgacaaatgtatggtagaggtcccccaagagttagagacaagcacagggcatagtttagagaaagaattcaccaaccaggaagcagctgagcccaaggaggttccagcgcacagtacagaagtaggtagggatcacaacgaagaagagggtgaagaaacaggattaagggacgagaaaccaatcaagacagaagttcctggttctccagcaggaactgagggcaactgtcaggaagcgacaggtccaagtacagtagacactcaaaatgaacccttagatatgaaagagcccgatgaagaaaagagtgaccaacagggagaggcattggactcatcgcagaagaagacaaagaacaagaaaaagaaaaacaagaagaaaaaatccccagtacccgtagaaacccttaaagatgttaaaaaagagttaacgtatcagaacacagatttaagtgaaattaaggaagaagagcaggtaaagtctactgacagaaagtcagcagtggaagcccaaaacgaggtgactgaaaatccaaaacagaaaattgcagcagaaagcagtgaaaatgttgattgtccggagaatcctaaaattaagttggatggaaaacttgaccaagaaggtgatgatgtacaaacagcagctgaggaggtactagctgatggagacacattagattttgaggatgacaccgttcaatcatcaggcccgagggctggtggtgaagaattagatgaaggtgttgcaaaagataatgctaaaatagatggtgccactcaaagcagtcctgcagaaccaaagagcgaagacgcagatcgctgcaccctgcccgaacatgaaagtccctcacaggacattagtgatgcctgtgaagcagaaagtacagagaggtgtgagatgtcagaacatccaagtcagaccgtcaggaaagctttagacagcaatagcctagagaacgatgacttgtcggcaccaggaagagagccagggcacttcaatccagaaagcagagaagataccagaggagggaatgagaagggcaaaagcaaagaagactgtaccatgtcc

SEQ ID NO: 4780 - DNA, 1215 bp, Homo sapiens
  source 1..1215: mol_type = genomic DNA
atgcttagttcctttccagtggttttgctggaaaccatgtctcattatacagatgaacccagatttaccatagagcagatagatctgcttcagcgacttcggcgtactggaatgactaaacatgaaattctccatgccttggaaactttggaccgtcttgatcaagagcatagtgacaagtttggaagaaggtccagctatggaggaagttcatatgggaatagtactaacaatgtcccagcatcttcctctacagctacagcttccacacagacgcagcattcgggaatgtccccgtcacctagcaacagttatgatacttccccacagccttgcactaccaatcaaaatgggagggagaataatgagcgattatctacatccaatggaaagatgtcaccaactcgctaccatgcaaacagcatgggtcagaggtcatacagttttgaagcctcagaagaggacctagatgtagatgataaagtggaagaattaatgaggagggacagcagtgtgataaaagaggaaatcaaagcctttcttgccaatcggaggatttcccaagcagttgttgcacaggtaacaggtatcagtcagagccggatctctcattggctgttgcagcagggatcagacctgagtgaacagaagaaaagagcattttaccgatggtatcaacttgagaagacaaaccctggcgctacactaagtatgagaccagcccccattccaatagaggaccctgaatggagacaaacgcctcccccagtctctgccacatctggtactttccgactgcgacgagggagtcgatttacctggagaaaggagtgcctggctgttatggaaagttacttcaatgagaatcaatacccagatgaagcaaagagggaagaaattgcaaacgcttgcaatgcagttatacagaagccaggcaaaaagctgtcagatctggaaagagttacctccctgaaagtatataattggtttgctaacagaaggaaggagatcaagaggagagccaatattgcagcaatcctggagagtcatgggatagatgtgcagagtccaggaggccactcaaacagtgatgatgtcgacgggaatgactactctgagcaggatacttggcaagtacgcaatggggaggaggaggagggaagaagttcagagggaggcagagaagcagagaaggtagaagaagagaggaggatc

SEQ ID NO: 4781 - DNA, 1260 bp, Homo sapiens
  source 1..1260: mol_type = genomic DNA
atgcttagttcctttccagtggttttgctggaaaccatgtctcattatacagatgaacccagatttaccatagagcagatagatctgcttcagcgacttcggcgtactggaatgactaaacatgaaattctccatgccttggaaactttggaccgtcttgatcaagagcatagtgacaagtttggaagaaggtccagctatggaggaagttcatatgggaatagtactaacaatgtcccagcatcttcctctacagctacagcttccacacagacgcagcattcgggaatgtccccgtcacctagcaacagttatgatacttccccacagccttgcactaccaatcaaaatgggagggagaataatgagcgattatctacatccaatggaaagatgtcaccaactcgctaccatgcaaacagcatgggtcagaggtcatacagttttgaagcctcagaagaggacctagatgtagatgataaagtggaagaattaatgaggagggacagcagtgtgataaaagaggaaatcaaagcctttcttgccaatcggaggatttcccaagcagttgttgcacaggtaacaggtatcagtcagagccggatctctcattggctgttgcagcagggatcagacctgagtgaacagaagaaaagagcattttaccgatggtatcaacttgagaagacaaaccctggcgctacactaagtatgagaccagcccccattccaatagaggaccctgaatggagacaaacgcctcccccagtctctgccacatctggtactttccgactgcgacgagggagtcgatttacctggagaaaggagtgcctggctgttatggaaagttacttcaatgagaatcaatacccagatgaagcaaagagggaagaaattgcaaacgcttgcaatgcagttatacagaagccaggcaaaaagctgtcagatctggaaagagttacctccctgaaagtatataattggtttgctaacagaaggaaggagatcaagaggagagccaatattgaagcagcaatcctggagagtcatgggatagatgtgcagagtccaggaggccactcaaacagtgatgatgtcgacgggaatgactactctgagcaggatgacagtacgagccatagtgaccaccaagaccccatctcattagctgtggaaatggcagcagtcaaccacactatcttggcattggcccgacaaggagccaacgaaatcaagacagaggccctggatgatgac

SEQ ID NO: 4782 - DNA, 1329 bp, Homo sapiens
  source 1..1329: mol_type = genomic DNA
atgcttagttcctttccagtggttttgctggaaaccatgtctcattatacagatgaacccagatttaccatagagcagatagatctgcttcagcgacttcggcgtactggaatgactaaacatgaaattctccatgccttggaaactttggaccgtcttgatcaagagcatagtgacaagtttggaagaaggtccagctatggaggaagttcatatgggaatagtactaacaatgtcccagcatcttcctctacagctacagcttccacacagacgcagcattcgggaatgtccccgtcacctagcaacagttatgatacttccccacagccttgcactaccaatcaaaatgggagggagaataatgagcgattatctacatccaatggaaagatgtcaccaactcgctaccatgcaaacagcatgggtcagaggtcatacagttttgaagcctcagaagaggacctagatgtagatgataaagtggaagaattaatgaggagggacagcagtgtgataaaagaggaaatcaaagcctttcttgccaatcggaggatttcccaagcagttgttgcacaggtaacaggtatcagtcagagccggatctctcattggctgttgcagcagggatcagacctgagtgaacagaagaaaagagcattttaccgatggtatcaacttgagaagacaaaccctggcgctacactaagtatgagaccagcccccattccaatagaggaccctgaatggagacaaacgcctcccccagtctctgccacatctggtactttccgactgcgacgagggagtcgatttacctggagaaaggagtgcctggctgttatggaaagttacttcaatgagaatcaatacccagatgaagcaaagagggaagaaattgcaaacgcttgcaatgcagttatacagaagccaggcaaaaagctgtcagatctggaaagagttacctccctgaaagtatataattggtttgctaacagaaggaaggagatcaagaggagagccaatattgcagcaatcctggagagtcatgggatagatgtgcagagtccaggaggccactcaaacagtgatgatgtcgacgggaatgactactctgagcaggatacttggcaagtacgcaatggggaggaggaggagggaagaagttcagagggaggcagagaagcagagaaggatgacagtacgagccatagtgaccaccaagaccccatctcattagctgtggaaatggcagcagtcaaccacactatcttggcattggcccgacaaggagccaacgaaatcaagacagaggccctggatgatgac

SEQ ID NO: 4783 - DNA, 912 bp, Homo sapiens
  source 1..912: mol_type = genomic DNA
atgcttagttcctttccagtggttttgctggaaaccatgtctcattatacagatgaacccagatttaccatagagcagatagatctgcttcagcgacttcggcgtactggaatgactaaacatgaaattctccatgccttggaaactttggaccgtcttgatcaagagcatagtgacaagtttggaagaaggtccagctatggaggaagttcatatgggaatagtactaacaatgtcccagcatcttcctctacagctacagcttccacacagacgcagcattcgggaatgtccccgtcacctagcaacagttatgatacttccccacagccttgcactaccaatcaaaatgggagggagaataatgagcgattatctacatccaatggaaagatgtcaccaactcgctaccatgcaaacagcatgggtcagaggtcatacagttttgaagcctcagaagaggacctagatgtagatgataaagtggaagaattaatgaggagggacagcagtgtgataaaagaggaaatcaaagcctttcttgccaatcggaggatttcccaagcagttgttgcacaggtaacaggtatcagtcagagccggatctctcattggctgttgcagcagggatcagacctgagtgaacagaagaaaagagcattttaccgatggtatcaacttgagaagacaaaccctggcgctacactaagtatgagaccagcccccattccaatagaggaccctgaatggagacaaacgcctcccccagtctctgccacatctggtactttccgactgcgacgagggagtcgatttacctggagaaaggagtgcctggctgttatggaaaggaacacttggtcccctgagagaaggatggaagaaaataaatggaagttgctttctgcaggg

SEQ ID NO: 4784 - DNA, 690 bp, Homo sapiens
  source 1..690: mol_type = genomic DNA
atgagttcttcgtattatgtgaacgcgctttttagcaaatatacggcgggggcttctctgttccaaaatgccgagccgacttcttgctcctttgctcccaactcacagagaagcggctacggggcgggcgccggcgccttcgcctcgaccgttccgggcttatacaatgtcaacagccccctttatcagagcccctttgcgtccggctacggcctgggcgccgacgcctacggcaacctgccctgcgcctcctacgaccaaaacatccccgggctctgcagtgacctcgccaaaggcgcctgcgacaagacggacgagggcgcgctgcatggcgcggctgaggccaatttccgcatctacccctggatgcggtcttcaggacctgacaggaagcggggccgccagacctacacgcgctaccagacgctggagctggagaaggagttccacttcaaccgctacctgacgcggcgccgccgcattgaaatcgcccacgcgctctgcctcaccgagcgccagattaagatctggttccagaaccgccgcatgaagtggaagaaagagcataaggacgaaggtccgactgccgccgcagctcccgagggcgccgtgccctctgccgccgccactgctgccgcggacaaggccgacgaggaggacgatgatgaagaagaggaagacgaggaggaa

SEQ ID NO: 4785 - DNA, 720 bp, Homo sapiens
  source 1..720: mol_type = genomic DNA
atggaagattataccaaaatagagaaaattggagaaggtacctatggagttgtgtataagggtagacacaaaactacaggtcaagtggtagccatgaaaaaaatcagactagaaagtgaagaggaaggggttcctagtactgcaattcgggaaatttctctattaaaggaacttcgtcatccaaatatagtcagtcttcaggatgtgcttatgcaggattccaggttatatctcatctttgagtttctttccatggatctgaagaaatacttggattctatccctcctggtcagtacatggattcttcacttgttaaggtagtaacactctggtacagatctccagaagtattgctggggtcagctcgttactcaactccagttgacatttggagtataggcaccatatttgctgaactagcaactaagaaaccacttttccatggggattcagaaattgatcaactcttcaggattttcagagctttgggcactcccaataatgaagtgtggccagaagtggaatctttacaggactataagaatacatttcccaaatggaaaccaggaagcctagcatcccatgtcaaaaacttggatgaaaatggcttggatttgctctcgaaaatgttaatctatgatccagccaaacgaatttctggcaaaatggcactgaatcatccatattttaatgatttggacaatcagattaagaagatg

SEQ ID NO: 4786 - DNA, 960 bp, Homo sapiens
  source 1..960: mol_type = genomic DNA
atgaccatgagctcgtttttgataaactccaactacatcgagcccaagttccctcccttcgaggagtacgcgcagcacagcggctcgggcggcgcagacggcggcccgggcgggggccccggctaccagcagcccccagcgcccccgacccagcacctgccgctgcagcagccccagctccctcacgcgggcggcggccgagagcccactgcctcctactacgcgccgcggaccgcccgcgagcccgcctaccctgctgccgcgctgtaccccgcgcatggggccgcggacaccgcctacccctatggctaccgcggcggcgccagccccgggcggccgccccagcccgagcagcccccggcgcaagccaagggcccagcgcacggcctgcatgcgagccacgtcctgcagccccagctgccgccgcccctgcagcctcgcgccgtgcccccagcggccccgcggcgctgcgaggcggcccccgccaccccaggcgtcccggcagggggcagcgcccccgcgtgcccgctgctcttggccgacaagagcccgctgggcctgaagggcaaggagcccgtggtgtacccctggatgaagaagatccatgtcagcgccgttaaccccagttataacggaggggagcctaagcgctctcgaaccgcctacacccggcagcaggtcttggagctggagaaggagttccacttcaatcgatacctgacccggcggcgccgcatcgagatcgcccacacgctctgtttgtctgagcgccaggtcaagatctggtttcagaaccggaggatgaagtggaagaaagaccacaaactgcccaacaccaagatgcgatcctccaattcggcctcggcctctgccggcccaccagggaaagcacaaactcagagcccacacctccatccccacccccacccgagcacctccacacccgttccctcctccata

SEQ ID NO: 4787 - DNA, 1329 bp, Homo sapiens
  source 1..1329: mol_type = genomic DNA
atgcaaaaagcgacctactacgacagctcggcgatctacggtggctacccctaccaggcagccaacgggttcgcttataatgccaatcagcagccgtacccggcgtccgccgctttgggcgccgacggcgagtaccaccgacccgcctgctccctccagtctccctccagcgccgggggccaccccaaggcacacgaactgagtgaggcgtgcctgcgcaccctgagcgccccacctagccagcctccaagcctgggagagccgcccctgcacccgccgccgccccaggccgcgccccctgccccacagccgcctcagcccgcacctcagccccctgcacctacccctgccgcgcccccgcctccctcttctgcctcccctcctcagaatgccagcaacaaccctacccctgccaacgcggccaagagccccctgctcaactcacccacagtggccaaacaaatcttcccctggatgaaagagtctcgacaaaacacaaagcagaaaaccagcagctccagctcaggcgaaagctgcgctggcgacaagagcccgccggggcaggcttcgtccaagcgcgcgcgcacggcctacacgagcgcgcagctggtggagctggagaaagagttccacttcaaccgctacctgtgccggccgcgccgggtggagatggccaatctgctgaacctcactgagcgccagatcaagatctggttccagaatcgccgcatgaagtacaaaaaggatcagaagggcaagggcatgctaacgtcatcggggggccagtctccaagtcgcagccccgtgccccccggagccggtggctatctgaactctatgcattcgctggtcaacagcgtcccgtatgagccccagtcgcccccgcccttctccaagcccccccagggtacctacgggctgccccccgcctcctaccctgcgtccctgcccagctgcgcacccccgccacccccacagaagcgctacacggcggcaggggcgggcgcagggggcacccccgactatgacccgcacgctcatggcctgcagggcaacggcagctatgggaccccacacatacagggaagccccgtcttcgtggggggcagctatgtggagcccatgagcaactccgggccagccctctttggtctaactcacctcccccacgctgcctcgggcgccatggactatgggggtgccgggccgctgggcagcggccaccaccacgggccggggcctggggagccgcaccccacctacacggaccttaccggccaccatccttctcagggaagaattcaggaagcacccaagctcacccacctg

SEQ ID NO: 4788 - DNA, 1128 bp, Homo sapiens
  source 1..1128: mol_type = genomic DNA
atgaattacgaatttgagcgagagattggttttatcaatagccagccgtcgctcgctgagtgcctgacatcttttccccctgtcgctgatacatttcaaagttcatcaatcaagacctcgacgctttcacactcgacactgattcctcctccttttgagcagaccattcccagcctgaaccccggcagtcaccctcgccacggcgctggcggccgccccaagccgagccccgcgggcagccgcggcagcccggtgcccgccggcgccctgcagccgcccgagtacccctggatgaaggagaagaaggcggccaagaaaaccgcacttctgccggccgccgccgccgccgccaccgccgcagccaccggccctgcttgcctcagccacaaagaatccctggaaatcgccgatggcagcggcgggggatcgcggcgcctgagaactgcttacaccaacacacagcttctagagctggaaaaagaatttcatttcaacaagtacctttgcagaccccgaagggtggagattgcagcgctgctggatttgactgagagacaagtgaaagtgtggtttcagaaccggaggatgaagcacaagaggcagacccagtgcaaggaaaaccaaaacagcgaagggaaatgtaaaagccttgaggactccgagaaagtagaggaggacgaggaagagaagacgctctttgagcaagcccttagcgtctctggggcccttctggagagggaaggctacacttttcagcaaaatgccctctctcagcagcaggctcccaatggacacaatggcgactcccaaagtttcccagtctcgcctttaaccagcaatgagaaaaatctgaaacattttcagcaccagtcacccactgttcccaactgcttgtcaacaatgggccagaactgtggagctggcctaaacaatgacagtcctgaggcccttgaggtcccctctttgcaggactttagcgttttctccacagattcctgcctgcagctttcagatgcagtttcacccagtttgccaggttccctcgacagtcccgtagatatttcagctgacagcttagacttttttacagacacactcaccacaatcgacttgcagcatctgaattac

SEQ ID NO: 4789 - DNA, 411 bp, Homo sapiens
  source 1..411: mol_type = genomic DNA
atggacaatgcaagaatgaactccttcctggaataccccatacttagcagtggcgactcggggacctgctcagcccgagcctacccctcggaccataggattacaactttccagtcgtgcgcggtcagcgccaacagttgcggcggcgacgaccgcttcctagtgggcaggggggtgcagatcggttcgccccaccaccaccaccaccaccaccatcgccacccccagccggctacctaccagacttccgggaacctgggggtgtcctactcccactcaagttgtggtccaagctatggctcacagaacttcagtgcgccttacagcccctacgcgttaaatcaggaagcagacccaccaagaagcctgtcgctcccccgcatcggagacatcttctccagcgcagacttt

SEQ ID NO: 4790 - DNA, 759 bp, Homo sapiens
  source 1..759: mol_type = genomic DNA
atggaaactgatctagaggttataataaaggataatagtcttgtgctgacaccatcacacatcaaagcctacatgttgatgactcttcaaggattagaatatttacatcaacattggatcctacatagggatctgaaaccaaacaacttgttgctagatgaaaatggagttctaaaactggcagattttggcctggccaaatcttttgggagccccaatagagcttatacacatcaggttgtaaccaggtggtatcgggcccccgagttactatttggagctaggatgtatggtgtaggtgtggacatgtgggctgttggctgtatattagcagagttacttctaagggttccttttttgccaggagattcagaccttgatcagctaacaagaatatttgaaactttgggcacaccaactgaggaacagtggccggacatgtgtagtcttccagattatgtgacatttaagagtttccctggaatacctttgcatcacatcttcagtgcagcaggagacgacttactagatctcatacaaggcttattcttatttaatccatgtgctcgaattacggccacacaggcactgaaaatgaagtatttcagtaatcggccagggccaacacctggatgtcagctgccaagaccaaactgtccagtggaaaccttaaaggagcaatcaaatccagctttggcaataaaaaggaaaagaacagaggccttagaacaaggaggattgcccaagaaactaattttt

SEQ ID NO: 4791 - DNA, 2814 bp, Homo sapiens
  source 1..2814: mol_type = genomic DNA
atgacactcctggggtctgagcattccttgctgattaggagcaagttcagatcagttttacagttaagacttcaacaaagaaggacccaggaacaactggctaaccaaggcataataccaccactgaaacgtccagctgaattccatgagcaaagaaaacatttggatagtgacaaggctaaaaattccctgaagcgcaaagccagaaacaggtgcaacagtgccgacttggttaatatgcacatactccaagcttccactgcagagaggtccattccaactgctcagatgaagctgaaaagagcccgactcgccgatgatctcaatgaaaaaattgctctacgaccagggccactggagctggtggaaaaaaacattcttcctgtggattctgctgtgaaagaggccataaaaggtaaccaggtgagtttctccaaatccacggatgcttttgcctttgaagaggacagcagcagcgatgggctttctccggatcagactcgaagtgaagacccccaaaactcagcgggatccccgccagacgctaaagcctcagataccccttcgacaggttctctggggacaaaccaggatcttgcttctggctcagaaaatgacagaaatgactcagcctcacagcccagccaccagtcagatgcggggaagcaggggcttggcccccccagcacccccatagccgtgcatgctgctgtaaagtccaaatccttgggtgacagtaagaaccgccacaaaaagcccaaggaccccaagccaaaggtgaagaagcttaaatatcaccagtacattcccccagaccagaaggcagagaagtcccctccacctatggactcagcctacgctcggctgctccagcaacagcagctgttcctgcagctccaaatcctcagccagcagcagcagcagcagcaacaccgattcagctacctagggatgcaccaagctcagcttaaggaaccaaatgaacagatggtcagaaatccaaactcttcttcaacgccactgagcaatacccccttgtctcctgtcaaaaacagtttttctggacaaactggtgtctcttctttcaaaccaggcccactcccacctaacctggatgatctgaaggtctctgaattaagacaacagcttcgaattcggggcttgcctgtgtcaggcaccaaaacggctctcatggaccggcttcgacccttccaggactgctctggcaacccagtgccgaactttggggatataacgactgtcacttttcctgtcacacccaacacgctgcccaattaccagtcttcctcttctaccagtgccctgtccaacggcttctaccactttggcagcaccagctccagccccccgatctccccagcctcctctgacctgtcagtcgctgggtccctgccggacaccttcaatgatgcctccccctccttcggcctgcacccgtccccagtccacgtgtgcacggaggaaagtctcatgagcagcctgaatgggggctctgttccttctgagctggatgggctggactccgagaaggacaagatgctggtggagaagcagaaggtgatcaatgaactcacctggaaactccagcaagagcagaggcaggtggaggagctgaggatgcagcttcagaagcagaaaaggaataactgttcagagaagaagccgctgcctttcctggctgcctccatcaagcaggaagaggctgtctccagctgtccttttgcatcccaagtacctgtgaaaagacaaagcagcagctcagagtgtcacccaccggcttgtgaagctgctcaactccagcctcttggaaatgctcattgtgtggagtcctcagatcaaaccaatgtactttcttccacatttctcagcccccagtgttcccctcagcattcaccgctgggggctgtgaaaagcccacagcacatcagtttgcccccatcacccaacaaccctcactttctgccctcatcctccggggcccagggagaagggcacagggtctcctcgcccatcagcagccaggtgtgcactgcacagatggctggtttacactcttctgataaggtggggccaaagttttcaattccatccccaactttttctaagtcaagttcagcaatttcagaggtaacacagcctccatcctatgaagatgccgtaaagcagcaaatgacccggagtcagcagatggatgaactcctggacgtgcttattgaaagcggagaaatgccagcagacgctagagaggatcactcatgtcttcaaaaagtcccaaagatacccagatcttcccgaagtccaactgctgtcctcaccaagccctcggcttcctttgaacaagcctcttcaggcagccagatcccctttgatccctatgccaccgacagtgatgagcatcttgaagtcttattaaattcccagagccccctaggaaagatgagtgatgtcacccttctaaaaattgggagcgaagagcctcactttgatgggataatggatggattctctgggaaggctgcagaagacctcttcaatgcacatgagatcttgccaggccccctctctccaatgcagacacagttttcaccctcttctgtggacagcaatgggctgcagttaagcttcactgaatctccctgggaaaccatggagtggctggacctcactccgccaaattccacaccaggctttagcgccctcaccaccagcagccccagcatcttcaacatcgatttcctggatgtcactgatctcaatttgaattcttccatggaccttcacttgcagcagtgg

SEQ ID NO: 4792 - DNA, 2958 bp, Homo sapiens
  source 1..2958: mol_type = genomic DNA
atgacactcctggggtctgagcattccttgctgattaggagcaagttcagatcagttttacagttaagacttcaacaaagaaggacccaggaacaactggctaaccaaggcataataccaccactgaaacgtccagctgaattccatgagcaaagaaaacatttggatagtgacaaggctaaaaattccctgaagcgcaaagccagaaacaggtgcaacagtgccgacttggttaatatgcacatactccaagcttccactgcagagaggtccattccaactgctcagatgaagctgaaaagagcccgactcgccgatgatctcaatgaaaaaattgctctacgaccagggccactggagctggtggaaaaaaacattcttcctgtggattctgctgtgaaagaggccataaaaggtaaccaggtgagtttctccaaatccacggatgcttttgcctttgaagaggacagcagcagcgatgggctttctccggatcagactcgaagtgaagacccccaaaactcagcgggatccccgccagacgctaaagcctcagataccccttcgacaggttctctggggacaaaccaggatcttgcttctggctcagaaaatgacagaaatgactcagcctcacagcccagccaccagtcagatgcggggaagcaggggcttggcccccccagcacccccatagccgtgcatgctgctgtaaagtccaaatccttgggtgacagtaagaaccgccacaaaaagcccaaggaccccaagccaaaggtgaagaagcttaaatatcaccagtacattcccccagaccagaaggcagagaagtcccctccacctatggactcagcctacgctcggctgctccagcaacagcagctgttcctgcagctccaaatcctcagccagcagcagcagcagcagcaacaccgattcagctacctagggatgcaccaagctcagcttaaggaaccaaatgaacagatggtcagaaatccaaactcttcttcaacgccactgagcaatacccccttgtctcctgtcaaaaacagtttttctggacaaactggtgtctcttctttcaaaccaggcccactcccacctaacctggatgatctgaaggtctctgaattaagacaacagcttcgaattcggggcttgcctgtgtcaggcaccaaaacggctctcatggaccggcttcgacccttccaggactgctctggcaacccagtgccgaactttggggatataacgactgtcacttttcctgtcacacccaacacgctgcccaattaccagtcttcctcttctaccagtgccctgtccaacggcttctaccactttggcagcaccagctccagccccccgatctccccagcctcctctgacctgtcagtcgctgggtccctgccggacaccttcaatgatgcctccccctccttcggcctgcacccgtccccagtccacgtgtgcacggaggaaagtctcatgagcagcctgaatgggggctctgttccttctgagctggatgggctggactccgagaaggacaagatgctggtggagaagcagaaggtgatcaatgaactcacctggaaactccagcaagagcagaggcaggtggaggagctgaggatgcagcttcagaagcagaaaaggaataactgttcagagaagaagccgctgcctttcctggctgcctccatcaagcaggaagaggctgtctccagctgtccttttgcatcccaagtacctgtgaaaagacaaagcagcagctcagagtgtcacccaccggcttgtgaagctgctcaactccagcctcttggaaatgctcattgtgtggagtcctcagatcaaaccaatgtactttcttccacatttctcagcccccagtgttcccctcagcattcaccgctgggggctgtgaaaagcccacagcacatcagtttgcccccatcacccaacaaccctcactttctgccctcatcctccggggcccagggagaagggcacagggtctcctcgcccatcagcagccaggtgtgcactgcacagaactcaggagcacacgatggccatcctccaagcttctctccccattcttccagcctccacccgcccttctctggagcccaagcagacagcagtcatggtgccgggggaaacccttgtcccaaaagcccatgtgtacagcaaaagatggctggtttacactcttctgataaggtggggccaaagttttcaattccatccccaactttttctaagtcaagttcagcaatttcagaggtaacacagcctccatcctatgaagatgccgtaaagcagcaaatgacccggagtcagcagatggatgaactcctggacgtgcttattgaaagcggagaaatgccagcagacgctagagaggatcactcatgtcttcaaaaagtcccaaagatacccagatcttcccgaagtccaactgctgtcctcaccaagccctcggcttcctttgaacaagcctcttcaggcagccagatcccctttgatccctatgccaccgacagtgatgagcatcttgaagtcttattaaattcccagagccccctaggaaagatgagtgatgtcacccttctaaaaattgggagcgaagagcctcactttgatgggataatggatggattctctgggaaggctgcagaagacctcttcaatgcacatgagatcttgccaggccccctctctccaatgcagacacagttttcaccctcttctgtggacagcaatgggctgcagttaagcttcactgaatctccctgggaaaccatggagtggctggacctcactccgccaaattccacaccaggctttagcgccctcaccaccagcagccccagcatcttcaacatcgatttcctggatgtcactgatctcaatttgaattcttccatggaccttcacttgcagcagtgg

SEQ ID NO: 4793 - DNA, 4698 bp, Homo sapiens
  source 1..4698: mol_type = genomic DNA
atgacagcggacaaagacaaagacaaagacaaagagaaggaccgggaccgagaccgggaccgagagagagagaaaagagacaaagcaagagagagtgagaattcaaggccacgccggagctgtaccttggaaggaggagccaaaaattatgctgagagtgatcacagtgaagacgaggacaatgacaacaatagtgccaccgcagaggagtccacgaagaagaataagaagaaaccaccgaaaaaaaagtctcgttatgaaaggacagataccggtgagataacatcctacatcactgaagatgatgtggtctacagaccaggagactgtgtgtatatcgagagtcggaggccaaacacaccgtatttcatctgtagcattcaagacttcaaactggtccacaactcccaggcctgttgcagatctccaactcctgctttgtgtgaccccccagcatgctctctgccggtggcatcacagccaccacagcatctttctgaagccgggagagggcctgtagggagtaagagggaccatctcctcatgaacgtcaaatggtactaccgtcaatctgaggttccagattctgtgtatcagcatttggttcaggatcgacataatgaaaatgactctggaagagaacttgtcattacagacccagttatcaagaaccgagagctcttcatttctgattacgttgacacttaccatgctgctgcccttagagggaagtgtaacatctcccatttttctgacatatttgctgctagagagtttaaagcccgagtggattcatttttctacatattaggatataaccctgagacaaggaggctgaacagtacccagggggagattcgtgtcggtcctagtcatcaggccaaacttccagatctgcaaccatttccttctccagatggtgatacagtgacccaacatgaggaactggtctggatgcctggagttaacgactgtgacctccttatgtacttgagggcagcaaggagcatggcggcatttgcaggaatgtgtgatggaggctctacagaggacggctgtgtcgcagcctctcgggatgacaccactctgaatgcactgaacacactgcatgaaagcggttacgatgctggcaaagccctgcagcgcctggtgaagaagcctgtgcccaagctcatcgagaagtgctggaccgaggacgaagtgaaacgcttcgttaagggactcaggcagtacgggaagaacttcttcagaattagaaaggagctgcttcccaataaggaaacaggggagctgatcaccttctattactattggaagaagacccccgaagcagccagctcccgagcccatcgtaggcaccgcaggcaggccgtgttcaggaggattaagactcgcaccgcgtccacacccgtcaacacaccctccagacccccgtccagtgaattcttggacctaagttcagccagtgaagatgacttcgacagtgaggacagtgagcaggagctgaaggggtacgcctgccgccactgcttcaccaccacctccaaagattggcaccacggaggccgggagaacatcctgctttgcaccgactgtcgcatccacttcaagaaatacggtgagctcccgcccattgagaagcccgtggacccgccaccgtttatgttcaaacccgtcaaggaagaggatgatgggctcagtgggaagcatagcatgaggacacggcggagtcggggctcgatgtcgacactacgcagtggtcggaagaagcagccagccagccctgatggtcgcacctcacccatcaatgaagacatccgctccagcggccggaactcccccagcgctgccagtacctccagcaatgacagtaaagcagagacagtgaagaagtcggccaagaaggtgaaggaggaagcctcttcccctcttaagagtaacaaacgccagcgggagaaggtggcctctgatacggaggaggctgacaggaccagctccaagaagacaaaaacgcaggagatcagcaggcccaactcgccatctgaaggtgagggagagagttcagacagtcgcagcgtcaacgatgagggtagcagtgaccccaaagacatcgaccaggacaatcgcagcacgtccccgagcatccccagcccccaggacaatgagagtgactcggactcgtcagcccagcagcagatgctgcaggcccagcccccagccttgcaggctcccactggggtcaccccagctccctcctcagctcctccagggacccctcagctgcccacgccagggcccacgccctctgccactgcagttcccccacagggctcccccacggcctcccaggcccctaaccagccacaggctcccacagcgcctgttccccacacccacatccaacaggcaccggccttgcacccccagcggccgccctcaccgcatcccccgccgcatccctcgccacatcccccgctgcagcctctgactgggtcggcgggccagccttctgcaccctctcatgcccagcccccactgcacggtcagggcccacccggccctcacagcctgcaggctgggcccctgctgcagcacccaggccccccacagccctttggcctccctccccaggcctcccaaggccaggcccctctggggacctccccagcagcagcgtaccctcacacctccctgcagctgccagcctctcagtcagcgctgcagtcccaacagcctccacgggagcagcccctgccaccagcgcccttggccatgccccacatcaagcccccgcctaccactcccatcccccagctgccggcgccacaggcccacaagcaccctccccacctctcggggccctcacccttctccatgaatgccaacctgcctccccctccagccctgaagcccctgagctccctgtccacacatcaccccccgtcggctcaccccccacccctgcaactcatgcctcagagccagccattgccctcctcgcccgcccagccccccgggctgacccagagccagaacctgcccccgccccctgcctcccacccccctacaggcctccaccaggtggccccccaacccccgtttgctcagcacccctttgtccctggaggccctcctcccatcacccctccgacctgcccctccacctctaccccaccggcgggacctggcacctcggcccagccaccctgctctggtgcggcggcttcaggaggcagcatagcgggggggtcgtcctgcccactccccaccgtccagatcaaggaggaggctctggacgacgctgaggagcctgagagcccccctcccccaccaaggagcccgtccccggagcccactgtggtggacacccccagtcacgccagccagtcagctaggttctacaaacacctggaccggggctacaactcgtgtgcccggacagacctgtacttcatgcctctggccgggtccaagctggccaagaagagggaggaggccattgagaaggccaagcgcgaggctgagcagaaagcccgagaggagcgagagcgggagaaggagaaggagaaggagcgggagcgggagcgagagcgggagcgcgaggcagagcgggcggctaaggcgtccagctcagcgcatgaaggtcgcctcagtgacccacagctcagtggtcctggccacatgcggccatccttcgagccaccaccaaccaccattgctgctgtgcccccctacatcgggcccgacacacctgcccttcggactctgagcgagtacgcccggccccacgtcatgtcgcccaccaaccgcaaccaccccttctacatgccccttaaccccacggaccccctgctggcctaccacatgcctggcctctacaacgtcgaccccaccatccgcgagcgggagctccgggagcgggagatccgagagcgggagatccgagagcgggagctgcgggagaggatgaagccgggcttcgaggtgaagcccccagagctggaccccctgcacccagccgccaaccccatggagcactttgcccggcacagcgccctcaccatccccccgaccgccgggccccacccttttgcttctttccacccgggcctgaaccccttggagagggagagactggccctggcgggcccccagctgcggcccgagatgagctaccctgacagactggcagccgagcgtatccacgcagagcgcatggcatcgctgaccagcgatcccctggcccgactgcagatgttcaacgtgactccgcaccatcaccagcactctcacattcactcccacctccacctccaccagcaggaccccctccaccaaggttcagcaggccccgttcacccgctggtcgaccccctgactgccggtccccacctggctcgcttcccctacccgcctggcactctccccaaccctctgcttggacagcccccacacgagcacgagatgcttcgccacccagttttcggcaccccctacccccgtgacctgcctggggccatcccaccccccatgtcagcagcccaccagctgcaggccatgcatgcccagtcggccgagctgcagagactggccatggagcagcagtggctgcatggacacccccacatgcatggtggccacctaccaagtcaggaagattattacagtcgactgaagaaagaaggtgacaagcagtta

SEQ ID NO: 4794 - DNA, 3036 bp, Homo sapiens
  source 1..3036: mol_type = genomic DNA
atgttcaaacccgtcaaggaagaggatgatgggctcagtgggaagcatagcatgaggacacggcggagtcggggctcgatgtcgacactacgcagtggtcggaagaagcagccagccagccctgatggtcgcacctcacccatcaatgaagacatccgctccagcggccggaactcccccagcgctgccagtacctccagcaatgacagtaaagcagagacagtgaagaagtcggccaagaaggtgaaggaggaagcctcttcccctcttaagagtaacaaacgccagcgggagaaggtggcctctgatacggaggaggctgacaggaccagctccaagaagacaaaaacgcaggagatcagcaggcccaactcgccatctgaaggtgagggagagagttcagacagtcgcagcgtcaacgatgagggtagcagtgaccccaaagacatcgaccaggacaatcgcagcacgtccccgagcatccccagcccccaggacaatgagagtgactcggactcgtcagcccagcagcagatgctgcaggcccagcccccagccttgcaggctcccactggggtcaccccagctccctcctcagctcctccagggacccctcagctgcccacgccagggcccacgccctctgccactgcagttcccccacagggctcccccacggcctcccaggcccctaaccagccacaggctcccacagcgcctgttccccacacccacatccaacaggcaccggccttgcacccccagcggccgccctcaccgcatcccccgccgcatccctcgccacatcccccgctgcagcctctgactgggtcggcgggccagccttctgcaccctctcatgcccagcccccactgcacggtcagggcccacccggccctcacagcctgcaggctgggcccctgctgcagcacccaggccccccacagccctttggcctccctccccaggcctcccaaggccaggcccctctggggacctccccagcagcagcgtaccctcacacctccctgcagctgccagcctctcagtcagcgctgcagtcccaacagcctccacgggagcagcccctgccaccagcgcccttggccatgccccacatcaagcccccgcctaccactcccatcccccagctgccggcgccacaggcccacaagcaccctccccacctctcggggccctcacccttctccatgaatgccaacctgcctccccctccagccctgaagcccctgagctccctgtccacacatcaccccccgtcggctcaccccccacccctgcaactcatgcctcagagccagccattgccctcctcgcccgcccagccccccgggctgacccagagccagaacctgcccccgccccctgcctcccacccccctacaggcctccaccaggtggccccccaacccccgtttgctcagcacccctttgtccctggaggccctcctcccatcacccctccgacctgcccctccacctctaccccaccggcgggacctggcacctcggcccagccaccctgctctggtgcggcggcttcaggaggcagcatagcgggggggtcgtcctgcccactccccaccgtccagatcaaggaggaggctctggacgacgctgaggagcctgagagcccccctcccccaccaaggagcccgtccccggagcccactgtggtggacacccccagtcacgccagccagtcagctaggttctacaaacacctggaccggggctacaactcgtgtgcccggacagacctgtacttcatgcctctggccgggtccaagctggccaagaagagggaggaggccattgagaaggccaagcgcgaggctgagcagaaagcccgagaggagcgagagcgggagaaggagaaggagaaggagcgggagcgggagcgagagcgggagcgcgaggcagagcgggcggctaaggcgtccagctcagcgcatgaaggtcgcctcagtgacccacagctcagtggtcctggccacatgcggccatccttcgagccaccaccaaccaccattgctgctgtgcccccctacatcgggcccgacacacctgcccttcggactctgagcgagtacgcccggccccacgtcatgtcgcccaccaaccgcaaccaccccttctacatgccccttaaccccacggaccccctgctggcctaccacatgcctggcctctacaacgtcgaccccaccatccgcgagcgggagctccgggagcgggagatccgagagcgggagatccgagagcgggagctgcgggagaggatgaagccgggcttcgaggtgaagcccccagagctggaccccctgcacccagccgccaaccccatggagcactttgcccggcacagcgccctcaccatccccccgaccgccgggccccacccttttgcttctttccacccgggcctgaaccccttggagagggagagactggccctggcgggcccccagctgcggcccgagatgagctaccctgacagactggcagccgagcgtatccacgcagagcgcatggcatcgctgaccagcgatcccctggcccgactgcagatgttcaacgtgactccgcaccatcaccagcactctcacattcactcccacctccacctccaccagcaggaccccctccaccaaggttcagcaggccccgttcacccgctggtcgaccccctgactgccggtccccacctggctcgcttcccctacccgcctggcactctccccaaccctctgcttggacagcccccacacgagcacgagatgcttcgccacccagttttcggcaccccctacccccgtgacctgcctggggccatcccaccccccatgtcagcagcccaccagctgcaggccatgcatgcccagtcggccgagctgcagagactggccatggagcagcagtggctgcatggacacccccacatgcatggtggccacctaccaagtcaggaagattattacagtcgactgaagaaagaaggtgacaagcagtta

SEQ ID NO: 4795 - DNA, 3894 bp, Homo sapiens
  source 1..3894: mol_type = genomic DNA
atggatgatccattcagcccctgcaggaggctgaacagtacccagggggagattcgtgtcggtcctagtcatcaggccaaacttccagatctgcaaccatttccttctccagatggtgatacagtgacccaacatgaggaactggtctggatgcctggagttaacgactgtgacctccttatgtacttgagggcagcaaggagcatggcggcatttgcaggaatgtgtgatggaggctctacagaggacggctgtgtcgcagcctctcgggatgacaccactctgaatgcactgaacacactgcatgaaagcggttacgatgctggcaaagccctgcagcgcctggtgaagaagcctgtgcccaagctcatcgagaagtgctggaccgaggacgaagtgaaacgcttcgttaagggactcaggcagtacgggaagaacttcttcagaattagaaaggagctgcttcccaataaggaaacaggggagctgatcaccttctattactattggaagaagacccccgaagcagccagctcccgagcccatcgtaggcaccgcaggcaggccgtgttcaggaggattaagactcgcaccgcgtccacacccgtcaacacaccctccagacccccgtccagtgaattcttggacctaagttcagccagtgaagatgacttcgacagtgaggacagtgagcaggagctgaaggggtacgcctgccgccactgcttcaccaccacctccaaagattggcaccacggaggccgggagaacatcctgctttgcaccgactgtcgcatccacttcaagaaatacggtgagctcccgcccattgagaagcccgtggacccgccaccgtttatgttcaaacccgtcaaggaagaggatgatgggctcagtgggaagcatagcatgaggacacggcggagtcggggctcgatgtcgacactacgcagtggtcggaagaagcagccagccagccctgatggtcgcacctcacccatcaatgaagacatccgctccagcggccggaactcccccagcgctgccagtacctccagcaatgacagtaaagcagagacagtgaagaagtcggccaagaaggtgaaggaggaagcctcttcccctcttaagagtaacaaacgccagcgggagaaggtggcctctgatacggaggaggctgacaggaccagctccaagaagacaaaaacgcaggagatcagcaggcccaactcgccatctgaaggtgagggagagagttcagacagtcgcagcgtcaacgatgagggtagcagtgaccccaaagacatcgaccaggacaatcgcagcacgtccccgagcatccccagcccccaggacaatgagagtgactcggactcgtcagcccagcagcagatgctgcaggcccagcccccagccttgcaggctcccactggggtcaccccagctccctcctcagctcctccagggacccctcagctgcccacgccagggcccacgccctctgccactgcagttcccccacagggctcccccacggcctcccaggcccctaaccagccacaggctcccacagcgcctgttccccacacccacatccaacaggcaccggccttgcacccccagcggccgccctcaccgcatcccccgccgcatccctcgccacatcccccgctgcagcctctgactgggtcggcgggccagccttctgcaccctctcatgcccagcccccactgcacggtcagggcccacccggccctcacagcctgcaggctgggcccctgctgcagcacccaggccccccacagccctttggcctccctccccaggcctcccaaggccaggcccctctggggacctccccagcagcagcgtaccctcacacctccctgcagctgccagcctctcagtcagcgctgcagtcccaacagcctccacgggagcagcccctgccaccagcgcccttggccatgccccacatcaagcccccgcctaccactcccatcccccagctgccggcgccacaggcccacaagcaccctccccacctctcggggccctcacccttctccatgaatgccaacctgcctccccctccagccctgaagcccctgagctccctgtccacacatcaccccccgtcggctcaccccccacccctgcaactcatgcctcagagccagccattgccctcctcgcccgcccagccccccgggctgacccagagccagaacctgcccccgccccctgcctcccacccccctacaggcctccaccaggtggccccccaacccccgtttgctcagcacccctttgtccctggaggccctcctcccatcacccctccgacctgcccctccacctctaccccaccggcgggacctggcacctcggcccagccaccctgctctggtgcggcggcttcaggaggcagcatagcgggggggtcgtcctgcccactccccaccgtccagatcaaggaggaggctctggacgacgctgaggagcctgagagcccccctcccccaccaaggagcccgtccccggagcccactgtggtggacacccccagtcacgccagccagtcagctaggttctacaaacacctggaccggggctacaactcgtgtgcccggacagacctgtacttcatgcctctggccgggtccaagctggccaagaagagggaggaggccattgagaaggccaagcgcgaggctgagcagaaagcccgagaggagcgagagcgggagaaggagaaggagaaggagcgggagcgggagcgagagcgggagcgcgaggcagagcgggcggctaaggcgtccagctcagcgcatgaaggtcgcctcagtgacccacagctcagtggtcctggccacatgcggccatccttcgagccaccaccaaccaccattgctgctgtgcccccctacatcgggcccgacacacctgcccttcggactctgagcgagtacgcccggccccacgtcatgtcgcccaccaaccgcaaccaccccttctacatgccccttaaccccacggaccccctgctggcctaccacatgcctggcctctacaacgtcgaccccaccatccgcgagcgggagctccgggagcgggagatccgagagcgggagatccgagagcgggagctgcgggagaggatgaagccgggcttcgaggtgaagcccccagagctggaccccctgcacccagccgccaaccccatggagcactttgcccggcacagcgccctcaccatccccccgaccgccgggccccacccttttgcttctttccacccgggcctgaaccccttggagagggagagactggccctggcgggcccccagctgcggcccgagatgagctaccctgacagactggcagccgagcgtatccacgcagagcgcatggcatcgctgaccagcgatcccctggcccgactgcagatgttcaacgtgactccgcaccatcaccagcactctcacattcactcccacctccacctccaccagcaggaccccctccaccaaggttcagcaggccccgttcacccgctggtcgaccccctgactgccggtccccacctggctcgcttcccctacccgcctggcactctccccaaccctctgcttggacagcccccacacgagcacgagatgcttcgccacccagttttcggcaccccctacccccgtgacctgcctggggccatcccaccccccatgtcagcagcccaccagctgcaggccatgcatgcccagtcggccgagctgcagagactggccatggagcagcagtggctgcatggacacccccacatgcatggtggccacctaccaagtcaggaagattattacagtcgactgaagaaagaaggtgacaagcagtta

SEQ ID NO: 4796 - DNA, 1146 bp, Homo sapiens
  source 1..1146: mol_type = genomic DNA
atgcagcactacggggtgaacggctactcactgcacgccatgaactcactcagcgccatgtacaacctgcaccagcaggcagcccagcaggcccagcatgcccccgactaccggccttcagtgcatgcgcttacattggctgagcgcctggctggctgtacatttcaagacatcatcttggaggcccgttatggttcccagcaccgcaaacaacgtcgcagccgcacagcgttcacggctcagcagctcgaggccctggaaaagaccttccagaagactcactacccagatgtggtgatgcgtgagaggctggccatgtgcaccaacctgcctgaggcccgggtgcaggtgtggttcaagaaccgccgggccaagttccggaagaagcagcgtagcctgcagaaggaacagctccagaagcagaaggaggctgagggctcccatggggaaggcaaggccgaggcccccactccagatacccagctggacactgagcagcccccacgtctgcctggcagcgacccccctgctgagcttcacctgagtctgtctgagcagtcagccagtgagtcagcccccgaggatcagccggaccgtgaggaggaccccagggcaggggctgaggaccccaaagctgagaagagccctggggctgacagcaaggggctgggctgcaagaggggcagccccaaggcagattccccaggcagcctgaccatcactcctgtggccccagggggtggcctcctgggcccctcccactcctattcctcgtccccgctgagcctcttccgtctgcaggagcaattccgccagcacatggcggccaccaacaacctggtgcactactcgtccttcgaagtagggggtccggcccctgctgctgcagcggcggctgctgctgtgccctacctgggcgtcaacatggccccgctgggctcactgcactgccagtcctactaccagtccctgtcagcagccgctgctgcccaccagggtgtgtgggggtctcctctgctgcctgcacccccagcaggcctggctcctgcatcagctaccctgaacagtaaaaccacaagcatcgagaacctgcggctccgggccaagcagcacgcggcctccctgggactcgatacgctgcccaac

SEQ ID NO: 4797 - DNA, 1131 bp, Homo sapiens
  source 1..1131: mol_type = genomic DNA
atgcagcactacggggtgaacggctactcactgcacgccatgaactcactcagcgccatgtacaacctgcaccagcaggcagcccagcaggcccagcatgcccccgactaccggccttcagtgcatgcgcttacattggctgagcgcctggctgacatcatcttggaggcccgttatggttcccagcaccgcaaacaacgtcgcagccgcacagcgttcacggctcagcagctcgaggccctggaaaagaccttccagaagactcactacccagatgtggtgatgcgtgagaggctggccatgtgcaccaacctgcctgaggcccgggtgcaggtgtggttcaagaaccgccgggccaagttccggaagaagcagcgtagcctgcagaaggaacagctccagaagcagaaggaggctgagggctcccatggggaaggcaaggccgaggcccccactccagatacccagctggacactgagcagcccccacgtctgcctggcagcgacccccctgctgagcttcacctgagtctgtctgagcagtcagccagtgagtcagcccccgaggatcagccggaccgtgaggaggaccccagggcaggggctgaggaccccaaagctgagaagagccctggggctgacagcaaggggctgggctgcaagaggggcagccccaaggcagattccccaggcagcctgaccatcactcctgtggccccagggggtggcctcctgggcccctcccactcctattcctcgtccccgctgagcctcttccgtctgcaggagcaattccgccagcacatggcggccaccaacaacctggtgcactactcgtccttcgaagtagggggtccggcccctgctgctgcagcggcggctgctgctgtgccctacctgggcgtcaacatggccccgctgggctcactgcactgccagtcctactaccagtccctgtcagcagccgctgctgcccaccagggtgtgtgggggtctcctctgctgcctgcacccccagcaggcctggctcctgcatcagctaccctgaacagtaaaaccacaagcatcgagaacctgcggctccgggccaagcagcacgcggcctccctgggactcgatacgctgcccaac

SEQ ID NO: 4798 - DNA, 2115 bp, Homo sapiens
  source 1..2115: mol_type = genomic DNA
atgcagttaggggagcagctcttggtgagctcagtgaacctgcctggcgcgcacttctacccgctggagagtgcgcgaggcggcagcggcgggagcgctggccacctccccagcgcggccccctctcctcagaagttggacttagacaaagcgtccaagaagttttccggcagtctctcctgcgaggcggtgagcggggagcccgcagccgccagcgcaggggcccccgcggccatgcttagtgacaccgacgccggggacgcatttgccagcgctgcggcagtggccaagccggggcccccggacggccgcaagggctccccctgcggggaggaggagctgccctccgccgctgcagccgccgccgccgccgccgccgcggctgcggccactgcgcgctactccatggacagcctgagctccgagcggtactacctccagtcccccggtcctcaggggtcggagctggctgcgccctgctcactcttcccgtaccaggcggcggctggggcgccccacggacctgtgtacccggctcctaacggggcgcgctacccctacggctccatgctgccccccggcggcttccccgcggctgtgtgcccacccgggagggcgcagttcggcccaggagccggtgcgggcagtggcgcgggcggtagcagcggcgggggcggcggcccgggcacctatcagtacagccagggggctccgctctacgggccgtaccctggagccgcagcggcgggatcttgcggaggactggggggcctgggggttccaggttctggcttccgtgcccacgtctacctgtgcaaccggcctctgtggctcaaattccaccgccaccaaactgagatgatcattacgaaacagggcaggcgcatgtttcctttcttgagcttcaacataaacggactcaatcccactgcccactacaatgtgttcgtagaggtggtgctggcggaccccaaccactggcgcttccaggggggcaaatgggtgacctgtggcaaagccgacaataacatgcagggcaacaaaatgtatgttcacccagagtctcctaatactggttcccactggatgagacaggagatttcattcgggaaattaaaactcaccaataacaaaggcgcaaataacaacaacacccagatgatagtcttacaatccttacacaaataccaaccccgactgcatattgttgaagttacagaggatggcgtggaggacttgaatgagccctcaaagacccagacttttaccttctcagaaacgcaattcattgcagtgactgcctaccaaaacaccgatattactcaactaaagattgatcataacccctttgcaaaaggcttcagagacaactatgattccatgtacaccgcttcagaaaatgacaggttaactccatctcccacggattctcctagatcccatcagattgtccctggaggtcggtacggcgttcaatccttcttcccggagccctttgtcaacactttacctcaagcccgctattataatggcgagagaaccgtgccacagaccaacggcctcctttcaccccaacagagcgaagaggtggccaaccctccccagcggtggcttgtcacgcctgtccagcaacctgggaccaacaaactagacatcagttcctatgaatctgaatatacttctagcacattgctcccatatggcattaaatccttgccccttcagacatcccatgccctggggtattacccagacccaacctttcctgcaatggcagggtggggaggtcgaggttcttaccagaggaagatggcagctggactaccatggacctccagaacaagccccactgtgttctctgaagatcagctctccaaggagaaagtgaaagaggaaattggctcttcttggatagagacacccccttccatcaaatctctagattccaatgattcaggagtatacaccagtgcttgtaagcgaaggcggctgtctcctagcaactccagtaatgaaaattcaccctccataaagtgtgaggacattaatgctgaagagtatagtaaagacacctcaaaaggcatgggagggtattatgctttttacacaactccc

SEQ ID NO: 4799 - DNA, 2058 bp, Homo sapiens
  source 1..2058: mol_type = genomic DNA
atgcagttaggggagcagctcttggtgagctcagtgaacctgcctggcgcgcacttctacccgctggagagtgcgcgaggcggcagcggcgggagcgctggccacctccccagcgcggccccctctcctcagaagttggacttagacaaagcgtccaagaagttttccggcagtctctcctgcgaggcggtgagcggggagcccgcagccgccagcgcaggggcccccgcggccatgcttagtgacaccgacgccggggacgcatttgccagcgctgcggcagtggccaagccggggcccccggacggccgcaagggctccccctgcggggaggaggagctgccctccgccgctgcagccgccgccgccgccgccgccgcggctgcggccactgcgcgctactccatggacagcctgagctccgagcggtactacctccagtcccccggtcctcaggggtcggagctggctgcgccctgctcactcttcccgtaccaggcggcggctggggcgccccacggacctgtgtacccggctcctaacggggcgcgctacccctacggctccatgctgccccccggcggcttccccgcggctgtgtgcccacccgggagggcgcagttcggcccaggagccggtgcgggcagtggcgcgggcggtagcagcggcgggggcggcggcccgggcacctatcagtacagccagggggctccgctctacgggccgtaccctggagccgcagcggcgggatcttgcggaggactggggggcctgggggttccaggttctggcttccgtgcccacgtctacctgtgcaaccggcctctgtggctcaaattccaccgccaccaaactgagatgatcattacgaaacagggcaggcgcatgtttcctttcttgagcttcaacataaacggactcaatcccactgcccactacaatgtgttcgtagaggtggtgctggcggaccccaaccactggcgcttccaggggggcaaatgggtgacctgtggcaaagccgacaataacatgcagggcaacaaaatgtatgttcacccagagtctcctaatactggttcccactggatgagacaggagatttcattcgggaaattaaaactcaccaataacaaaggcgcaaataacaacaacacccagatgatagtcttacaatccttacacaaataccaaccccgactgcatattgttgaagttacagaggatggcgtggaggacttgaatgagccctcaaagacccagacttttaccttctcagaaacgcaattcattgcagtgactgcctaccaaaacaccgatattactcaactaaagattgatcataacccctttgcaaaaggcttcagagacaactatgattcatcccatcagattgtccctggaggtcggtacggcgttcaatccttcttcccggagccctttgtcaacactttacctcaagcccgctattataatggcgagagaaccgtgccacagaccaacggcctcctttcaccccaacagagcgaagaggtggccaaccctccccagcggtggcttgtcacgcctgtccagcaacctgggaccaacaaactagacatcagttcctatgaatctgaatatacttctagcacattgctcccatatggcattaaatccttgccccttcagacatcccatgccctggggtattacccagacccaacctttcctgcaatggcagggtggggaggtcgaggttcttaccagaggaagatggcagctggactaccatggacctccagaacaagccccactgtgttctctgaagatcagctctccaaggagaaagtgaaagaggaaattggctcttcttggatagagacacccccttccatcaaatctctagattccaatgattcaggagtatacaccagtgcttgtaagcgaaggcggctgtctcctagcaactccagtaatgaaaattcaccctccataaagtgtgaggacattaatgctgaagagtatagtaaagacacctcaaaaggcatgggagggtattatgctttttacacaactccc

SEQ ID NO: 4800 - DNA, 1230 bp, Homo sapiens
  source 1..1230: mol_type = genomic DNA
atgtttcctttcttgagcttcaacataaacggactcaatcccactgcccactacaatgtgttcgtagaggtggtgctggcggaccccaaccactggcgcttccaggggggcaaatgggtgacctgtggcaaagccgacaataacatgcagggcaacaaaatgtatgttcacccagagtctcctaatactggttcccactggatgagacaggagatttcattcgggaaattaaaactcaccaataacaaaggcgcaaataacaacaacacccagatgatagtcttacaatccttacacaaataccaaccccgactgcatattgttgaagttacagaggatggcgtggaggacttgaatgagccctcaaagacccagacttttaccttctcagaaacgcaattcattgcagtgactgcctaccaaaacaccgatattactcaactaaagattgatcataacccctttgcaaaaggcttcagagacaactatgattccatgtacaccgcttcagaaaatgacaggttaactccatctcccacggattctcctagatcccatcagattgtccctggaggtcggtacggcgttcaatccttcttcccggagccctttgtcaacactttacctcaagcccgctattataatggcgagagaaccgtgccacagaccaacggcctcctttcaccccaacagagcgaagaggtggccaaccctccccagcggtggcttgtcacgcctgtccagcaacctgggaccaacaaactagacatcagttcctatgaatctgaatatacttctagcacattgctcccatatggcattaaatccttgccccttcagacatcccatgccctggggtattacccagacccaacctttcctgcaatggcagggtggggaggtcgaggttcttaccagaggaagatggcagctggactaccatggacctccagaacaagccccactgtgttctctgaagatcagctctccaaggagaaagtgaaagaggaaattggctcttcttggatagagacacccccttccatcaaatctctagattccaatgattcaggagtatacaccagtgcttgtaagcgaaggcggctgtctcctagcaactccagtaatgaaaattcaccctccataaagtgtgaggacattaatgctgaagagtatagtaaagacacctcaaaaggcatgggagggtattatgctttttacacaactccc

SEQ ID NO: 4801 - DNA, 1074 bp, Homo sapiens
  source 1..1074: mol_type = genomic DNA
atggcctccacttcccgccgccaacgccgagaacgtcgctttcgtcgttacttgtctgcaggacggctggtccgggcccaggccctcctccagcgacacccaggcctcgatgtagatgctgggcagcccccaccactgcaccgggcctgtgcccgccacgatgcccctgccctgtgcctgctgcttcggctcggggctgaccctgcccaccaggaccgccatggggacacggcactgcatgctgctgcccgccagggcccagatgcctacaccgatttcttcctcccgctgctaagccgctgtccctccgccatgggaataaagaataaggatggggagacccctggccaaattttgggctggggacccccctgggattctgctgaagaggaggaagaagatgatgcctccaaggagcgggaatggagacagaagctccagggtgagctggaggacgagtggcaggaagtcatggggaggtttgaaggtgatgcctcccatgaaacccaggaacctgagtccttctcagcctggtcagatcgcctggcccgggaacatgcccagaagtgccagcagcagcagcgagaagcagagggatcccgtcgacccccacgtgctgagggctccagccagagctggcgacagcaggaggaggagcagcggctcttcagggagcgagcccgggccaaggaggaagagctgcgtgagagccgagccaggagggcgcaggaggctctaggggaccgagaacccaagccaaccagggccgggcccagggaagagcaccccagaggagcggggaggggcagcctctggcgatttggtgatgtgccctggccctgccctgggggaggggacccagaggccatggctgcagccctggtggccaggggcccccctttggaggaacagggggctctgaggaggtacttgagggtccagcaggtccgctggcaccctgaccgcttcctgcagcgattccgaagccagattgagacctgggagctgggccgtgtgatgggagcagtgacagccctttctcaggccctgaatcgccatgcagaggccctcaag

SEQ ID NO: 4802 - DNA, 1143 bp, Homo sapiens
  source 1..1143: mol_type = genomic DNA
atgagtaacccctccccccaggttccagaggaagaagcctccacatctgtctgccggcccaagagttccatggcctccacttcccgccgccaacgccgagaacgtcgctttcgtcgttacttgtctgcaggacggctggtccgggcccaggccctcctccagcgacacccaggcctcgatgtagatgctgggcagcccccaccactgcaccgggcctgtgcccgccacgatgcccctgccctgtgcctgctgcttcggctcggggctgaccctgcccaccaggaccgccatggggacacggcactgcatgctgctgcccgccagggcccagatgcctacaccgatttcttcctcccgctgctaagccgctgtccctccgccatgggaataaagaataaggatggggagacccctggccaaattttgggctggggacccccctgggattctgctgaagaggaggaagaagatgatgcctccaaggagcgggaatggagacagaagctccagggtgagctggaggacgagtggcaggaagtcatggggaggtttgaaggtgatgcctcccatgaaacccaggaacctgagtccttctcagcctggtcagatcgcctggcccgggaacatgcccagaagtgccagcagcagcagcgagaagcagagggatcccgtcgacccccacgtgctgagggctccagccagagctggcgacagcaggaggaggagcagcggctcttcagggagcgagcccgggccaaggaggaagagctgcgtgagagccgagccaggagggcgcaggaggctctaggggaccgagaacccaagccaaccagggccgggcccagggaagagcaccccagaggagcggggaggggcagcctctggcgatttggtgatgtgccctggccctgccctgggggaggggacccagaggccatggctgcagccctggtggccaggggcccccctttggaggaacagggggctctgaggaggtacttgagggtccagcaggtccgctggcaccctgaccgcttcctgcagcgattccgaagccagattgagacctgggagctgggccgtgtgatgggagcagtgacagccctttctcaggccctgaatcgccatgcagaggccctcaag

SEQ ID NO: 4803 - DNA, 1098 bp, Homo sapiens
  source 1..1098: mol_type = genomic DNA
atgagtaacccctccccccaggttccagaggaagaagcctccacatctgtctgccggcccaagagttccatggcctccacttcccgccgccaacgccgagaacgtcgctttcgtcgttacttgtctgcaggacggctggtccgggcccaggccctcctccagcgacacccaggcctcgatgtagatgctgggcagcccccaccactgcaccgggcctgtgcccgccacgatgcccctgccctgtgcctgctgcttcggctcggggctgaccctgcccaccaggaccgccatggggacacggcactgcatgctgctgcccgccagggcccagatgcctacaccgatttcttcctcccgctgctaagccgctgtccctccgccatgggaataaagaataaggatggggagacccctggccaaattttgggctggggacccccctgggattctgctgaagaggaggaagaagatgatgcctccaaggagcgggaatggagacagaagctccagggtgatgcctcccatgaaacccaggaacctgagtccttctcagcctggtcagatcgcctggcccgggaacatgcccagaagtgccagcagcagcagcgagaagcagagggatcccgtcgacccccacgtgctgagggctccagccagagctggcgacagcaggaggaggagcagcggctcttcagggagcgagcccgggccaaggaggaagagctgcgtgagagccgagccaggagggcgcaggaggctctaggggaccgagaacccaagccaaccagggccgggcccagggaagagcaccccagaggagcggggaggggcagcctctggcgatttggtgatgtgccctggccctgccctgggggaggggacccagaggccatggctgcagccctggtggccaggggcccccctttggaggaacagggggctctgaggaggtacttgagggtccagcaggtccgctggcaccctgaccgcttcctgcagcgattccgaagccagattgagacctgggagctgggccgtgtgatgggagcagtgacagccctttctcaggccctgaatcgccatgcagaggccctcaag

SEQ ID NO: 4804 - DNA, 2733 bp, Homo sapiens
  source 1..2733: mol_type = genomic DNA
atggaagcttcctggcgccaggtggccggtggccgaggccgatcccggggacgggccactgccgccccctcaggaaatggagtccatctccgcggcgccggaggagggcgagagaaggggtcggtgggcgcagttccttctggcaccagtcccggaggagtcgcgaccacggcggctgcagggagcaggcacagccccgcaggatcccaagccctgcagactaccgcagccagcgagctaatgtctcagaaaaaatttgaagaaatcaagaaagctaaccaagctgcagccagaaaacttgttgaagaacagtttagctcttcatctgaagaaggagatgaagattttgaaggaaaacagggaaaaatacttgcaaatacgtttataacatacactactcagacagatggagatacacgtgaattagagcgaacaaaacaatatgtaaatgaagcttttcaagcaggggctatgacatgcctaatttgtattgcttcggtgaagagaaaccaagcagtttggagctgttcgggatgtttctgtatatttcacatgccctgtatccagaagtgggctaaagacagccagtttcttgtatcttctgtgactgatgatgattttggaaagaaagattgtccctggccttgtccaaaatgtaggtttgaatacaaacgatctgaaacacctagtaggtactattgctattgtggaaaagtagaagatccacctttagatccgtggcttgtgcctcattcatgtggccaagtatgtgagcgtgaatttaaacctccttgtggccataaatgtttactcctctgtcatccaggtccctgccctccttgtccaaagatggtcacaactacttgttactgtaagaaagcaaaacctatccctcgtaggtgcagtgccaaggaatggtcttgtcagctgccatgtggacagaagttgctttgtgggcaacataagtgtgaaaatccttgtcatgcaggaagctgtcagccttgtccaagagttagtagacaaaagtgtgtctgtggcaaaaaagtagctgaaagaagttgtgcaagtccactatggcactgtgatcaagtatgtggaaaaacactgccatgtggtaatcacacatgtgagcaagtttgccatgttggtgcttgtggagaatgtcctcgatctgggaaaaggttctgtccatgtcagaaatcaaagttttctttgccttgtacagaagatgtaccaacttgtggagacagttgtgacaaagtacttgaatgcggaatccatagatgttcacagcgttgtcaccgaggtccctgtgaaacatgtagacaagaagtggaaaagcattgtcgctgtggaaagcatacaaaacgaatgccttgtcataaaccttatctgtgtgaaactaagtgtgttaagatgcgtgactgtcagaagcatcaatgtagaagaaagtgttgccctggaaactgtccaccttgtgatcaaaactgtggacggactttaggatgtagaaaccataagtgtccatctgtctgtcacagaggcagttgctatccctgcccagaaaccgtagatgtgaagtgtaattgtggcaatacaaaggtgacagtgccctgtggccgagaacgtaccacaagaccacccaagtgcaaggagcaatgcagtcgaccaccaacttgtcatcatacaagtcaagaaaaacatcgctgtcactttggttcttgtccaccatgtcatcaaccttgccaaaaagttttggagaaatgtggtcacttgtgtcctgctccgtgtcatgatcaagcattaataaagcagactggcaggcaccagcctacaggcccttgggaacagccttctgagccagcatttattcagactgcattaccgtgtcctccatgtcaagttcctattcctatggaatgtcttgggaaacatgaggtgagtccactaccatgccatgctgtaggaccctactcttgtaaaagagtttgtggaagaatcttggattgtcagaatcacacatgtatgaaagaatgccacaaagtaaccaaaactgatggctgcactggaaaaaacaaggctggcccagaatgccttcattgtgaggaagggtgctccaagtcacggccactaggttgtcttcacccatgtattttgcgatgtcaccctggagaatgtccaccttgtgttcagatgcttagaataaaatgtcactgtaagatcacaagcctgtatgtggaatgtagaaaaataaccacagctgatgtaaatgaaaagaacctcctcagttgttgcaaaaatcagtgccctaaagagcttccttgtggtcatagatgcaaagagatgtgtcatcctggtgaatgtccctttaactgcaaccagaaggtaaaacttagatgtccttgtaaaagaataaaaaaggaattgcagtgcaacaaagtacgtgaaaatcaggtttcaatagaatgtgacacaacgtgcaaggaaatgaagcggaaagcatctgagataaaagaagcagaagccaaagctgctcttgaagaagaaaaacgaagacaacaggctgaactagaagcttttgaaaacagactgaagggtcgtcggaagaagaacaggaaaagagatgaagtggcagttgagctatcactatggcaaaaacataaatattatctcatttcagtgtgtggagttgtggttgtagtgtttgcctggtacatcacccatgatgtcaat

SEQ ID NO: 4805 - DNA, 2028 bp, Homo sapiens
  source 1..2028: mol_type = genomic DNA
atggcgccgttcctgcgcatcgccttcaactcctatgagctgggctccctgcaggccgaggacgaggcgaaccagcccttctgtgccgtgaagatgaaggaggcgctcagcacagagcgtgggaaaacactggtgcagaagaagccgaccatgtatcctgagtggaagtcgacgttcgatgcccacatctatgaggggcgcgtcatccagattgtgctaatgcgggcagcagaggagccagtgtctgaggtgaccgtgggtgtgtcggtgctggccgagcgctgcaagaagaacaatggcaaggctgagttctggctggacctgcagcctcaggccaaggtgttgatgtctgttcagtatttcctggaggacgtggattgcaaacagtctatgcgcagtgaggacgaggccaagttcccaacgatgaaccgccgcggagccatcaaacaggccaaaatccactacatcaagaaccatgagtttatcgccaccttctttgggcaacccaccttctgttctgtgtgcaaagactttgtctggggcctcaacaagcaaggctacaaatgcaggcaatgtaacgctgccatccacaagaaatgcatcgacaagatcatcggcagatgcactggcaccgcggccaacagccgggacactatattccagaaagaacgcttcaacatcgacatgccgcaccgcttcaaggttcacaactacatgagccccaccttctgtgaccactgcggcagcctgctctggggactggtgaagcagggattaaagtgtgaagactgcggcatgaatgtgcaccataaatgccgggagaaggtggccaacctctgcggcatcaaccagaagcttttggctgaggccttgaaccaagtcacccagagagcctcccggagatcagactcagcctcctcagagcctgttgggatatatcagggtttcgagaagaagaccggagttgctggggaggacatgcaagacaacagtgggacctacggcaagatctgggagggcagcagcaagtgcaacatcaacaacttcatcttccacaaggtcctgggcaaaggcagcttcgggaaggtgctgcttggagagctgaagggcagaggagagtactttgccatcaaggccctcaagaaggatgtggtcctgatcgacgacgacgtggagtgcaccatggttgagaagcgggtgctgacacttgccgcagagaatccctttctcacccacctcatctgcaccttccagaccaaggaccacctgttctttgtgatggagttcctcaacgggggggacctgatgtaccacatccaggacaaaggccgctttgaactctaccgtgccacgttttatgccgctgagataatgtgtggactgcagtttctacacagcaagggcatcatttacagggacctcaaactggacaatgtgctgctggaccgggatggccacatcaagattgccgactttgggatgtgcaaagagaacatattcggggagagccgggccagcaccttctgcggcacccctgactatatcgcccctgagatcctacagggcctgaagtacacattctctgtggactggtggtctttcggggtccttctgtacgagatgctcattggccagtcccccttccatggtgatgatgaggatgaactcttcgagtccatccgtgtggacacgccacattatccccgctggatcaccaaggagtccaaggacatcctggagaagctctttgaaagggaaccaaccaagaggctgggagtgaccggaaacatcaaaatccaccccttcttcaagaccataaactggactctgctggaaaagcggaggttggagccacctttcaggcccaaagtgaagtcacccagagactacagtaactttgaccaggagttcctgaacgagaaggcgcgcctctcctacagcgacaagaacctcatcgactccatggaccagtctgcattcgctggcttctcctttgtgaaccccaaattcgagcacctcctggaagat

SEQ ID NO: 4806 - DNA, 1794 bp, Homo sapiens
  source 1..1794: mol_type = genomic DNA
atggacgctctgccccgcagcgggctgaacctgaaggaggagccgctgctgcccgccggcctgggctcagtgcgctcctggatgcagggcgcgggcatcctggacgccagcaccgcggcgcagagtggcgtgggtctggcacgagcacattttgagaagcagcctccctccaacctcaggaaatccaacttcttccacttcgtgctggccatgtacgaccggcaggggcagcccgtggaggtggagcgcacagccttcatcgacttcgtggaaaaggaccgagagcccggggcggaaaagactaacaatgggatccattaccgcctccggctggtgtataacaatggactgcggacagagcaagacctctacgtgcgtctcatcgactccatgtccaaacaggccatcatctatgaggggcaggacaagaaccccgaaatgtgccgagtgctgctcacccatgagatcatgtgcagccggtgctgtgaccggaagagctgtggcaaccggaatgagacgccctcagaccccgtcatcattgacaggttcttcctcaagttcttcctcaaatgcaaccagaactgcctgaagaatgcggggaatcccagagacatgcgccgcttccaggtggtggtgtccacgacggtgagcgtggacggacacgtgctggccgtgtccgacaacatgtttgtgcacaacaactccaagcatggccgcagggcgcgccgcctggacccctccgaagctgccaccccctgcatcaaggccatcagccccggggagggctggaccacgggcggcgccaccgtcattgtcatcggcgacaacttcttcgacgggttgcaggtcgtgttcggaaacgtgctcgtgtggagcgagctcatcacgccccacgccatccgggtgcagacgcccccgcggcacatccccggggtggtggaggtgaccctctcctacaagtccaagcagttttgcaagggatgccccggccgctttgtctacacagctctgaacgagcccaccattgactacggattccagaggctacagaaagtcattcccagacaccccggagaccccgagaggctgcccaaggaagtgctgctgaagcgggcggccgacttggcagaagccctgtacggagtgcccggcagtaaccaggagctgctcctgaagcgcgcggcggacgtggccgaggctctgtacagcaccccccgcgcacccgggccgctcgcacccctggccccgagccacccacaccccgccgtcgtgggcatcaacgccttcagcagcccgctggccatcgccgtcggggacgccaccccggggcccgagccgggctacgcgcgcagctgcagcagcgcgtccccccgcgggttcgcgcccagccccggctcgcagcagagcggctacggcggcggcctcggagctggcctgggcggctacggcgcgccgggcgtggccggcctcggcgtgcctgggtcccccagcttcctcaatggctccaccgccacctcgcccttcgccatcatgccctctagccccccgctggcggctgcctcctccatgtccctcccggccgctgcccccaccaccagcgtgttctccttctcgcctgtcaacatgatctccgccgtcaaacagaggagcgccttcgcccccgtgctgcgccccccaagctccccaccccaggcctgccccagagcccacggagaggggcttccagaccagtcttttgaggattctgacaagtttcactctccagcccgggggcttcagggcctggcatactcc

SEQ ID NO: 4807 - DNA, 1788 bp, Homo sapiens
  source 1..1788: mol_type = genomic DNA
atgtttgggattcaggagaatattccgcgcggggggacgaccatgaaggaggagccgctgggcagcggcatgaacccggtgcgctcgtggatgcacacggcgggcgtggtggacgccaacacggccgcccagagcggcgtggggctggcgcgggcgcacttcgagaagcagccgccttccaacctccggaaatccaatttcttccacttcgtgctggcgctctacgataggcaggggcagccggtggagattgaaaggaccgcttttgtggactttgtggagaaagagaaagagccaaacaacgagaaaaccaacaacggcatccactataaactccagttattgtacagcaacggagtcagaacagagcaagatctgtatgttcgcctcatagattcaatgaccaaacaggccatcgtctacgagggccaggacaagaacccggagatgtgccgtgtgctgctgacccacgagatcatgtgcagccggtgctgtgacaagaaaagttgtggcaatagaaacgaaacgccctcagaccctgtaatcattgacagattctttctaaagtttttcctcaagtgcaatcagaactgtttgaagaatgcaggcaaccctcgagatatgcggagattccaggttgttgtatcgacaacagtcaacgtggacggccacgtgctggccgtgtcagacaacatgtttgtgcacaacaattccaaacacgggaggcgggcccgccgcctagacccgtcagaaggtacggccccttcttatctggaaaatgccactccgtgcatcaaggccatcagtcccagtgaaggctggaccacggggggtgccaccgtcatcataattggcgacaacttctttgacgggctgcaagttgtattcggaactatgttggtgtggagcgagctgataactccccatgccatccgagtccagaccccgccgaggcacattcctggcgtcgtcgaagtgaccctctcctacaaatccaagcagttctgcaaaggtgctcctgggcgctttgtctacaccgcccttaatgaaccaaccatagattacggctttcagaggttgcagaaagtgatcccaagacatccgggtgatcccgaaaggttacccaaggaggtgttactgaagcgggcggcggacctggtggaagccttatacggaatgcctcacaacaaccaggagatcatcttgaagcgagcggcggacatcgccgaggcgctgtacagcgttccccgcaatcacaaccagatccccaccctgggcaacaaccctgcacacacgggcatgatgggcgtcaactccttcagcagccagctagccgtcaacgtgtcagagacgtcacaagccaacgaccaagtcggctacagtcgcaatacaagcagcgtgtccccgcgaggctacgtccccagcagtactccccagcagtccaattacaacacagtcagcactagcatgaatggatatggaagtggcgccatggccagtctaggggtccctggctcgcctggatttcttaatggctcctccgctaactctccctacggcatagtgccgtccagccccaccatggcagcctcttcggtcaccctcccttcaaactgtagcagcacacacggcattttctcattctcacctgccaatgtcatctccgcagtgaaacagaagagcgccttcgcgcccgtggtccggccccaagcctctcctcctccttcctgcaccagcgccaacgggaatggactgcaagctatgtctgggctggtagtcccgccaatg

SEQ ID NO: 4808 - DNA, 1725 bp, Homo sapiens
  source 1..1725: mol_type = genomic DNA
atgtttggaattcaagatactttaggaagaggaccaactctgaaagagaaatcgctgggcgcggagatggattcggtcaggtcctgggtccggaatgtcggagtggtggacgctaatgtcgccgcgcagagcggggtcgccctgtcccgggcccactttgagaaacagcctccttccaacttgaggaaatccaacttctttcacttcgtcctggcgctctatgacaggcagggccagccggtggagatcgagcggacggccttcgtggactttgtggagaatgacaaagaacaaggcaacgagaagaccaacaacggcactcactacaagttacagctcctctacagcaacggtgtccgcacggaacaggacctctatgtcaggctcatcgactcggtcaccaagcagcccatcgcttacgagggacagaataagaatccggaaatgtgccgagttctcctgacgcacgaagtgatgtgtagtcgatgctgcgaaaagaaaagctgtggaaaccgaaatgagactccatcggacccagtcataattgacagattctttttaaaatttttcctcaagtgcaatcagaattgtttgaaaacagcaggaaacccaagggacatgagacggtttcaggttgtgttgtcaacaacggtgaatgtggatggacacgtcctggctgtttctgacaacatgtttgttcataacaactccaagcatggacggagagcaagaagactcgatccatcggaagctaccccctgcatcaaagccattagcccgagtgaaggctggaccacaggaggagccatggtcatcatcatcggggacaacttctttgatggtctccaagtggtgtttgggactatgcttgtatggagcgagctaataacccctcatgccatcagagtacagactcctccccggcacatcccaggcgtggtagaggtgacattatcttataaatctaaacagttctgcaaaggagccccaggaaggttcatttacacagcattaaatgaacccaccatagactatggcttccagagactgcagaaggtcatccctaggcatcctggagatcctgagagattagctaaggagatgctgttgaaaagagctgcagatctagtggaagctctttatggcacaccacacaataaccaggacatcattttgaagcgagccgcagacattgctgaagctctctacagcgtccccaggaatcccagccagcttccagccctctctagctccccagcgcacagtggcatgatgggaatcaactcctatggcagccagcttggggtcagcatctcagagtcaacacaaggaaataatcaagggtacatccgcaacacaagcagcatctctccgcggggatactcttccagctccacgcctcaacagtctaattacagtacctccagcaacagtatgaatggctacagcaatgtccccatggccaacttgggtgttccaggttcaccaggatttctaaatggctcacccaccggctctccttatggaatcatgtcatcaagtcccaccgttgggtcttccagcacatcctccatcctcccattttcctcttcagtttttcctgctgtcaaacagaagagtgcctttgcccctgtcatcaggccccaaggctccccttcacctgcctgctccagcggcaatggaaatggattcagagccatgaccggacttgttgtacccccgatg

SEQ ID NO: 4809 - DNA, 1680 bp, Homo sapiens
  source 1..1680: mol_type = genomic DNA
atgtttgggattcaggaaagcatccaacggagtggaagcagcatgaaggaagagccgctgggcagcggcatgaacgcggtgcggacgtggatgcagggcgccggggtgctggacgccaacacggcggcgcagagcggggtgggtctggcccgggctcactttgagaagcagccgccttccaatctgcggaaatccaacttcttccacttcgtcctggccctctacgacagacagggccagcccgtggagatcgagaggacagcgtttgtggggttcgtggagaaggaaaaagaagccaacagcgaaaagaccaataacggaattcactaccggcttcagcttctctacagcaatgggataaggacggagcaggatttctacgtgcgcctcattgactccatgacaaaacaagccatagtgtatgaaggccaagacaagaacccagaaatgtgccgagtcttgctcacacatgagatcatgtgcaggttcttcttgaaatttttcctcaaatgtaaccaaaattgcctaaagaatgcgggaaacccacgtgacatgcggagattccaggtcgtggtgtctacgacagtcaatgtggatggccatgtcctggcagtctctgataacatgtttgtccataataattccaagcatgggcggagggctcggaggcttgacccctcggaagctactccctgtatcaaagccatcagcccgagtgaaggatggacgacgggaggtgcgactgtgatcatcataggggacaatttctttgatgggttacaggtcatattcggtaccatgctggtctggagtgagttgatcactcctcatgccatccgtgtgcagacccctcctcggcacatccctggtgttgtggaagtcacactgtcctacaaatctaagcagttctgcaaaggaacaccaggcagattcatttatacagcgctcaacgaacccaccatcgattatggtttccagaggttacagaaggtcattcctcggcaccctggtgaccctgagcgtttgccaaaggaagtaatactcaaaagggctgcggatctggtagaagcactgtatgggatgccacacaacaaccaggaaatcattctgaagagagcggccgacattgccgaggccctgtacagtgttccccgcaaccacaaccaactcccggcccttgctaacacctcggtccacgcagggatgatgggcgtgaattcgttcagtggacaactggccgtgaatgtctccgaggcatcacaagccaccaatcagggtttcacccgcaactcaagcagcgtatcaccacacgggtacgtgccgagcaccactccccagcagaccaactataactccgtcaccacgagcatgaacggatacggctctgccgcaatgtccaatttgggcggctcccccaccttcctcaacggctcagctgccaactccccctatgccatagtgccatccagccccaccatggcctcctccacaagcctcccctccaactgcagcagctcctcgggcatcttctccttctcaccagccaacatggtctcagccgtgaaacagaagagtgctttcgcaccagtcgtcagaccccagacctccccacctcccacctgcaccagcaccaacgggaacagcctgcaagcgatatctggcatgattgttcctcctatg

SEQ ID NO: 4810 - DNA, 642 bp, Homo sapiens
  source 1..642: mol_type = genomic DNA
atgacggagccgggcgcctctcccgaggacccttgggtcaaggtggagtatgcctacagcgacaacagcctggaccccgatgatgaggacagtgattaccaccaggaggcctacaaggagtcctacaaagaccggcggcggcgcgcacacactcaggctgagcagaagaggagggacgccatcaagagaggctatgatgaccttcagaccatcgtccccacttgccagcagcaggacttctccattggctcccaaaagctcagcaaagccatcgttctacaaaagaccattgactacattcagtttttgcacaaggagaagaaaaagcaggaggaggaggtgtccacgttacgcaaggatgtcaccgccctaaagatcatgaaagtgaactatgagcagattgtgaaggcacaccaggacaacccccatgaaggggaggaccaggtctctgaccaggtcaagttcaacgtgtttcaaggcatcatggattccctgttccagtccttcaatgcctccatctcagtggccagcttccaggagctgtcagcgtgtgtcttcagctggatcgaggagcactgtaagcctcagaccctgcgggagattgtgattggcgtcctgcaccaattgaaaaaccagctttac

SEQ ID NO: 4811 - DNA, 894 bp, Homo sapiens
  source 1..894: mol_type = genomic DNA
atgacggagccgggcgcctctcccgaggacccttgggtcaaggcaagccccgtgggcgcgcacgccggcgaggggagggcgggtcgggctcgtgcacgtaggggggccggaagacgaggggcttccctcctgtccccaaagtcccccacgctctccgtgccccggggctgcagagaagacagctctcaccccgcgtgtgccaaggtggagtatgcctacagcgacaacagcctggaccccgggctttttgtagaaagcacccgcaaggggagtgtagtgtccagagctaatagcatcggttccaccagtgcctcttctgtccccaacacagatgatgaggacagtgattaccaccaggaggcctacaaggagtcctacaaagaccggcggcggcgcgcacacactcaggctgagcagaagaggagggacgccatcaagagaggctatgatgaccttcagaccatcgtccccacttgccagcagcaggacttctccattggctcccaaaagctcagcaaagccatcgttctacaaaagaccattgactacattcagtttttgcacaaggagaagaaaaagcaggaggaggaggtgtccacgttacgcaaggatgtcaccgccctaaagatcatgaaagtgaactatgagcagattgtgaaggcacaccaggacaacccccatgaaggggaggaccaggtctctgaccaggtcaagttcaacgtgtttcaaggcatcatggattccctgttccagtccttcaatgcctccatctcagtggccagcttccaggagctgtcagcgtgtgtcttcagctggatcgaggagcactgtaagcctcagaccctgcgggagattgtgattggcgtcctgcaccaattgaaaaaccagctttac

SEQ ID NO: 4812 - DNA, 1518 bp, Homo sapiens
  source 1..1518: mol_type = genomic DNA
atgccagctaatgggacatcaccccagagattccctgccctgattccaggagaacctggcagatcttttgaggggtccgtgtcattcgaggatgtggctgtggatttcacccgacaggagtggcacagactggaccctgctcagaggaccatgcacaaggatgtgatgctggagacctacagcaacctggcatctgtgggcctctgcgtggccaaaccagagatgatcttcaagttggagcgaggagaagagctgtggatattagaggaggaatcctcaggccatggttactcaggatctctctcactgctgtgtggcaatggttctgttggggataatgccctcaggcatgataatgaccttcttcaccatcagaagattcaaacattggatcaaaatgttgaatataatggatgcaggaaagccttccatgagaaaacaggctttgttagacgtaaaagaacacccagaggagataaaaactttgaatgtcatgaatgtgggaaagcttactgtaggaagtcaaaccttgttgaacatctgagaatacacacaggagagagaccctatgaatgcggtgaatgtgcaaaaaccttcagtgcaagatcatacctcattgctcatcagaaaactcacacaggggagaggccctttgaatgtaatgaatgtgggaaatcttttggcaggaagtcacaactcatcctacatacaagaacacacactggagagagaccctatgaatgtactgaatgtgggaaaaccttttctgagaaggcaaccctcacgattcatcagagaactcacacaggggagaaaccctatgaatgtagtgaatgtgggaaaacatttcgtgtaaagatatcccttacccaacaccacagaactcatacaggggagaaaccttatgaatgtggggagtgtgggaaaaacttccgtgcaaagaaatccctaaatcagcatcaaagaattcacacaggtgagaaaccctatgagtgtggtgaatgtgggaaattcttccgaatgaagatgactctcaataatcatcaaagaactcacacaggtgaaaagccctatcagtgtaatgaatgtgggaaatctttcagggtgcactcatctcttgggatccatcagagaattcacacaggagagaaaccttacgaatgtaatgagtgtggtaatgctttctatgtgaaagcacgcctaattgaacatcagaggatgcattcaggagagaaaccctacgaatgtagtgaatgtgggaaaatcttcagtatgaagaaatccctttgtcaacaccggagaactcacacaggagagaaaccttatgaatgtagtgaatgtggaaatgccttctatgtgaaagtacgcctcattgaacatcagcgaattcacacaggagagagaccctttgagtgtcaagaatgtgggaaagctttctgccggaaagcacacctcacagaacatcagagaactcacataggctggtcctggcgttgtacaatgaagaaagcctctcac

SEQ ID NO: 4813 - DNA, 1311 bp, Homo sapiens
  source 1..1311: mol_type = genomic DNA
atggcagcggccactctgaggacgccaactcagggcactgtgacctttgaagatgtggccgtacacttctcctgggaggaatggggtctccttgatgaggctcaaagatgcctgtaccgtgatgtgatgctggagaacttggctcttttaacctctctagatgttcatcatcagaagcagcaccttggagaaaaacatttcagaagcaatgtgggcagagccttgtttgtgaagacctgcacattccatgtgtcaggggagccttccacctgcagagaagttgggaaggacttcctggccaagttgggatttctccatcaacaggctgctcacactggggagcaatcaaatagcaaaagcgacggtggggccatcagtcacagaggaaaaactcattacaactgtggagaacacacaaaagcattcagcggtaaacacacacttgttcagcagcagagaaccctcactacagaaagatgttacatatgcagtgaatgtgggaaatcctttagcaaaagctacagtctcaatgaccattggagacttcacactggagaaaagccttatgaatgtcgagagtgtgggaagtcctttaggcaaagctctagtctcattcagcaccggagagttcacactgcagtacgacctcatgaatgtgatgaatgtggaaaattatttagcaacaagtctaacctcattaaacatcggagagttcacactggggaaaggccatatgagtgcagtgaatgtgggaaatcctttagccaaaggtctgcactccttcaacatcggggagttcacactggggagaggccttatgagtgcagtgaatgtgggaagttttttacatatcattccagtctcataaaacaccagaaagttcacagtggatccaggccttatgagtgcagcgaatgtgggaagtcatttagccaaaactctagcctcattgaacaccatagggttcacactggagaaaggccttataagtgcagcgaatgtgggaaatcctttagccaaaggtctgcactccttcaacatcggggagttcacactggggagaggccttatgagtgcagtgaatgtgggaagttctttccctacagctccagtctccgaaaacaccagagagttcacactggatcaagaccctatgagtgcagtgaatgtgggaaatcctttactcaaaattccggcctcattaagcacaggagggttcacactggggagaagccttatgagtgcacggaatgtgggaaatcctttagccataactccagccttattaaacatcagagaattcatagtcga

SEQ ID NO: 4814 - DNA, 711 bp, Homo sapiens
  source 1..711: mol_type = genomic DNA
atggccctgccccccagccccctggccatggaatatgtcaatgactttgacttgatgaagtttgaggtaaagcgggaaccctctgagggccgacctggcccccctacagcctcactgggctccacaccttacagctcagtgcctccttcacccaccttcagtgaaccaggcatggtgggggcaaccgagggcacccggccaggcctggaggagctgtactggctggctaccctgcagcagcagctgggggctggggaggcattggggctgagtcctgaagaggccatggagctgctgcagggtcagggcccagtccctgttgatgggccccatggctactacccagggagcccagaggagacaggagcccagcacgtccagctggcagagcggttttccgacgcggcgctggtctcgatgtctgtgcgggagctaaaccggcagctgcggggctgcgggcgcgacgaggcgctgcggctgaagcagaggcgccgcacgctgaagaaccgcggctacgcgcaggcctgtcgctccaagcggctgcagcagcggcgcgggctggaggccgagcgcgcccgcctggccgcccagctggacgcgctgcgggccgaggtggcccgcctggcccgggagcgcgatctctacaaggctcgctgtgaccggctaacctcgagcggccccgggtccggggacccctcccacctcttcctc

SEQ ID NO: 4815 - DNA, 1908 bp, Homo sapiens
  source 1..1908: mol_type = genomic DNA
atggcccatttgatgatgttcagggatgtggctgtagatttctctcaggaggagtgggagtgcctggacctggaacagagggatttatatagagatgtgatgttggagaactacagcaacatggtctcactgggtttttgcatttatcagccagaagcgttctctttattggagaaagggaaagagccctggaagattttgagggatgagacaagaggaccttgcccagacatgcagtcgaggtgtcagaccaagaagttattaccaaaaaatggcatttttgagagagaaatagcccaattggaaataatgagaatttgtaaaaaccacagccttgactgtttatgttttagaggtgactgggaaggcaacactcagtttcaaacacttcaagataatcaagaggaatgcttcaagcaggtgatacgcacctgtgaaaaaaggcccacttttaaccagcatacagtgtttaatctacaccagagacttaatacaggagacaaactgaatgaatttaaagaactggggaaagcctttatttctggttcagatcatactcaacatcagttaattcacacaagtgagaaattctgtggagataaagaatgtgggaatacctttcttcctgattcagaagttattcaatatcagacagttcacactgttaagaaaacatatgaatgtaaagaatgtgggaagtcttttagtttacgttcgagtcttactggtcataagagaattcataccggtgagaaaccttttaaatgtaaggattgtgggaaagcctttagatttcattcacaacttagtgtccataagcgaattcatactggtgagaaatcttatgaatgtaaggaatgtgggaaggcctttagttgtggctcagatcttactcgacatcagagaattcatactggtgaaaaaccctatgaatgtaatgaatgtagaaaggcctttagtcagcgatcacatcttattaaacatcagagaattcacactggtgaaaaaccttatgaatgtaaggagtgtgggaaagcttttactcgtggatcacacctaactcagcatcagagaattcatactggtgagaaatctcatgagtgtaaggaatgtggaaaagcctttattcgtggttcaaatcttgctcaacatcagaatgttcatgttggtaggaaaccttataaatgtgagaaatgtgggaaagcctatatttggagctcacaccttgctcgacatcagcgaattcatactggcaggaaaccttatgaatgtaagcaatgcgggaagacttttacttgggcttcgtatcttgctcaacatgagaaaattcacaatgagaggaaatcctatgaatgtaaggaatgtggaaagacctttcttcatggctcagagtttaatcgacatcagaaaattcatactggtgagagaaactatgaatgtaaggaatgtggaaagaccttttttcgtggttcagaacttaatcgacaccagaaaattcatactggaaagaggccatatgaatgtgaagaatgtggaaaagcctttctctggggttcacaacttactcgacatcagagaatgcatactggtgaggaaccttacgtatgtaaagaatgtgggaaatcttttatctggggttcacagcttacacgacataagaaaattcatactgatgcagaaccttatggatgcaagaaaagtagccacatctttagtcaccattcatattttactgaacaaaaaattcataatagtgcaaatctctgtgaatggacagactatgggaacacctttagtcatgagtcaaactttgctcaacaccagaatatttacacttttgagaaatcctatgaatttaaagattttgagaaagcattttcttcaagctctcacttcatttcactcttg

SEQ ID NO: 4816 - DNA, 1896 bp, Homo sapiens
  source 1..1896: mol_type = genomic DNA
atggcagcggcggcgctgcgggaccccgcgcagggctgcgtgacctttgaggacgtgaccatttacttctcccaggaggagtgggtgctcctcgatgaggctcagagactcctgtactgcgatgtgatgctggaaaactttgcacttatagcctcgctgggacttatatctttcaggtcccacatcgtttcccagttggagatggggaaagagccctgggtgcctgacagtgtggatatgacatcagccatggccagaggggcttatggcaggcctggctctgatttttgccatggaacagagggcaaggacttaccttctgagcataacgtttctgtagaaggagtggcacaggacaggagtcccgaggcaactctgtgcccccagaagacctgcccctgtgacatatgtggcctacgtttgaaagacattttgcatttggctgaacaccagacaacacatcccaggcagaaaccatttgtgtgtgaggcatatgtgaaaggctctgagttcagtgcaaaccttccccggaaacaggtgcagcagaacgtacacaaccctatcagaacggaggagggccaggcttcccctgtaaagacctgcagagaccacacatcagatcagctttccacctgcagggagggtgggaaggactttgtggccacagcagggtttctgcagtgtgaggtcactcccagcgatggggagccgcacgaggccaccgaaggtgtggtggattttcacattgcactaaggcataacaagtgctgtgaatctggggatgccttcaataacaaatccactcttgttcagcaccagagaatccacagcagagaaaggccttatgaatgcagcaaatgtggaatcttcttcacttacgccgctgacctcactcaacaccagaaagttcacaatagaggaaaaccgtatgagtgctgtgaatgtggaaaattcttcagccagcactccagccttgttaaacatcgcagggttcacaccggtgaaagccctcacgtgtgtggtgactgtgggaaattcttcagccgaagctccaacctcattcagcataagagggttcacactggtgaaaagccatatgagtgcagcgactgtgggaagttcttcagccagcgttccaacctcattcatcataagagggttcatacgggcagaagtgcccatgagtgcagtgaatgtgggaaatctttcaactgcaactccagcctaattaaacattggagagttcacactggagaaagaccttacaagtgtaacgaatgtgggaaattcttcagccacattgccagcctcattcaacatcagatagttcacactggcgagcggcctcacgggtgtggtgagtgtgggaaagccttcagccgaagctctgacctcatgaaacatcagcgagttcacactggtgagcggccttatgaatgcaatgaatgtgggaagttatttagccagagctccagcctcaatagccatcggagacttcacactggtgaacggccttaccagtgcagtgaatgtgggaaattctttaaccaaagctccagcctcaataaccaccggagacttcacaccggcgagcggccttatgagtgcagcgaatgtgggaaaaccttcaggcagaggtccaatctgaggcagcacctgaaagttcacaaaccagacaggccttacgaatgcagcgaatgtgggaaagccttcaaccaaaggcctaccctcattcggcatcagaagattcacatcagagaaaggagcatggagaatgtgctccttccctgttcacagcacacaccagagataagctctgagaacagaccttatcagggcgctgtcaactacaagttgaaacttgttcatccaagtacccaccctggggaggttccc

SEQ ID NO: 4817 - DNA, 1218 bp, Homo sapiens
  source 1..1218: mol_type = genomic DNA
atgatcgaataccagatacctgtgtcattcaaagatgtggttgtgggcttcacccaagaggagtggcaccggctgagtcctgctcagagggccctgtaccgggatgtgatgctggaaacctatagcaacctcgtctcagtgggttatgaaggcaccaaaccagatgtgatcctcagactggagcaggaagaagcaccatggattggtgaggcagcatgcccgggctgccactgttgggaagacatctggcgagttaatatccagaggaaaagacggcaagacatgcttttgaggccaggcgcagccataagcaagaaaacattgcccaaggagaaaagctgtgaatataataagtttgggaaaatatcacttctgagcactgatcttttttcttcaatccagagccctagtaactggaacccttgtggaaagaatttgaaccataatttagacttgattggttttaagagaaactgtgcaaaaaagcaagatgagtgttatgcttatgggaaattgcttcagcgtataaatcatggtagacgacctaatggagaaaagccccggggttgcagtcactgtgagaaagctttcacccagaacccggcacttatgtataaaccagcagtaagtgattctctcttgtacaaacggaagagggttccacctacagaaaaaccccacgtctgtagtgagtgtgggaaagccttctgctacaagtctgaattcattaggcatcagagaagtcacactggggagaagccttatggctgcactgactgtgggaaagccttttcacataagtcaaccctcatcaaacaccagagaattcacactggggtaagaccctttgaatgttttttttgtgggaaagcctttacccagaagtcacaccgcacagaacatcagagaacacacacaggagagagaccctttgtctgcagtgaatgcgggaaatcgtttggtgagaagtcatacctcaatgtacatcgaaaaatgcacacaggagaaagaccgtatcgttgcagagaatgtggaaaatccttcagccagaagtcatgcctcaataaacattggagaactcacacaggagagaagccctatgggtgcaatgaatgtgggaaagctttctaccagaagccaaacctcagcagacatcagaaaattcatgctcggaagaatgcctacaggaatgaaaacttaataattgtgggaaatact

SEQ ID NO: 4818 - DNA, 1716 bp, Homo sapiens
  source 1..1716: mol_type = genomic DNA
atgccaggaccccttggaagcctagaaatgggagtgttgacatttagggatgtggccttagaattctctctggaggagtggcaatgcctggacaccgcacagcagaatttatataggaatgtgatgttagagaactacagaaacctggtctttgtgggtattgctgcctctaagccagacctgatcacctgtctggagcaaggaaaagaaccttggaatgtgaagagacatgagatggtaactgaacccccagttgtatattcttattttgcccaagacctttggccaaagcagggcaaaaaaaattatttccaaaaagtgatactgagaacatataaaaaatgtggacgtgaaaatttacagttaagaaaatactgtaaaagcatggatgagtgtaaggtgcacaaagaatgttacaatggacttaaccagtgtttgacaactacccagaacaaaatatttcaatatgacaaatatgtgaaagtctttcataaattttcaaattcaaacagacataagataggacatactggaaagaaatctttcaagtgtaaagaatgtgaaaagtcattttgcatgctttcacacttagctcaacataaaagaattcatagtggagagaaaccctacaaatgtaaagaatgtgggaaagcctataatgaggcctcaaacctttctacacataaaagaattcatactggaaagaaaccctacaaatgcgaagagtgtggaaaagcctttaaccggctctcacaccttactacacataagataattcatactggaaagaaaccctacaaatgtgaggagtgtggcaaagcttttaaccaatctgcaaaccttactacacataagagaattcatactggagagaaaccctacaaatgtgaagaatgtggcagagcttttagccagtcctcaacccttactgcacataagataattcatgctggagagaaaccttacaaatgtgaagaatgtggcaaagcttttagccagtcctcaacccttactacacataagataattcatactggagagaaattctacaaatgtgaagaatgtggtaaggcctttagccggttatcccaccttactacacataagagaattcattctggagagaaaccctacaagtgtgaagaatgtggcaaagcttttaaacaatcctcaacccttactacacataagagaattcatgctggagagaaattctacaaatgtgaagtatgtagcaaagcctttagccggttctcacaccttactacacataagagaattcatactggagagaagccctacaaatgtgaagaatgtggcaaagcttttaacctatcatcacaacttactacacataagataattcatactggagagaaaccctacaaatgtgaagaatgtggcaaagcttttaaccagtcctcaactctttctaaacataaggtaattcatactggagagaagccctacaaatgtgaagaatgtggcaaagcttttaaccagtcctcacaccttactacacataagatgattcatactggagagaaaccctacaagtgtgaagaatgcggcaaagcctttaacaactcctctattcttaacagacataagatgattcatactggagagaaactctacaaacctgaaagttgtaacaatgcttgtgacaacattgcaaagatttccaaatataaaagaaattgtgctggtgagaaa

SEQ ID NO: 4819 - DNA, 1929 bp, Homo sapiens
  source 1..1929: mol_type = genomic DNA
atggcctcagtggctttagaggatgtggctgtgaacttcacccgagaagagtgggctttgctgggtccttgtcagaagaatctctacaaagatgtgatgcaggaaaccatcaggaacctggattgtgtaggaatgaaatggaaagaccagaacattgaagatcaatatagatatcccaggaaaaatctaagatgtcgtatgttagagagatttgttgaaagtaaagatggaactcaatgtggagaaacatctagccagattcaagatagtattgtgaccaagaacactcttcctggagtaggtccatatgaaagccgtatgagtggagaagtcatcatgggtcattcatcccttaattgttacatcagagttggtgctgggcacaaaccatatgagtatcatgaatgtggagagaagccagatacgcataaacaacgtgggaaagccttcagttaccacaactcacttcaaacacatgagaggcttcacactggaaagaaaccatataattgtaaagaatgtgggaagtccttcagttctttgggaaaccttcaaagacacatggcagtgcagcgtggagatggaccttataaatgtaagttgtgtgggaaagcgtttttttggcccagtttattacatatgcatgagagaacgcacactggagagaaaccatatgaatgtaagcagtgttctaaagccttttctttttacagttcctatctaagacatgaaagaacacatactggggagaaactgtatgaatgtaaacagtgttctaaagccttccctgattacagttcttgtctaagacatgaaagaactcacactggaaagaaaccctatacatgtaaacaatgtgggaaagccttcagtgcttccacttcccttcgaagacacgaaacaactcacactgatgagaaaccctatgcatgtcagcaatgtgggaaagcgtttcatcatctgggaagctttcaaagacacatggtaatgcacacgagagatggacctcataagtgtaagatatgtggaaaaggctttgattgtcctagttcactgaaaagtcatgaaagaactcacactggagagaaactctatgaatgcaagcagtgtgggaaagcgttatctcatagctcaagctttcgaagacacatgacaatgcacactggagatggacctcacaaatgcaagatatgtgggaaagcctttgtttatcccagtgtatttcaaaggcatgaaaagactcacactgcagagaaaccctataaatgtaaacaatgtggcaaagcctaccgtatttccagttctcttcgaaggcatgaaacaactcatactggagagaaaccctataaatgcaaatgtgggaaagcctttattgatttctattcctttcaaaatcacaaaacaactcatgctggagagaagccatatgagtgtaaggaatgtgggaaagcattcagttgtttccaatacctttctcaacatagaaggactcacacaggagagaaaccttatgagtgtaacacatgtaagaaagccttcagtcattttggtaacttaaaagtacatgaaagaattcactctggagagaagccgtatgaatgtaaggaatgtgggaaagcattctcttggctcacttgctttctacgacatgaaagaattcacatgagagagaaaccctatgagtgtcaacaatgtggtaaagccttcactcattcccgttttcttcaaggacatgaaaaaactcatactggagagaacccgtatgaatgtaaggaatgtgggaaagcatttgcttctctcagttccttgcatagacataaaaagactcactggaaaaaaactcacactggagagaacccgtatggatgtaaggaatgtgggaaagcatttgcttctctcagttccttgcatagacataaaaagactcac

SEQ ID NO: 4820 - DNA, 1833 bp, Homo sapiens
  source 1..1833: mol_type = genomic DNA
atgcaggaaaccatcaggaacctggattgtgtaggaatgaaatggaaagaccagaacattgaagatcaatatagatatcccaggaaaaatctaagatgtcgtatgttagagagatttgttgaaagtaaagatggaactcaatgtggagaaacatctagccagattcaagatagtattgtgaccaagaacactcttcctggagtaggtccatatgaaagccgtatgagtggagaagtcatcatgggtcattcatcccttaattgttacatcagagttggtgctgggcacaaaccatatgagtatcatgaatgtggagagaagccagatacgcataaacaacgtgggaaagccttcagttaccacaactcacttcaaacacatgagaggcttcacactggaaagaaaccatataattgtaaagaatgtgggaagtccttcagttctttgggaaaccttcaaagacacatggcagtgcagcgtggagatggaccttataaatgtaagttgtgtgggaaagcgtttttttggcccagtttattacatatgcatgagagaacgcacactggagagaaaccatatgaatgtaagcagtgttctaaagccttttctttttacagttcctatctaagacatgaaagaacacatactggggagaaactgtatgaatgtaaacagtgttctaaagccttccctgattacagttcttgtctaagacatgaaagaactcacactggaaagaaaccctatacatgtaaacaatgtgggaaagccttcagtgcttccacttcccttcgaagacacgaaacaactcacactgatgagaaaccctatgcatgtcagcaatgtgggaaagcgtttcatcatctgggaagctttcaaagacacatggtaatgcacacgagagatggacctcataagtgtaagatatgtggaaaaggctttgattgtcctagttcactgaaaagtcatgaaagaactcacactggagagaaactctatgaatgcaagcagtgtgggaaagcgttatctcatagctcaagctttcgaagacacatgacaatgcacactggagatggacctcacaaatgcaagatatgtgggaaagcctttgtttatcccagtgtatttcaaaggcatgaaaagactcacactgcagagaaaccctataaatgtaaacaatgtggcaaagcctaccgtatttccagttctcttcgaaggcatgaaacaactcatactggagagaaaccctataaatgcaaatgtgggaaagcctttattgatttctattcctttcaaaatcacaaaacaactcatgctggagagaagccatatgagtgtaaggaatgtgggaaagcattcagttgtttccaatacctttctcaacatagaaggactcacacaggagagaaaccttatgagtgtaacacatgtaagaaagccttcagtcattttggtaacttaaaagtacatgaaagaattcactctggagagaagccgtatgaatgtaaggaatgtgggaaagcattctcttggctcacttgctttctacgacatgaaagaattcacatgagagagaaaccctatgagtgtcaacaatgtggtaaagccttcactcattcccgttttcttcaaggacatgaaaaaactcatactggagagaacccgtatgaatgtaaggaatgtgggaaagcatttgcttctctcagttccttgcatagacataaaaagactcactggaaaaaaactcacactggagagaacccgtatggatgtaaggaatgtgggaaagcatttgcttctctcagttccttgcatagacataaaaagactcac

SEQ ID NO: 4821 - DNA, 1605 bp, Homo sapiens
  source 1..1605: mol_type = genomic DNA
atgggcatcgtggagccgggttgcggagacatgctgacgggcaccgagccgatgccggggagcgacgagggccgggcgcctggcgccgacccgcagcaccgctacttctacccggagccgggcgcgcaggacgcggacgagcgtcgcgggggcggcagcctggggtctccctacccggggggcgccttggtgcccgccccgccgagccgcttccttggagcctacgcctacccgccgcgaccccaggcggccggcttccccggcgcgggcgagtccttcccgccgcccgcggacgccgagggctaccagccgggcgagggctacgccgccccggacccgcgcgccgggctctacccggggccgcgtgaggactacgcgctacccgcgggactggaggtgtcggggaaactgagggtcgcgctcaacaaccacctgttgtggtccaagtttaatcagcaccagacagagatgatcatcaccaagcagggacggcggatgttcccattcctgtcatttactgtggccgggctggagcccaccagccactacaggatgtttgtggacgtggtcttggtggaccagcaccactggcggtaccagagcggcaagtgggtgcagtgtggaaaggccgagggcagcatgccaggaaaccgcctgtacgtccacccggactcccccaacacaggagcgcactggatgcgccaggaagtttcatttgggaaactaaagctcacaaacaacaagggggcgtccaacaatgtgacccagatgattgtgctccagtccctccataagtaccagccccggctgcatatcgttgaggtgaacgacggagagccagaggcagcctgcaacgcttccaacacgcatatctttactttccaagaaacccagttcattgccgtgactgcctaccagaatgccgagattactcagctgaaaattgataataacccctttgccaaaggattccgggagaactttgagtccatgtacacatctgttgacaccagcatcccctccccgcctggacccaactgtcaattccttgggggagatcactactctcctctcctacccaaccagtatcctgttcccagccgcttctaccccgaccttcctggccaggcgaaggatgtggttccccaggcttactggctgggggccccccgggaccacagctatgaggctgagtttcgagcagtcagcatgaagcctgcattcttgccctctgcccctgggcccaccatgtcctactaccgaggccaggaggtcctggcacctggagctggctggcctgtggcaccccagtaccctcccaagatgggcccggccagctggttccgccctatgcggactctgcccatggaacccggccctggaggctcagagggacggggaccagaggaccagggtccccccttggtgtggactgagattgcccccatccggccggaatccagtgattcaggactgggcgaaggagactctaagaggaggcgcgtgtccccctatccttccagtggtgacagctcctcccctgctggggccccttctccttttgataaggaagctgaaggacagttttataactattttcccaac

SEQ ID NO: 4822 - DNA, 1341 bp, Homo sapiens
  source 1..1341: mol_type = genomic DNA
atggagttcacggcgtcccccaagccccaactctcctctcgggccaacgccttctccattgccgcgctcatgtcgagcggcggctctaaggagaaggaggcgacggagaacacaatcaaacccctggagcaatttgtggagaagtcgtcctgtgcccagcccctgggtgagctgaccagcctggatgctcatggggagtttggtggaggcagtggcagcagcccgtcctcctcctctctgtgcactgagccactgatccccaccacccccatcatccccagtgaggaaatggccaaaattgcctgcagcctggagaccaaggagctttgggacaaattccatgagctgggcaccgagatgatcatcaccaagtcgggcaggaggatgtttccaaccatccgggtgtccttttcgggggtggatcctgaggccaagtacatagtcctgatggacatcgtccctgtggacaacaagaggtaccgctacgcctaccaccggtcctcctggctggtggctggcaaggccgacccgccgttgccagccaggctctatgtgcatccagattctccttttaccggtgagcaactactcaaacagatggtgtcttttgaaaaggtgaaactcaccaacaatgaactggatcaacatggccatataattttgaactcaatgcataagtaccagccaagggtgcacatcattaagaagaaagaccacacagcctcattgctcaacctgaagtctgaagaatttagaactttcatctttccagaaacagtttttacggcagtcactgcctaccagaatcaactgataacgaagctgaaaatagatagcaatccttttgccaaaggattccgggattcctccaggctcactgacattgagagggaaagtgtggagagcctgattcaaaagcattcctatgcacgctcacccatccgtacctacggaggagaagaagatgtcttgggggatgagagtcagacaaccccaaatcgagggtcagcctttacaacatctgataatttgtctctcagctcctgggtatcatcttcttccagttttcctgggtttcagcacccacagtccctgactgctcttggcaccagcacagcatccatagcaacacccattcctcaccccatccagggttctctgccaccatatagccgactgggaatgcctctgacaccatcggccattgccagctccatgcaagggagtggccccacattcccttcattccacatgccgcgataccatcactattttcagcaggggccctatgctgccattcaaggactacgccattcctctgctgtgatgacgccatttgta

SEQ ID NO: 4823 - DNA, 1695 bp, Homo sapiens
  source 1..1695: mol_type = genomic DNA
atggaggactcggactcggcggcaaagcagctgggcctggctgaggcggcggcggtggcggccgcggccgctgtggcggcggcggccgcggccgcggcaggaggcgaggcggaggagccggtgctgagcagggacgaggactcggaggaggacgcagactcggaggcggagcgggagacgccgcgggtcacggcagtggcggtgatggcggcggagcccgggcacatggacatgggcgccgaggccctgcccggccccgacgaggccgccgctgccgcagccttcgcagaggtgaccacagtgacagtggccaacgtgggggctgctgcagacaatgtcttcaccacgtctgtggcgaacgcggcatccatctcaggacatgttctgtctggtaggacggcccttcagatcggggacagcctgaacaccgaaaaagcgacactgattgtcgtccacacagatgggagcatcgtggagaccaccgggctgaaaggcccggcagctcccctcaccccaggtcctcagtctcctccaacccctctggctcccggccaagaaaaaggtggaactaaatacaactgggacccttctgtgtacgacagtgagctgcccgtacggtgccggaacatcagcggcactctgtacaagaacaggctcggctcaggcggccggggacggtgcatcaagcagggggagaactggtacagtcccaccgagtttgaggccatggcaggaagagccagcagtaaggactggaaaagaagcattcgctacgcgggccgacccttgcagtgcctcatccaggatgggatcttaaaccctcacgctgcctcttgcacctgtgctgcctgctgcgacgacatgaccttaagtggcccagtcaggctttttgtgccttacaaaaggcgcaagaaggagaatgaactgcccacaactcccgtgaagaaggactcccccaagaacatcacattgcttccagccaccgcggctaccaccttcaccgtgaccccctcgggacagatcacgacctcgggggcactgacctttgaccgagcgtccacggtagaggccactgctgtcatatcagagagtccggcccagggcgacgtcttcgcaggggccacagtccaagaggccagcgtgcagcccccatgcagggccagccaccctgagcctcactaccccggctatcaggacagctgccagatcgcaccgtttccagaagctgcgttgccaacgtcacatcccaaaatagtgttgacatccctgcctgcgctggcggtcccacccccgactcccaccaaagcggcacctcccgcgttggtcaatgggctggagctgtcagagccgcggagctggctgtacctagaagagatggtcaactccttgctcaacacagcgcagcagctgaagacgctgtttgagcaagccaagcatgccagcacctaccgagaagctgccacaaaccaggccaagatccacgctgacgcagagcggaaggagcagtcctgcgttaactgcggccgggaggctatgagcgagtgcaccggctgccacaaggtcaactactgctccaccttctgccaacgcaaggactggaaggatcaccagcacatatgcggccagtcagcagctgtcaccgtccaggcagacgaagtccacgtggctgaaagcgtgatggagaaggtgaccgtg

SEQ ID NO: 4824 - DNA, 1818 bp, Homo sapiens
  source 1..1818: mol_type = genomic DNA
atgtctacagcctctgccgcctcctcctcctcctcgtcttcggccggtgagatgatcgaagccccttcccaggtcctcaactttgaagagatcgactacaaggagatcgaggtggaagaggttgttggaagaggagcctttggagttgtttgcaaagctaagtggagagcaaaagatgttgctattaaacaaatagaaagtgaatctgagaggaaagcgtttattgtagagcttcggcagttatcccgtgtgaaccatcctaatattgtaaagctttatggagcctgcttgaatccagtgtgtcttgtgatggaatatgctgaagggggctctttatataatgtgctgcatggtgctgaaccattgccatattatactgctgcccacgcaatgagttggtgtttacagtgttcccaaggagtggcttatcttcacagcatgcaacccaaagcgctaattcacagggacctgaaaccaccaaacttactgctggttgcaggggggacagttctaaaaatttgtgattttggtacagcctgtgacattcagacacacatgaccaataacaaggggagtgctgcttggatggcacctgaagtttttgaaggtagtaattacagtgaaaaatgtgacgtcttcagctggggtattattctttgggaagtgataacgcgtcggaaaccctttgatgagattggtggcccagctttccgaatcatgtgggctgttcataatggtactcgaccaccactgataaaaaatttacctaagcccattgagagcctgatgactcgttgttggtctaaagatccttcccagcgcccttcaatggaggaaattgtgaaaataatgactcacttgatgcggtactttccaggagcagatgagccattacagtatccttgtcagtattcagatgaaggacagagcaactctgccaccagtacaggctcattcatggacattgcttctacaaatacgagtaacaaaagtgacactaatatggagcaagttcctgccacaaatgatactattaagcgcttagaatcaaaattgttgaaaaatcaggcaaagcaacagagtgaatctggacgtttaagcttgggagcctcccgtgggagcagtgtggagagcttgcccccaacctctgagggcaagaggatgagtgctgacatgtctgaaatagaagctaggatcgccgcaaccacagcctattccaagcctaaacggggccaccgtaaaactgcttcatttggcaacattctggatgtccctgagatcgtcatatcaggcaacggacagccaagacgtagatccatccaagacttgactgtaactggaacagaacctggtcaggtgagcagtaggtcatccagtcccagtgtcagaatgattactacctcaggaccaacctcagaaaagccaactcgaagtcatccatggacccctgatgattccacagataccaatggatcagataactccatcccaatggcttatcttacactggatcaccaactacagcctctagcaccgtgcccaaactccaaagaatctatggcagtgtttgaacagcattgtaaaatggcacaagaatatatgaaagttcaaacagaaattgcattgttattacagagaaagcaagaactagttgcagaactggaccaggatgaaaaggaccagcaaaatacatctcgcctggtacaggaacataaaaagcttttagatgaaaacaaaagcctttctacttactaccagcaatgcaaaaaacaactagaggtcatcagaagtcagcagcagaaacgacaaggcacttca

SEQ ID NO: 4825 - DNA, 1554 bp, Homo sapiens
  source 1..1554: mol_type = genomic DNA
atgtctacagcctctgccgcctcctcctcctcctcgtcttcggccggtgagatgatcgaagccccttcccaggtcctcaactttgaagagatcgactacaaggagatcgaggtggaagaggttgttggaagaggagcctttggagttgtttgcaaagctaagtggagagcaaaagatgttgctattaaacaaatagaaagtgaatctgagaggaaagcgtttattgtagagcttcggcagttatcccgtgtgaaccatcctaatattgtaaagctttatggagcctgcttgaatccagtgtgtcttgtgatggaatatgctgaagggggctctttatataatgtgctgcatggtgctgaaccattgccatattatactgctgcccacgcaatgagttggtgtttacagtgttcccaaggagtggcttatcttcacagcatgcaacccaaagcgctaattcacagggacctgaaaccaccaaacttactgctggttgcaggggggacagttctaaaaatttgtgattttggtacagcctgtgacattcagacacacatgaccaataacaaggggagtgctgcttggatggcacctgaagtttttgaaggtagtaattacagtgaaaaatgtgacgtcttcagctggggtattattctttgggaagtgataacgcgtcggaaaccctttgatgagattggtggcccagctttccgaatcatgtgggctgttcataatggtactcgaccaccactgataaaaaatttacctaagcccattgagagcctgatgactcgttgttggtctaaagatccttcccagcgcccttcaatggaggaaattgtgaaaataatgactcacttgatgcggtactttccaggagcagatgagccattacagtatccttgtcagtattcagatgaaggacagagcaactctgccaccagtacaggctcattcatggacattgcttctacaaatacgagtaacaaaagtgacactaatatggagcaagttcctgccacaaatgatactattaagcgcttagaatcaaaattgttgaaaaatcaggcaaagcaacagagtgaatctggacgtttaagcttgggagcctcccgtgggagcagtgtggagagcttgcccccaacctctgagggcaagaggatgagtgctgacatgtctgaaatagaagctaggatcgccgcaaccacagcctattccaagcctaaacggggccaccgtaaaactgcttcatttggcaacattctggatgtccctgagatcgtcatatcaggcaacggacagccaagacgtagatccatccaagacttgactgtaactggaacagaacctggtcaggtgagcagtaggtcatccagtcccagtgtcagaatgattactacctcaggaccaacctcagaaaagccaactcgaagtcatccatggacccctgatgattccacagataccaatggatcagataactccatcccaatggcttatcttacactggatcaccaactacaggcaagaactagttgcagaactggaccagga

SEQ ID NO: 4826 - DNA, 1737 bp, Homo sapiens
  source 1..1737: mol_type = genomic DNA
atgtctacagcctctgccgcctcctcctcctcctcgtcttcggccggtgagatgatcgaagccccttcccaggtcctcaactttgaagagatcgactacaaggagatcgaggtggaagaggttgttggaagaggagcctttggagttgtttgcaaagctaagtggagagcaaaagatgttgctattaaacaaatagaaagtgaatctgagaggaaagcgtttattgtagagcttcggcagttatcccgtgtgaaccatcctaatattgtaaagctttatggagcctgcttgaatccagtgtgtcttgtgatggaatatgctgaagggggctctttatataatgtgctgcatggtgctgaaccattgccatattatactgctgcccacgcaatgagttggtgtttacagtgttcccaaggagtggcttatcttcacagcatgcaacccaaagcgctaattcacagggacctgaaaccaccaaacttactgctggttgcaggggggacagttctaaaaatttgtgattttggtacagcctgtgacattcagacacacatgaccaataacaaggggagtgctgcttggatggcacctgaagtttttgaaggtagtaattacagtgaaaaatgtgacgtcttcagctggggtattattctttgggaagtgataacgcgtcggaaaccctttgatgagattggtggcccagctttccgaatcatgtgggctgttcataatggtactcgaccaccactgataaaaaatttacctaagcccattgagagcctgatgactcgttgttggtctaaagatccttcccagcgcccttcaatggaggaaattgtgaaaataatgactcacttgatgcggtactttccaggagcagatgagccattacagtatccttgtcagtattcagatgaaggacagagcaactctgccaccagtacaggctcattcatggacattgcttctacaaatacgagtaacaaaagtgacactaatatggagcaagttcctgccacaaatgatactattaagcgcttagaatcaaaattgttgaaaaatcaggcaaagcaacagagtgaatctggacgtttaagcttgggagcctcccgtgggagcagtgtggagagcttgcccccaacctctgagggcaagaggatgagtgctgacatgtctgaaatagaagctaggatcgccgcaaccacaggcaacggacagccaagacgtagatccatccaagacttgactgtaactggaacagaacctggtcaggtgagcagtaggtcatccagtcccagtgtcagaatgattactacctcaggaccaacctcagaaaagccaactcgaagtcatccatggacccctgatgattccacagataccaatggatcagataactccatcccaatggcttatcttacactggatcaccaactacagcctctagcaccgtgcccaaactccaaagaatctatggcagtgtttgaacagcattgtaaaatggcacaagaatatatgaaagttcaaacagaaattgcattgttattacagagaaagcaagaactagttgcagaactggaccaggatgaaaaggaccagcaaaatacatctcgcctggtacaggaacataaaaagcttttagatgaaaacaaaagcctttctacttactaccagcaatgcaaaaaacaactagaggtcatcagaagtcagcagcagaaacgacaaggcacttca

SEQ ID NO: 4827 - DNA, 1776 bp, Homo sapiens
  source 1..1776: mol_type = genomic DNA
atgtgcatgtatttgttctttctggacttctcgattgtcgggagtgggctgaggagtggcgtgtgggtctccggaagctcgtcgcaggccatctgtgtgactccggtgcgagtggagtcatctgaggccactgctatttcccaagagaagagccaggaggaagaaagaatggctgttgggcttcttaaagccatgtaccaggagttggtgaccttcagagatgtggctgtagacttctcccaagaggaatgggattgtctggattcttctcaaagacatctgtacagtaatgtgatgctagagaactacaggatcttggtatcactgggactttgcttttccaaaccaagtgtgatattattgttggaacaaggaaaagcaccctggatggtgaagagagagctgacaaaaggcttgtgctcaggctgggagcctatatgtgagactgaagaattaaccccaaagcaggatttttatgaagaacatcaatcccagaagataatagaaacacttacaagctataaccttgaatactccagtttgagagaagagtggaaatgtgagggctattttgaaaggcaaccaggtaatcagaaggcgtgtttcaaggaagagataatcactcatgaagaacccctttttgatgagagagaacaagaatataaatcttggggaagttttcatcagaacccactgctttgtacacaaaagataatccccaaagaggagaaagtacataaacatgacacacaaaagagaagctttaaaaaaaatttaatggctattaagcccaagagtgtctgtgcagagaagaaacttttgaaatgtaatgactgtgaaaaagtcttcagccagagttcatcccttactcttcatcaaagaattcatactggagagaaaccctataaatgtatagagtgtggaaaagccttcagccagagatcaaatcttgttcaacatcagaggattcatactggagaaaaaccctatgaatgtaaggaatgtaggaaagccttcagtcagaatgcacacctagttcaacatctgcgagttcatactggagaaaaaccttacgaatgtaaggtatgtcgaaaagccttcagccagtttgcctaccttgctcaacatcagagagttcacacgggagagaaaccctatgaatgtatcgaatgtgggaaagcatttagcaacagatcatccattgctcaacaccagagagttcatacaggagagaaaccctatgaatgtaatgtctgtgggaaagcatttagccttcgtgcataccttactgtacatcagagaatacatactggagagagaccctatgaatgtaaggaatgtgggaaggcctttagccagaattcacaccttgctcaacatcagagaattcatactggagaaaaaccttataagtgtcaggaatgtaggaaagcattcagccagattgcctaccttgctcagcatcaaagagttcatactggagagaaaccctatgaatgtattgaatgtgggaaggcttttagcaatgactcgtcccttactcaacatcagcgagttcatactggagagaaaccttatgaatgtactgtttgtggaaaggcttttagttactgtggatcccttgcccaacatcagagaattcatactggagagagaccctatgaatgtaaggaatgcaaaaaaaccttcaggcagcatgcacaccttgctcatcaccagagaattcacattggggagtcactgtcaccacccaacccagtcaatcaccaagtccta

SEQ ID NO: 4828 - DNA, 1608 bp, Homo sapiens
  source 1..1608: mol_type = genomic DNA
atggctgttgggcttcttaaagccatgtaccaggagttggtgaccttcagagatgtggctgtagacttctcccaagaggaatgggattgtctggattcttctcaaagacatctgtacagtaatgtgatgctagagaactacaggatcttggtatcactgggactttgcttttccaaaccaagtgtgatattattgttggaacaaggaaaagcaccctggatggtgaagagagagctgacaaaaggcttgtgctcaggctgggagcctatatgtgagactgaagaattaaccccaaagcaggatttttatgaagaacatcaatcccagaagataatagaaacacttacaagctataaccttgaatactccagtttgagagaagagtggaaatgtgagggctattttgaaaggcaaccaggtaatcagaaggcgtgtttcaaggaagagataatcactcatgaagaacccctttttgatgagagagaacaagaatataaatcttggggaagttttcatcagaacccactgctttgtacacaaaagataatccccaaagaggagaaagtacataaacatgacacacaaaagagaagctttaaaaaaaatttaatggctattaagcccaagagtgtctgtgcagagaagaaacttttgaaatgtaatgactgtgaaaaagtcttcagccagagttcatcccttactcttcatcaaagaattcatactggagagaaaccctataaatgtatagagtgtggaaaagccttcagccagagatcaaatcttgttcaacatcagaggattcatactggagaaaaaccctatgaatgtaaggaatgtaggaaagccttcagtcagaatgcacacctagttcaacatctgcgagttcatactggagaaaaaccttacgaatgtaaggtatgtcgaaaagccttcagccagtttgcctaccttgctcaacatcagagagttcacacgggagagaaaccctatgaatgtatcgaatgtgggaaagcatttagcaacagatcatccattgctcaacaccagagagttcatacaggagagaaaccctatgaatgtaatgtctgtgggaaagcatttagccttcgtgcataccttactgtacatcagagaatacatactggagagagaccctatgaatgtaaggaatgtgggaaggcctttagccagaattcacaccttgctcaacatcagagaattcatactggagaaaaaccttataagtgtcaggaatgtaggaaagcattcagccagattgcctaccttgctcagcatcaaagagttcatactggagagaaaccctatgaatgtattgaatgtgggaaggcttttagcaatgactcgtcccttactcaacatcagcgagttcatactggagagaaaccttatgaatgtactgtttgtggaaaggcttttagttactgtggatcccttgcccaacatcagagaattcatactggagagagaccctatgaatgtaaggaatgcaaaaaaaccttcaggcagcatgcacaccttgctcatcaccagagaattcacattggggagtcactgtcaccacccaacccagtcaatcaccaagtccta

SEQ ID NO: 4829 - DNA, 1827 bp, Homo sapiens
  source 1..1827: mol_type = genomic DNA
atgccccacttgttggtgactttcagggatgtggccattgacttctctcaggaggaatgggaatgcctggaccctgctcagagggacttgtacagggatgtgatgttggagaactacagcaacctgatctcattggacttggaatccagttgtgtgaccaaaaagttatctccagaaaaggaaatttatgaaatggaatcactccagtgggagaatatggggaaacgtatcaaccatcaccttcaatacaatggtcttggagacaatatggagtgcaaaggcaacttagagggtcaagaagcaagtcaggaagggctttacatgtgtgtcaaaattacctgtgaagaaaaggccactgaaagtcattcaacctcttctacttttcatcggataattcctaccaaggaaaaattgtacaaatgtaaggaatgcagacaaggtttcagctacctgtcatgccttattcaacatgaggaaaatcataatatagaaaaatgctctgaagttaagaaacacaggaatacctttagcaaaaagccaagctatattcaacatcagagaattcagactggtgagaaaccttatgagtgtatggaatgtggaaaggcctttggtcgtacttctgatctcattcaacatcagaaaattcatactaatgaaaaaccttatcagtgtaacgcatgtgggaaagcttttattcgtggttcacagctcactgaacatcagagagttcatacaggagagaaaccatatgaatgtaagaaatgtggaaaagcctttagttattgttcacaatatactcttcatcagagaattcatagtggtgaaaaaccctatgaatgtaaggattgtgggaaggcctttattcttggctctcaacttacttaccatcagagaattcatagtggtgagaaaccttatgagtgtaaggaatgtggaaaggcctttattcttggttcacaccttacataccatcagagagttcatactggtgaaaagccttacatatgtaaagaatgtgggaaagcctttttatgtgcctcccaactgaatgaacatcagagaattcatacaggagagaaaccctatgaatgtaaagaatgcgggaagaccttttttcgtggctcacaacttacttaccacctgagagttcattcaggtgagagaccttataaatgcaaagaatgtgggaaagcctttatttctaattctaatcttattcaacatcaaagaattcataccggagagaagccctacaaatgtaaggaatgtggaaaggcctttatttgtggcaaacaacttagtgaacatcagagaattcatacaggtgagaaaccctttgaatgtaaggaatgtggaaaggcctttattcgtgttgcatatcttactcaacatgagaaaattcatggtgagaaacattatgaatgtaaggaatgtgggaagacctttgtacgtgctacacaacttacatatcatcaaagaattcatacaggtgaaaagccctacaaatgtaaggaatgtgacaaggcctttatttatggctcacaacttagtgaacatcagagaattcacagaggtgaaaaaccttatgaatgtaaacagtgtgggaaggcttttattcgtggctcacaccttactgaacatctgagaactcatactggagagaaaccctatgaatgtaaggaatgtgggagggcctttagtcgtggctcagaacttactctgcatcaaaggatccatactggtgagaaaccctatacatgtgtccagtgtggtaaagactttagatgtccttcacaacttactcaacatacaaggcttcataat

SEQ ID NO: 4830 - DNA, 1995 bp, Homo sapiens
  source 1..1995: mol_type = genomic DNA
atgtttccagtattggaaccccaccaagtaggactgatcaggtcttacaattctaaaaccatgacctgttttcaggaattagtgacattcagggatgtggccatagacttctctcggcaggagtgggaatacctggaccctaatcagagggacttatacagggatgtgatgttggagaactatagaaacctggtatcactgggaggacattccatttctaaaccagttgtggttgatttactggagcgaggaaaagagccctggatgattttgagggaagaaacacagttcacagatttggatttacagtgtgagataatcagctacatagaagtacccacttatgaaacagatatatcctctacacaacttcagagcatatataagagagagaaactctatgaatgtaagaaatgtcagaagaaatttagtagtggttatcaacttattctacatcacaggtttcatgtcattgagagaccctatgaatgcaaagagtgtgggaagaactttcgtagtggctatcaacttactctacatcaaagatttcatactggtgagaaaccctatgaatgtacagaatgtgggaagaactttagaagtggttatcagctgactgtgcatcagagatttcatactggtgagaaaacctatgaatgtaggcagtgtgggaaggcctttatatatgcctcacacattgttcaacatgagagaattcacactggtgggaagccgtatgaatgtcaggagtgtgggagggcctttagtcaaggtggacatcttagaattcatcagagagttcatactggcgaaaaaccatataaatgtaaggaatgtgggaagacttttagtaggcgctcaaatcttgttgaacatgggcagtttcatactgatgagaagccatacatatgtgagaaatgtggaaaggcctttagaagaggtcaccagcttactgtacatcagagagttcacactggtaaaaagccatatgagtgtaaagaatgtgggaagggctataccactgcctcatactttcttctacatcagagaattcataaaggtggaaaaccctatgaatgtaaggagtgtaagaaaacctttactttgtatagaaatcttactcggcatcagaatattcatactggtgagaaactttttgaatgcaagcaatgtgggaagacctatactactggttcaaaactctttcaacatcagaaaactcatactggcgagaaaccctatgaatgcaaggaatgcggaaaggcctttagcttgtatggctaccttaaacaacatcagaaaattcatactggcatgaaacactttgaatgtaaggagtgtaaaaaaacctttactttgtatagaaatcttactcgacatcagaatattcacactggtaagaaactttttgaatgtcaggaatgtgggaaggcctatagtactggctcaaaccttattcaacatcggaaaactcatactggtgagaaaccctataaatgtaaggaatgtggcaagacctttagcttgcatggatatcttaatcaacatcagaaaattcatactggtatgaaaccctatgaatgtaaggtatgtagaaaaacctttactttctatagaaatcttactctacatcaaagtattcatactgatgagaaaccttttgaatgtaaggaatgtgggaagacctttagacgtagttcacaccttactgcacatcagagcattcatgctgataaaaaaccctatgaatgtaaagaatgtggaaaggcctttaaaatgtatggctaccttacccaacatcagaaaattcatactggtggaaaaccttatgaatgtaaagaatgtgggaaggccttcagtcgtgcttcaaaccttgttcaacatgagagaattcatactggtgagaaaccctatgtgtgtaagcagtgtgggaaaaccttcagatatggttcagcccttaaagcccatcagagaattcataggagcataaaagtg

SEQ ID NO: 4831 - DNA, 1731 bp, Homo sapiens
  source 1..1731: mol_type = genomic DNA
atgattttgagggaagaaacacagttcacagatttggatttacagtgtgagataatcagctacatagaagtacccacttatgaaacagatatatcctctacacaacttcagagcatatataagagagagaaactctatgaatgtaagaaatgtcagaagaaatttagtagtggttatcaacttattctacatcacaggtttcatgtcattgagagaccctatgaatgcaaagagtgtgggaagaactttcgtagtggctatcaacttactctacatcaaagatttcatactggtgagaaaccctatgaatgtacagaatgtgggaagaactttagaagtggttatcagctgactgtgcatcagagatttcatactggtgagaaaacctatgaatgtaggcagtgtgggaaggcctttatatatgcctcacacattgttcaacatgagagaattcacactggtgggaagccgtatgaatgtcaggagtgtgggagggcctttagtcaaggtggacatcttagaattcatcagagagttcatactggcgaaaaaccatataaatgtaaggaatgtgggaagacttttagtaggcgctcaaatcttgttgaacatgggcagtttcatactgatgagaagccatacatatgtgagaaatgtggaaaggcctttagaagaggtcaccagcttactgtacatcagagagttcacactggtaaaaagccatatgagtgtaaagaatgtgggaagggctataccactgcctcatactttcttctacatcagagaattcataaaggtggaaaaccctatgaatgtaaggagtgtaagaaaacctttactttgtatagaaatcttactcggcatcagaatattcatactggtgagaaactttttgaatgcaagcaatgtgggaagacctatactactggttcaaaactctttcaacatcagaaaactcatactggcgagaaaccctatgaatgcaaggaatgcggaaaggcctttagcttgtatggctaccttaaacaacatcagaaaattcatactggcatgaaacactttgaatgtaaggagtgtaaaaaaacctttactttgtatagaaatcttactcgacatcagaatattcacactggtaagaaactttttgaatgtcaggaatgtgggaaggcctatagtactggctcaaaccttattcaacatcggaaaactcatactggtgagaaaccctataaatgtaaggaatgtggcaagacctttagcttgcatggatatcttaatcaacatcagaaaattcatactggtatgaaaccctatgaatgtaaggtatgtagaaaaacctttactttctatagaaatcttactctacatcaaagtattcatactgatgagaaaccttttgaatgtaaggaatgtgggaagacctttagacgtagttcacaccttactgcacatcagagcattcatgctgataaaaaaccctatgaatgtaaagaatgtggaaaggcctttaaaatgtatggctaccttacccaacatcagaaaattcatactggtggaaaaccttatgaatgtaaagaatgtgggaaggccttcagtcgtgcttcaaaccttgttcaacatgagagaattcatactggtgagaaaccctatgtgtgtaagcagtgtgggaaaaccttcagatatggttcagcccttaaagcccatcagagaattcataggagcataaaagtg

SEQ ID NO: 4832 - DNA, 1821 bp, Homo sapiens
  source 1..1821: mol_type = genomic DNA
atggagtcttgctctgtcgcacaggctggagtgcagtggcccgatctcagctcactgcaacctccgcctcccaggttcaagcaattctcctgccacagcctccaagtagctgggattacagatttggatttacagtgtgagataatcagctacatagaagtacccacttatgaaacagatatatcctctacacaacttcagagcatatataagagagagaaactctatgaatgtaagaaatgtcagaagaaatttagtagtggttatcaacttattctacatcacaggtttcatgtcattgagagaccctatgaatgcaaagagtgtgggaagaactttcgtagtggctatcaacttactctacatcaaagatttcatactggtgagaaaccctatgaatgtacagaatgtgggaagaactttagaagtggttatcagctgactgtgcatcagagatttcatactggtgagaaaacctatgaatgtaggcagtgtgggaaggcctttatatatgcctcacacattgttcaacatgagagaattcacactggtgggaagccgtatgaatgtcaggagtgtgggagggcctttagtcaaggtggacatcttagaattcatcagagagttcatactggcgaaaaaccatataaatgtaaggaatgtgggaagacttttagtaggcgctcaaatcttgttgaacatgggcagtttcatactgatgagaagccatacatatgtgagaaatgtggaaaggcctttagaagaggtcaccagcttactgtacatcagagagttcacactggtaaaaagccatatgagtgtaaagaatgtgggaagggctataccactgcctcatactttcttctacatcagagaattcataaaggtggaaaaccctatgaatgtaaggagtgtaagaaaacctttactttgtatagaaatcttactcggcatcagaatattcatactggtgagaaactttttgaatgcaagcaatgtgggaagacctatactactggttcaaaactctttcaacatcagaaaactcatactggcgagaaaccctatgaatgcaaggaatgcggaaaggcctttagcttgtatggctaccttaaacaacatcagaaaattcatactggcatgaaacactttgaatgtaaggagtgtaaaaaaacctttactttgtatagaaatcttactcgacatcagaatattcacactggtaagaaactttttgaatgtcaggaatgtgggaaggcctatagtactggctcaaaccttattcaacatcggaaaactcatactggtgagaaaccctataaatgtaaggaatgtggcaagacctttagcttgcatggatatcttaatcaacatcagaaaattcatactggtatgaaaccctatgaatgtaaggtatgtagaaaaacctttactttctatagaaatcttactctacatcaaagtattcatactgatgagaaaccttttgaatgtaaggaatgtgggaagacctttagacgtagttcacaccttactgcacatcagagcattcatgctgataaaaaaccctatgaatgtaaagaatgtggaaaggcctttaaaatgtatggctaccttacccaacatcagaaaattcatactggtggaaaaccttatgaatgtaaagaatgtgggaaggccttcagtcgtgcttcaaaccttgttcaacatgagagaattcatactggtgagaaaccctatgtgtgtaagcagtgtgggaaaaccttcagatatggttcagcccttaaagcccatcagagaattcataggagcataaaagtg

SEQ ID NO: 4833 - DNA, 2958 bp, Homo sapiens
  source 1..2958: mol_type = genomic DNA
atgccgagagcaacctgggctaacagcaaagagagaagttgggcagagtcagagaggggcccaagagacacaggaaatgggggctcaaaagcggaaagacatatccaggagatagagactggacggggtggggacagggccaaggcccaccgcaggcagaggatgaggctcagaggaacagaaagagccagtctgggaccaggacggaggcttggagacagcaggggcacggacatgccaggggcccgggcccagggccttgctgccgccatgactgaggaatcagaggagacagtcctgtacattgagcaccgctatgtctgctctgagtgcaaccagctgtatggatcactggaagaggtgcttatgcaccaaaactcccacgtgccccagcagcactttgagctggtgggcgtggctgatcccggagtcactgtggccacagacacagcttcaggcacgggcctctatcagacccttgtgcaggagagccagtaccagtgcctggagtgtggtcaactgctgatgtcacccagccagctcctggagcaccaggagctgcacctgaagatgatggcaccccaggaggcagtgccagctgagccatcacctaaggcaccacccctgagctccagcaccatccactacgagtgtgtggattgcaaggctctctttgccagccaggagctctggctgaaccaccggcagacgcacctccgggccacacccaccaaggctcctgcccctgttgtcctggggtccccagttgttctagggcctcctgtgggccaggcccgagtggctgtggagcactcataccgaaaggcagaagagggtggggaaggggcgactgtcccatctgccgctgccaccaccactgaggtagtgactgaggtggagctgctcctctacaagtgctctgagtgctcccagctcttccagctgccggcggatttcctggagcaccaggccactcacttccctgctcctgtacccgagtctcaggagcctgccttacagcaggaggtgcaggcctcgtcacctgcagaggtgcctgtgtctcagcctgaccccttgccagcttctgaccacagttacgagctgcgcaatggtgaagccattgggcgggatcgccgggggcgcagggcccggaggaacaacagtggagaagcaggcggggcagccacacaggagctcttctgctcagcctgtgaccagctctttctctcaccccaccagctacagcagcacctgcggagtcaccgggagggcgtctttaagtgccccctgtgcagtcgtgtcttccctagcccttccagtctggaccagcaccttggagaccatagcagcgagtcacacttcctgtgtgtagactgtggcctggccttcggcacagaggccctcctcctggcccaccggcgagcccacaccccgaatcctctgcattcatgtccatgtgggaagacctttgtcaaccttaccaagttcctttatcaccggcgtactcatggggtagggggtgtccctctgcccacaacaccagtcccaccagaggaacctgtcattggtttccctgagccagccccagcagagactggagagccagaggcccctgagccccctgtgtctgaggagacctcagcagggcccgctgccccaggcacctaccgctgcctcctgtgcagccgtgaatttggaaaggccttgcagctgacccggcaccaacgttttgtgcatcggctggagcggcgccataaatgcagcatttgtggcaagatgttcaagaagaagtctcacgtgcgtaaccacctgcgcacacacacaggggagcggcccttcccctgccctgactgctccaagcccttcaactcacctgccaacctggcccgccaccggctcacacacacaggagagcggccctaccggtgtggggactgtggcaaggctttcacgcaaagctccacactgaggcagcaccgcttggtgcatgcccagcacttcccctaccgctgccaggaatgtggggtgcgttttcaccgtccttaccgcctgctcatgcaccgctaccatcacacaggtgaatacccctacaagtgtcgcgagtgcccccgctccttcttgctgcgtcggctgctggaggtgcaccagctcgtggtccatgccgggcgccagccccaccgctgcccatcctgtggggctgccttcccctcctcactgcggctccgggagcaccgctgtgcagccgctgctgcccaggccccacggcgctttgagtgtggcacctgtggcaagaaagtgggctcagctgctcgactgcaggcacacgaggcggcccatgcagctgctgggcctggagaggtcctggctaaggagccccctgcccctcgagccccacgggccactcgtgcaccagttgcctctccagcagcccttggaagcactgctacagcatcccctgcggcccctgcccgccgccggggtctagagtgcagcgagtgcaagaagctgttcagcacagagacgtcactgcaggtgcaccggcgcatccacacaggtgagcggccatacccatgtccagactgtggcaaagcgttccgtcagagtacccacctgaaagaccaccggcgcctgcacacaggtgagcggccctttgcctgtgaagtgtgtggcaaggcctttgccatctccatgcgcctggcagaacatcgccgcatccacacaggcgaacgaccctactcctgccctgactgtggcaagagctaccgctccttctccaacctctggaagcaccgcaagacccatcagcagcagcatcaggcagctgtgcggcagcagctggcagaggcggaggctgccgttggcctggccgtcatggagactgctgtggaggcgctacccctggtggaagccattgagatctaccctctggccgaggctgagggggtccagatcagtggc

SEQ ID NO: 4834 - DNA, 735 bp, Homo sapiens
  source 1..735: mol_type = genomic DNA
atgctggagcgaggcgcggagtccgcggccggggctaccgatcctagtcccactggcaaggaaccagtgaccaaagaagctccccaccagggcccaccgcagaagcccagccagtcagctccagggcccaccgcgtccgcgggctcgcctccccggcctcgccggcggcccccgccccagcgcccgcaccgctgccccgactgtgacaaggccttctcgtacccgtccaagctggccacgcaccgcttagcacacggaggcgcccgaccccacccatgcccagactgccccaaggccttctcctacccctccaagctggcagcccaccgcctcacgcacagcggcgcccgcccgcacccgtgcccacactgcccgaagtcctttggccaccgctccaagctggcggctcacctctggacccacgcacccacccgcccctacccgtgccccgactgccccaagtccttctgctacccttccaagctggcggcccaccgccacacgcaccacgccaccgacgcccgcccctatccttgcccgcattgccccaaggctttctcatttccctccaagctggccgcccatcgcctatgtcacgaccccccaaccgcgcccggcagccaggcgactgcctggcaccgatgctccagctgcggccaggcctttggccagagacgcttactgctccttcatcaacgcagccaccaccaggtggagcacaagggggagagagac

SEQ ID NO: 4835 - DNA, 510 bp, Homo sapiens
  source 1..510: mol_type = genomic DNA
atggaggacccgaaccctgaagagaacatgaagcagcaggattcacccaaggagagaagtccccagagcccaggaggcaacatctgccacctgggggccccgaagtgcacccgctgcctcatcaccttcgcagattccaagttccaggagcgtcacatgaagcgggagcacccagcggacttcgtggcccagaagctgcagggggtcctcttcatctgcttcacctgcgcccgctccttcccctcctccaaagccctaatcacccaccagcgcagccacggtccagccgccaagcccaccctgccggttgcaaccactactgcccagcccaccttcccttgtcctgactgtggcaagacctttgggcaggctgtttctctgaggcggcaccgccagatgcatgaggtccgtgcccctcctggcaccttcgcctgcacagagtgcggtcaggactttgctcaggaagcagggctgcatcaacactacattcggcatgcccggggggagctc

SEQ ID NO: 4836 - DNA, 1455 bp, Homo sapiens
  source 1..1455: mol_type = genomic DNA
atgaaaaatgccacgattgtaatgtctgtgaggagagagcaaggcagttcttcaggggaggggtcattgtcattcgaagatgtggctgtgggcttcaccagggaggagtggcagtttttggaccagtctcagaaggtcttgtacaaggaagtaatgttggagaactacatcaacctagtatcaatagggtatcgaggcaccaagccagattcgctcttcaagttggagcaaggagaacccccagggatagcagaaggagcagcccacagtcaaatctgtccaggttttgtaatccagagtagaagatatgcaggaaaagattctgatgcatttggtggatatgggagatcatgcctccatatcaagcgtgacaaaactcttactggagttaaataccatagatgtgttaaacccagcagccctaaatcacagctcaatgacctacaaaaaatttgtgcaggagggaaaccacatgaatgcagtgtgtgcgggagagccttctccaggaaagcacagcttattcaacatcagagaactgaaagaggagagaaaccccatggatgtggtgaatgtgggaaaacattcatgaggaagattcagctcactgagcatcagagaactcacacaggagagaagccccatgaatgtagtgaatgtggaaaagccttctccagaaagtcacagctcatggtccatcagagaacccatacaggagagaaaccctacagatgcagcaaatgcggaaaagccttcagccggaagtgccggctcaatagacatcagcgatcacatactggagagaaactctatgggtgcagtgtgtgtgggaaagccttttctcagaaggcatacctcactgcacaccagagacttcacacaggagataagccttataaatgcagtgattgtggaagaaccttctattttaagtcagacctgaccagacatcagaggattcatacgggagagaaaccttatgaatgtagtgagtgtgaaaaagcctttagaagcaagtcgaagctcattcagcatcagcgtactcacactggagagagaccatattcatgcagagaatgtggcaaagcctttgcccacatgtcagtcctcattaaacatgagaaaactcacataagagagacagccataaattcactgacggtggagaaaccttcctcaaggagtcatacctccttatacatgagcgaactcatacaagagcaaaagactgtgaacacagtacctatagaaatgccttcctcaggaaccccgccattgttaaacaagagtgagcgcctagtgggcagaaatgtagtgattgtggaacaaccttttccaagaaatcaagcctttgtagttaatcaggaatttgaacagagaataagcctcacaaatgaagtgaatgtggccccatcagtaataaattatatcttgtatcttacagatattgtatcagaa

SEQ ID NO: 4837 - DNA, 1278 bp, Homo sapiens
  source 1..1278: mol_type = genomic DNA
atgaaaaatgccacgattgtaatgtctgtgaggagagagcaaggcagttcttcaggggaggggtcattgtcattcgaagatgtggctgtgggcttcaccagggaggagtggcagtttttggaccagtctcagaaggtcttgtacaaggaagtaatgttggagaactacatcaacctagtatcaatagggtatcgaggcaccaagccagattcgctcttcaagttggagcaaggagaacccccagggatagcagaaggagcagcccacagtcaaatctgtccaggagggaaaccacatgaatgcagtgtgtgcgggagagccttctccaggaaagcacagcttattcaacatcagagaactgaaagaggagagaaaccccatggatgtggtgaatgtgggaaaacattcatgaggaagattcagctcactgagcatcagagaactcacacaggagagaagccccatgaatgtagtgaatgtggaaaagccttctccagaaagtcacagctcatggtccatcagagaacccatacaggagagaaaccctacagatgcagcaaatgcggaaaagccttcagccggaagtgccggctcaatagacatcagcgatcacatactggagagaaactctatgggtgcagtgtgtgtgggaaagccttttctcagaaggcatacctcactgcacaccagagacttcacacaggagataagccttataaatgcagtgattgtggaagaaccttctattttaagtcagacctgaccagacatcagaggattcatacgggagagaaaccttatgaatgtagtgagtgtgaaaaagcctttagaagcaagtcgaagctcattcagcatcagcgtactcacactggagagagaccatattcatgcagagaatgtggcaaagcctttgcccacatgtcagtcctcattaaacatgagaaaactcacataagagagacagccataaattcactgacggtggagaaaccttcctcaaggagtcatacctccttatacatgagcgaactcatacaagagcaaaagactgtgaacacagtacctatagaaatgccttcctcaggaaccccgccattgttaaacaagagtgagcgcctagtgggcagaaatgtagtgattgtggaacaaccttttccaagaaatcaagcctttgtagttaatcaggaatttgaacagagaataagcctcacaaatgaagtgaatgtggccccatcagtaataaattatatcttgtatcttacagatattgtatcagaa

SEQ ID NO: 4838 - DNA, 1770 bp, Homo sapiens
  source 1..1770: mol_type = genomic DNA
atgttacatgaggaagcagctcagaagaggaaaggaaaggagccaggcatggctcttcctcagggacgcttgactttcagggatgtggctatagaattctcattggcagagtggaaattcctgaaccctgcgcagagggctttgtacagggaagtgatgttggagaactacaggaacctggaggctgtggatatctcttccaaacgcatgatgaaggaggtcttgtcaacagggcaaggcaatacagaagtgatccacacagggatgttgcaaagacatgaaagttatcacactggagatttttgcttccaggaaattgaaaaagatattcatgactttgagtttcagtcacaaaaagatgaaagaaatggccatgaagcatccatgccaaaaatcaaagagttgatgggtagcacagaccgacatgatcaaaggcatgctggaaacaagcctattaaagatcagcttggattaagctttcatttgcatcttcctgaactccacatatttcagcccgaagagaaaattgctaatcaagtggagaagtctgtcaacgatgcttcctcaatttcaacatcccaaagaatttcttgtaggcctgaaacacatactcctaataactatgggaataattttttccattcatcattactcacacaaaaacaggaagtacacatgagagaaaaatctttccaatgtaatgagactggcgaagcctttaattgtagctcatttgtaaggaaacatcagataatccatttaggagaaaaacaatataaatttgatatatgtggcaaagtctttaatgagaagcgataccttgcacgccatcgtagatgtcacactagtgagaaaccttacaagtgtaatgaatgtggaaagtccttcagttacaagtcatccctgacatgccatcgtagatgtcacactggtgagaaaccttacaagtgtaatgaatgtggaaagtccttcagttacaagtcatcccttacatgccatcataggtgtcacactggtgagaaaccttacaagtgtaatgaatgtggaaagtccttcagttacaagtcatcccttagatgccatcgtagacttcatactggaataaaaccttacaagtgtaatgagtgtggcaagatgtttggtcaaaattcaacccttgtaattcataaggcaattcatactggagagaaaccttacaagtgtaatgaatgtggcaaggcttttaatcaacaatcacacctttcacgtcatcatagacttcatactggagagaaaccttacaagtgtaatgactgtggtaaggcttttattcatcagtcaagccttgcacgtcatcatagacttcatactggagagaaatcttacaaatgtgaagaatgtgacagagttttcagtcagaaatcaaaccttgagagacacaagataattcatactggagagaaaccttacaagtgtaatgagtgtcacaagaccttcagtcacaggtcatctcttccatgccatcgtagacttcatagtggtgagaaaccttacaagtgtaatgaatgtgggaagacttttaatgtacagtcacacctttcacgtcatcatagacttcatactggagagaaaccttacaaatgtaaggtttgtgacaaggctttcatgtgccattcttatctggcaaaccatactagaattcatagcggagagaaaccttacaagtgtaatgagtgtggtaaggctcacaatcacttgattgattcatcaatcaagccttgcatgtcatca

SEQ ID NO: 4839 - DNA, 1686 bp, Homo sapiens
  source 1..1686: mol_type = genomic DNA
atggatccgcagcctcctccacccgcccagggcagcccacctcaccgtggccgaggccggggccgtggccgaggccgtggtcggggccgtggccgtggcagggggggcgctggagcccctagggcgcccctgccctgccccacctgcggccgcctcttccgtttcccctactacctctcccggcaccggctgagccactcggggctccggccccacgcctgcccgctgtgccccaaggccttccgccggccggcccacctttcccgccacctgcgcggccacgggccccagcccccgctgcgctgcgccgcctgcccccgcaccttcccagaaccggcccagctcaggcgccacctggctcaggagcacgcgggcggcgaggtcgagctggccatcgagagggtggccaaggagacggccgaacccagctggggcccgcaggacgagggctcggagccgcccaccaccgctgcagcaggggccacggaggaggaggcggtcgcagcgtggcctgagacgtggcctgcgggggagccttccacgctggctgcgcccaccagcgccgcggagccccgggagtcggagtcggaggaggccgaggccggggcagcagagctgagggccgagctggcgctggcggccgggcggcaggaggagaaacaggtcctgctccaggcagactggacgctgctgtgtctgcgctgccgcgaagccttcgccaccaagggcgagctcaaggcgcacccgtgtctgcgccccgagggcgaacaggaaggggaaggggggcccccgccacgccccaagcgacaccagtgctccatctgcctcaaggccttcgccaggccctggtccctgtcgcgccaccggctggtccactccaccgaccgccctttcgtgtgcccagactgcggcctggccttccgcctcgcctcctacctccgccagcaccgccgcgtccacggccccctcagcctgctggccccgctgcccgcggcgggcaagaaggacgacaaggcctcgggtgcacggaactcagccaaggggccggaggggggcgagggggcggagtgcgggggtgcctcggaagggggagaagggcagaacggaggcgacgccgccccggctcggccccccgccggggagccccgcttctggtgcccagagtgcggcaaaggtttcaggcgccgggcgcacctgcggcagcacggggtgacccactcgggagcgcgccccttccagtgcgtgcgctgccagcgggagttcaagcgcctggccgacctggcgcgccacgcacaggtgcacgcggggggcccagccccgcacccgtgcccccgctgcccgcgccgcttctcgcgcgcctacagcctcctgcgccaccagcgctgccaccgcgcagagctggagagggccgccgcgctgcaggcactgcaggcccaggccccgacgtcgccgccaccgcccccgccgcccctgaaggccgagcaggaggaagaagggctcccgctgcccctcgcaaacattaaggaagagccgccctctccggggaccccaccccagtccccgccggctccccctgtcttcctcagcgcctcctgtttcgacagccaagaccactcagccttcgagatggaggaggaagaggtagacagcaaggctcacctgcgcgggctggggggcctggcctcc

SEQ ID NO: 4840 - DNA, 1191 bp, Homo sapiens
  source 1..1191: mol_type = genomic DNA
atgtcttcccttcctgggtgcattggtttggatgcagcaacagctacagtggagtctgaagagattgcagagctgcaacaggcagtggttgaggaactgggtatctctatggaggaacttcggcatttcatcgatgaggaactggagaagatggattgtgtacagcaacgcaagaagcagctagcagagttagagacatgggtaatacagaaagaatctgaggtggctcacgttgaccaactctttgatgatgcatccagggcagtgactaattgtgagtctttggtgaaggacttctactccaagctgggactacaataccgggacagtagctctgaggacgaatcttcccggcctacagaaataattgagattcctgatgaagatgatgatgtcctcagtattgattcaggtgatgctgggagcagaactccaaaagaccagaagctccgtgaagctatggctgccttaagaaagtcagctcaagatgttcagaagttcatggatgctgtcaacaagaagagcagttcccaggatctgcataaaggaaccttgagtcagatgtctggagaactaagcaaagatggtgacctgatagtcagcatgcgaattctgggcaagaagagaactaagacttggcacaaaggcacccttattgccatccagacagttgggccagggaagaaatacaaggtgaaatttgacaacaaaggaaagagtctactgtcggggaaccatattgcctatgattaccaccctcctgctgacaagctgtatgtgggcagtcgggtggtcgccaaatacaaagatgggaatcaggtctggctctatgctggcattgtagctgagacaccaaacgtcaaaaacaagctcaggtttctcattttctttgatgatggctatgcttcctatgtcacacagtcggaactgtatcccatttgccggccactgaaaaagacttgggaggacatagaagacatctcctgccgtgacttcatagaggagtatgtcactgcctaccccaaccgccccatggtactgctcaagagtggccagcttatcaagactgagtgggaaggcacgtggtggaagtcccgagttgaggaggtggatggcagcctagtcaggatcctcttcctggtactgttcttctctacaattttggaggcagaggttggtggggggggaact

SEQ ID NO: 4841 - DNA, 3873 bp, Homo sapiens
  source 1..3873: mol_type = genomic DNA
atgtcttcccttcctgggtgcattggtttggatgcagcaacagctacagtggagtctgaagagattgcagagctgcaacaggcagtggttgaggaactgggtatctctatggaggaacttcggcatttcatcgatgaggaactggagaagatggattgtgtacagcaacgcaagaagcagctagcagagttagagacatgggtaatacagaaagaatctgaggtggctcacgttgaccaactctttgatgatgcatccagggcagtgactaattgtgagtctttggtgaaggacttctactccaagctgggactacaataccgggacagtagctctgaggacgaatcttcccggcctacagaaataattgagattcctgatgaagatgatgatgtcctcagtattgattcaggtgatgctgggagcagaactccaaaagaccagaagctccgtgaagctatggctgccttaagaaagtcagctcaagatgttcagaagttcatggatgctgtcaacaagaagagcagttcccaggatctgcataaaggaaccttgagtcagatgtctggagaactaagcaaagatggtgacctgatagtcagcatgcgaattctgggcaagaagagaactaagacttggcacaaaggcacccttattgccatccagacagttgggccagggaagaaatacaaggtgaaatttgacaacaaaggaaagagtctactgtcggggaaccatattgcctatgattaccaccctcctgctgacaagctgtatgtgggcagtcgggtggtcgccaaatacaaagatgggaatcaggtctggctctatgctggcattgtagctgagacaccaaacgtcaaaaacaagctcaggtttctcattttctttgatgatggctatgcttcctatgtcacacagtcggaactgtatcccatttgccggccactgaaaaagacttgggaggacatagaagacatctcctgccgtgacttcatagaggagtatgtcactgcctaccccaaccgccccatggtactgctcaagagtggccagcttatcaagactgagtgggaaggcacgtggtggaagtcccgagttgaggaggtggatggcagcctagtcaggatcctcttcctggatgacaaaagatgtgagtggatctatcgaggctctacacggctggagcccatgttcagcatgaaaacatcctcagcctctgcactggagaagaagcaaggacagctcaggacacgtccaaatatgggtgctgtgaggagcaaaggccctgttgtccagtacacacaggatctgaccggtactggaacccagttcaagccagtggaacccccacagcctacagctccacctgccccacctttcccacctgctccacctctatccccccaagcaggtgacagtgacttggaaagccagcttgcccagtcacggaagcaggtagccaaaaagagcacgtcctttcgaccaggatctgtgggctctggtcattcctcccctacatctcctgcactcagtgaaaatgtctctggtgggaaacctgggatcaaccagacatatagatcacctttaggctccacagcctctgccccagcaccctcagcactcccggcccctccagcacccccagtcttccatggcatgctggagcgggccccagcagagccctcctaccgtgctcccatggagaagcttttctacttacctcatgtctgcagctatacctgtctgtctcgagtcagacctatgaggaatgagcagtaccggggcaagaaccctctgctggtcccgttactatatgacttccggcggatgacagcccggcgtcgagttaaccgcaagatgggctttcatgttatctataagacaccttgtggtctctgccttcggacaatgcaggagatagaacgctaccttttcgagactggctgtgacttcctcttcctggagatgttctgtttggatccatatgttcttgtggaccgaaagtttcagccctataagcctttttactatattttggacatcacttatgggaaggaagatgttcccctatcctgtgtcaatgagattgacacaacccctccaccccaggtggcctacagcaaggaacgtatcccgggcaagggtgttttcattaacacaggccctgaatttctggttggctgtgactgcaaggatgggtgtcgggacaagtccaagtgtgcctgccatcaactaactatccaggctacagcctgtaccccaggaggccaaatcaaccctaactctggctaccagtacaagagactagaagagtgtctacccacaggggtatatgagtgtaacaaacgctgcaaatgtgacccaaacatgtgcacaaaccggttggtgcaacatggactacaagttcggctacagctattcaagacacagaacaagggctggggtatccgctgcttggatgacattgccaaaggctcttttgtttgtatttatgcaggcaaaatcctgacagatgactttgcagacaaggagggtctggaaatgggtgatgagtactttgcaaatctggaccatatcgagagcgtggagaacttcaaagaaggatatgagagtgatgccccctgttcctctgacagcagtggtgtagacttgaaggaccaggaagatggcaacagcggtacagaggaccctgaagagtccaatgatgatagctcagatgataacttctgtaaggatgaggacttcagcaccagttcagtgtggcggagctatgctacccggaggcagacccggggccagaaagagaacggactctctgagacaacttccaaggactcccaccccccagatcttggacccccacatattcctgttcctccctcaatccctgtaggtggctgcaatccaccttcctccgaagagacacccaagaacaaggtggcctcatggttgagctgcaatagtgtcagtgaaggtggttttgctgactctgatagccattcatccttcaagactaatgaaggtggggagggccgggctgggggaagccgaatggaggctgagaaggcctccacctcaggactaggcatcaaggatgagggagacatcaaacaggccaagaaagaggacactgacgaccgaaacaagatgtcagtagttactgaaagctctcgaaattacggttacaatccttctcctgtgaagcctgaaggacttcgccgcccacctagtaagactagtatgcatcaaagccgaagactcatggcttctgctcagtccaaccctgatgatgtcctgacactgtccagcagcacagaaagtgagggggaaagtgggaccagccgaaagcccactgctggtcagacttcggctacagcggttgacagtgatgatatccagaccatatcctctggctctgaaggggatgactttgaggacaagaagaacatgactggtccaatgaagcgtcaagtggcagtaaaatcaacccgaggctttgctcttaaatcaacccatgggattgcaattaaatcaaccaacatggcctctgtggacaagggggagagcgcacctgttcgtaagaacacacgccaattctatgatggcgaggagtcttgctacatcattgatgccaagcttgaaggcaacctgggccgctacctcaaccacagttgcagccccaacctgtttgtccagaatgtcttcgtggatacccatgatcttcgcttcccctgggtggccttctttgccagcaaaagaatccgggctgggacagaacttacttgggactacaactacgaggtgggcagtgtggaaggcaaggagctactctgttgctgtggggccattgaatgcagaggacgtcttctt

SEQ ID NO: 4842 - DNA, 3870 bp, Homo sapiens
  source 1..3870: mol_type = genomic DNA
atgtcttcccttcctgggtgcattggtttggatgcagcaacagctacagtggagtctgaagagattgcagagctgcaacaggcagtggttgaggaactgggtatctctatggaggaacttcggcatttcatcgatgaggaactggagaagatggattgtgtacagcaacgcaagaagcagctagcagagttagagacatgggtaatacagaaagaatctgaggtggctcacgttgaccaactctttgatgatgcatccagggcagtgactaattgtgagtctttggtgaaggacttctactccaagctgggactacaataccgggacagtagctctgaggacgaatcttcccggcctacagaaataattgagattcctgatgaagatgatgatgtcctcagtattgattcaggtgatgctgggagcagaactccaaaagaccagaagctccgtgaagctatggctgccttaagaaagtcagctcaagatgttcagaagttcatggatgctgtcaacaagaagagcagttcccaggatctgcataaaggaaccttgagtcagatgtctggagaactaagcaaagatggtgacctgatagtcagcatgcgaattctgggcaagaagagaactaagacttggcacaaaggcacccttattgccatccagacagttgggccagggaagaaatacaaggtgaaatttgacaacaaaggaaagagtctactgtcggggaaccatattgcctatgattaccaccctcctgctgacaagctgtatgtgggcagtcgggtggtcgccaaatacaaagatgggaatcaggtctggctctatgctggcattgtagctgagacaccaaacgtcaaaaacaagctcaggtttctcattttctttgatgatggctatgcttcctatgtcacacagtcggaactgtatcccatttgccggccactgaaaaagacttgggaggacatagaagacatctcctgccgtgacttcatagaggagtatgtcactgcctaccccaaccgccccatggtactgctcaagagtggccagcttatcaagactgagtgggaaggcacgtggtggaagtcccgagttgaggaggtggatggcagcctagtcaggatcctcttcctggatgacaaaagatgtgagtggatctatcgaggctctacacggctggagcccatgttcagcatgaaaacatcctcagcctctgcactggagaagaagcaaggacagctcaggacacgtccaaatatgggtgctgtgaggagcaaaggccctgttgtccagtacacacaggatctgaccggtactggaacccagttcaagccagtggaacccccacagcctacagctccacctgccccacctttcccacctgctccacctctatccccccaagcaggtgacagtgacttggaaagccagcttgcccagtcacggaagcaggtagccaaaaagagcacgtcctttcgaccaggatctgtgggctctggtcattcctcccctacatctcctgcactcagtgaaaatgtctctggtgggaaacctgggatcaaccagacatatagatcacctttaggctccacagcctctgccccagcaccctcagcactcccggcccctccagcacccccagtcttccatggcatgctggagcgggccccagcagagccctcctaccgtgctcccatggagaagcttttctacttacctcatgtctgcagctatacctgtctgtctcgagtcagacctatgaggaatgagcagtaccggggcaagaaccctctgctggtcccgttactatatgacttccggcggatgacagcccggcgtcgagttaaccgcaagatgggctttcatgttatctataagacaccttgtggtctctgccttcggacaatgcaggagatagaacgctaccttttcgagactggctgtgacttcctcttcctggagatgttctgtttggatccatatgttcttgtggaccgaaagtttcagccctataagcctttttactatattttggacatcacttatgggaaggaagatgttcccctatcctgtgtcaatgagattgacacaacccctccaccccaggtggcctacagcaaggaacgtatcccgggcaagggtgttttcattaacacaggccctgaatttctggttggctgtgactgcaaggatgggtgtcgggacaagtccaagtgtgcctgccatcaactaactatccaggctacagcctgtaccccaggaggccaaatcaaccctaactctggctaccagtacaagagactagaagagtgtctacccacaggggtatatgagtgtaacaaacgctgcaaatgtgacccaaacatgtgcacaaaccggttggtgcaacatggactacaagttcggctacagctattcaagacacagaacaagggctggggtatccgctgcttggatgacattgccaaaggctcttttgtttgtatttatgcaggcaaaatcctgacagatgactttgcagacaaggagggtctggaaatgggtgatgagtactttgcaaatctggaccatatcgagagcgtggagaacttcaaagaaggatatgagagtgatgccccctgttcctctgacagcagtggtgtagacttgaaggaccaggaagatggcaacagcggtacagaggaccctgaagagtccaatgatgatagctcagatgataacttctgtaaggatgaggacttcagcaccagttcagtgtggcggagctatgctacccggaggcagacccggggccagaaagagaacggactctctgagacaacttccaaggactcccaccccccagatcttggacccccacatattcctgttcctccctcaatccctgtaggtggctgcaatccaccttcctccgaagagacacccaagaacaaggtggcctcatggttgagctgcaatagtgtcagtgaaggtggttttgctgactctgatagccattcatccttcaagactaatgaaggtggggagggccgggctgggggaagccgaatggaggctgagaaggcctccacctcaggactaggcatcaaggatgagggagacatcaaacaggccaagaaagaggacactgacgaccgaaacaagatgtcagtagttactgaaagctctcgaaattacggttacaatccttctcctgtgaagcctgaaggacttcgccgcccacctagtaagactagtatgcatcaaagccgaagactcatggcttctgctcagtccaaccctgatgatgtcctgacactgtccagcagcacagaaagtgagggggaaagtgggaccagccgaaagcccactgctggtcagacttcggctacagcggttgacagtgatgatatccagaccatatcctctggctctgaaggggatgactttgaggacaagaagaacatgactggtccaatgaagcgtcaagtggcagtaaaatcaacccgaggctttgctcttaaatcaacccatgggattgcaattaaatcaaccaacatggcctctgtggacaagggggagagcgcacctgttcgtaagaacacacgccaattctatgatggcgaggagtcttgctacatcattgatgccaagcttgaaggcaacctgggccgctacctcaaccacagttgcagccccaacctgtttgtccagaatgtcttcgtggatacccatgatcttcgcttcccctgggtggccttctttgccagcaaaatccgggctgggacagaacttacttgggactacaactacgaggtgggcagtgtggaaggcaaggagctactctgttgctgtggggccattgaatgcagaggacgtcttctt

SEQ ID NO: 4843 - DNA, 2157 bp, Homo sapiens
  source 1..2157: mol_type = genomic DNA
atgggagaaaaaaatggcgatgcaaaaactttctggatggagctagaagatgatggaaaagtggacttcatttttgaacaagtacaaaatgtgctgcagtcactgaaacaaaagatcaaagatgggtctgccaccaataaagaatacatccaagcaatgattctagtgaatgaagcaactataattaacagttcaacatcaataaagggagcatcacagaaagaagtgaatgcccaaagcagtgatcctatgcctgtgactcagaaggaacaggaaaacaaatccaatgcatttccctctacatcatgtgaaaactcctttccagaagactgtacatttctaacaacagaaaataaggaaattctctctcttgaagataaagttgtagactttagagaaaaagactcatcttcgaatttatcttaccaaagtcatgactgctctggtgcttgtctgatgaaaatgccactgaacttgaagggagaaaaccctctgcagctgccaatcaaatgtcacttccaaagacgacatgcaaagacaaactctcattcttcagcactccacgtgagttataaaaccccttgtggaaggagtctacgaaacgtggaggaagtttttcgttacctgcttgagacagagtgtaactttttatttacagataacttttctttcaatacctatgttcagttggctcggaattacccaaagcaaaaagaagttgtttctgatgtggatattagcaatggagtggaatcagtgcccatttctttctgtaatgaaattgacagtagaaagctcccacagtttaagtacagaaagactgtgtggcctcgagcatataatctaaccaacttttccagcatgtttactgattcctgtgactgctctgagggctgcatagacataacaaaatgtgcatgtcttcaactgacagcaaggaatgccaaaacttcccccttgtcaagtgacaaaataaccactggatataaatataaaagactacagagacagattcctactggcatttatgaatgcagccttttgtgcaaatgtaatcgacaattgtgtcaaaaccgagttgtccaacatggtcctcaagtgaggttacaggtgttcaaaactgagcagaagggatggggtgtacgctgtctagatgacattgacagagggacatttgtttgcatttattcaggaagattactaagcagagctaacactgaaaaatcttatggtattgatgaaaacgggagagatgagaatactatgaaaaatatattttcaaaaaagaggaaattagaagttgcatgttcagattgtgaagttgaagttctcccattaggattggaaacacatcctagaactgctaaaactgagaaatgtccaccaaagttcagtaataatcccaaggagcttactgtggaaacgaaatatgataatatttcaagaattcaatatcattcagttattagagatcctgaatccaagacagccatttttcaacacaatgggaaaaaaatggaatttgtttcctcggagtctgtcactccagaagataatgatggatttaaaccaccccgagagcatctgaactctaaaaccaagggagcacaaaaggactcaagttcaaaccatgttgatgagtttgaagataatctgctgattgaatcagatgtgatagatataactaaatatagagaagaaactccaccaaggagcagatgtaaccaggcgaccacattggataatcagaatattaaaaaggcaattgaggttcaaattcagaaaccccaagagggacgatctacagcatgtcaaagacagcaggtattttgtgatgaagagttgctaagtgaaaccaagaatacttcatctgattctctaacaaagttcaataaagggaatgtgtttttattggatgccacaaaagaaggaaatgtcggccgcttccttaatcatagttgttgcccaaatctcttggtacagaatgtttttgtagaaacacacaacaggaattttccattggtggcattcttcaccaacaggtatgtgaaagcaagaacagagctaacatgggattatggctatgaagctgggactgtgcctgagaaggaaatcttctgccaatgtggggttaataaatgtagaaaaaaaatatta

SEQ ID NO: 4844 - DNA, 2121 bp, Homo sapiens
  source 1..2121: mol_type = genomic DNA
atgggagaaaaaaatggcgatgcaaaaactttctggatggagctagaagatgatggaaaagtggacttcatttttgaacaagtacaaaatgtgctgcagtcactgaaacaaaagatcaaagatgggtctgccaccaataaagaatacatccaagcaatgattctagtgaatgaagcaactataattaacagttcaacatcaataaaggatcctatgcctgtgactcagaaggaacaggaaaacaaatccaatgcatttccctctacatcatgtgaaaactcctttccagaagactgtacatttctaacaacagaaaataaggaaattctctctcttgaagataaagttgtagactttagagaaaaagactcatcttcgaatttatcttaccaaagtcatgactgctctggtgcttgtctgatgaaaatgccactgaacttgaagggagaaaaccctctgcagctgccaatcaaatgtcacttccaaagacgacatgcaaagacaaactctcattcttcagcactccacgtgagttataaaaccccttgtggaaggagtctacgaaacgtggaggaagtttttcgttacctgcttgagacagagtgtaactttttatttacagataacttttctttcaatacctatgttcagttggctcggaattacccaaagcaaaaagaagttgtttctgatgtggatattagcaatggagtggaatcagtgcccatttctttctgtaatgaaattgacagtagaaagctcccacagtttaagtacagaaagactgtgtggcctcgagcatataatctaaccaacttttccagcatgtttactgattcctgtgactgctctgagggctgcatagacataacaaaatgtgcatgtcttcaactgacagcaaggaatgccaaaacttcccccttgtcaagtgacaaaataaccactggatataaatataaaagactacagagacagattcctactggcatttatgaatgcagccttttgtgcaaatgtaatcgacaattgtgtcaaaaccgagttgtccaacatggtcctcaagtgaggttacaggtgttcaaaactgagcagaagggatggggtgtacgctgtctagatgacattgacagagggacatttgtttgcatttattcaggaagattactaagcagagctaacactgaaaaatcttatggtattgatgaaaacgggagagatgagaatactatgaaaaatatattttcaaaaaagaggaaattagaagttgcatgttcagattgtgaagttgaagttctcccattaggattggaaacacatcctagaactgctaaaactgagaaatgtccaccaaagttcagtaataatcccaaggagcttactgtggaaacgaaatatgataatatttcaagaattcaatatcattcagttattagagatcctgaatccaagacagccatttttcaacacaatgggaaaaaaatggaatttgtttcctcggagtctgtcactccagaagataatgatggatttaaaccaccccgagagcatctgaactctaaaaccaagggagcacaaaaggactcaagttcaaaccatgttgatgagtttgaagataatctgctgattgaatcagatgtgatagatataactaaatatagagaagaaactccaccaaggagcagatgtaaccaggcgaccacattggataatcagaatattaaaaaggcaattgaggttcaaattcagaaaccccaagagggacgatctacagcatgtcaaagacagcaggtattttgtgatgaagagttgctaagtgaaaccaagaatacttcatctgattctctaacaaagttcaataaagggaatgtgtttttattggatgccacaaaagaaggaaatgtcggccgcttccttaatcatagttgttgcccaaatctcttggtacagaatgtttttgtagaaacacacaacaggaattttccattggtggcattcttcaccaacaggtatgtgaaagcaagaacagagctaacatgggattatggctatgaagctgggactgtgcctgagaaggaaatcttctgccaatgtggggttaataaatgtagaaaaaaaatatta

SEQ ID NO: 4845 - DNA, 1662 bp, Homo sapiens
  source 1..1662: mol_type = genomic DNA
atgtctgcagacggcggaggcatccaggacacccaggacaaggagacacccccggaggttccagatcgtggacatcctcatcaggaaatgccttctaagctgggggaggcggtaccttcaggggacactcaggagtcactgcacattaagatggagcccgaagagccacactccgagggggcatcgcaggaggatggggctcaaggtgcctggggctgggcacccctaagtcacggctctaaggagaaagctctcttcctgcctggcggagccctcccctccccccggatccccgtgctttcccgagaggggaggaccagagaccggcagatggctgcagcgctcctcactgcctggtcccagatgccagtgactttcgaggatgtggccttgtacctctcccgggaggagtggggacggctggaccacacgcagcagaacttctacagggatgtcctgcagaagaaaaatgggctgtcactgggctttcccttcagcaggcctttctgggcccctcaagcgcacggcaagggtgaggcctcgggctccagccggcaggcaggagatgagaaggagtggagaggcgcgtgcacaggagccgtcgaggtggggcagagggtgcagacctcatccgtggcagcccttgggaatgtgaagcccttcagaaccagggcagggagagtccagtggggcgtcccgcagtgcgcgcaggaagcagcctgcggccggagctcagggccggccaaagactccgggcagccggctgagccagatcgcaccccggatgcagctccgccagaccccagtcccacggagccccaggagtaccgcgtcccggagaagcccaacgaggaggagaagggcgccccggagagtggcgaggagggcctggcccctgacagtgaggtgggcaggaagagctaccggtgcgagcagtgcggcaagggcttcagctggcactcgcacctggtgacgcaccggcgcacgcacacgggcgagaagccctacgcctgcactgactgcgggaagcgcttcggccgcagctcgcacctcatccagcaccagatcatccacacgggcgagaagccctacacctgccccgcctgccggaagagcttcagccaccactccacgctgattcagcaccagcgcatccacaccggagagaagccctacgtgtgcgaccgctgcgccaagcgcttcacccgccgctcggacttggtcacccaccagggcacccacacgggcgccaagccgcacaagtgccccatctgcgccaagtgcttcacgcagagctcggcgctagtcacccaccagcgcacccacactggggtcaagccctatccgtgccccgagtgcggcaagtgcttcagccagcgttccaacctcatcgcgcacaaccgcacacacacaggcgagaagccctaccactgcctcgactgcggcaagagcttcagccacagctcgcacctcaccgcgcaccagcgcacccaccgtggcgtgcggccctacgcctgcccgttgtgcggcaagagcttcagccggcgctccaacctgcaccggcacgagaagatccacaccaccgggcccaaggccctggccatgctgatgctgggggcggcggcggcgggggctctggccacacccccacccgctcccacc

SEQ ID NO: 4846 - DNA, 1944 bp, Homo sapiens
  source 1..1944: mol_type = genomic DNA
atggctacagccgtggaaccagaggaccaggatctttgggaagaagagggaattctgatggtgaaactggaagatgatttcacctgtcggccagagtctgtcttacagagggatgacccggtgctggaaacctcccaccagaacttccgacgcttccgctaccaggaggcagcaagccctagagaagctctcatcagactccgagaactttgtcaccagtggctgagaccagagaggcggacaaaggagcagatcctagagctgcttgtgctggaacaatttcttaccgtcctacctggagaactacagagctgggtgcggggccaacggccagaaagtggcgaggaggcagtgacgctggtggagggtttgcagaaacaacccaggagaccaaggcggtgggtgactgtccatgttcacggccaggaagtcctgtcagaggagacggtgcatttaggagtggagcctgagtcacctaatgagctgcaggatcctgtgcaaagctcgacccccgagcagtctcctgaggaaaccacacagagcccagatctgggggcaccggcagagcagcgtccacaccaggaagaggagctccagaccctgcaggagagcgaggtcccagtgcccgaggacccagaccttcctgcagagaggagctctggagactcagagatggttgctcttcttactgctctgtcacagggactggtaacgttcaaggatgtggccgtatgcttttcccaggaccagtggagtgatctggacccaacacagaaagagttctatggagaatatgtcttggaagaagactgtggaattgttgtctctctgtcatttccaatccccagacctgatgagatctcccaggttagagaggaagagccttgggtcccagatatccaagagcctcaggagactcaagagccagaaatcctgagttttacctacacaggagataggagtaaagatgaggaagagtgtctggagcaggaagatctgagtttggaggatatacacaggcctgttttgggagaaccagaaattcaccagactccagattgggaaatagtctttgaggacaatccaggtagacttaatgaaagaagatttggtactaatatttctcaagtgaatagttttgtgaaccttcgggaaactacacccgtccaccccctgttagggaggcatcatgactgttctgtgtgtggaaagagcttcacttgtaactcccaccttgttagacacctgaggactcacacaggagagaaaccctataaatgtatggaatgtggaaaaagttacacacgaagctcacatcttgccaggcaccaaaaggttcacaagatgaacgcgccttacaaatatcccctaaaccggaagaatttggaagagacctcccctgtgacacaggctgagagaactccatcagtggagaaaccctatagatgtgatgattgcggaaagcacttccgctggacttcagaccttgtcagacatcagaggacacatactggagaaaaacccttcttttgtactatttgtggcaaaagcttcagccagaaatctgtgttaacaacacaccaaagaatccacctgggaggcaaaccctacttgtgtggagagtgtggtgaggacttcagtgaacacaggcggtacctggcgcaccggaagacgcacgctgctgaggaactctacctctgcagcgagtgcgggcgctgcttcacccacagcgcagcgttcgccaagcacttgagaggacacgcctcagtgaggccctgccgatgcaacgaatgtgggaagagcttcagtcgcagggaccacctcgtcaggcatcagagaacacacactggggagaaaccattcacgtgccctacctgtggaaaaagcttcagcagaggatatcacttaattaggcatcagaggacccactcagaaaagacctcc

SEQ ID NO: 4847 - DNA, 5277 bp, Homo sapiens
  source 1..5277: mol_type = genomic DNA
atggatcttggaacagctgagggcacccggtgcacggacccgcctgcaggcaagcccgccatggcgcccaaacgcaagggtggcctgaagctgaacgccatctgcgccaagctgagccgccaggtggtggtggagaagcgagctgacgccggctcccacacggagggcagcccatcgcagccccgggaccaagagcgcagtggccctgagtctggggcagcccgggccccccgcagcgaggaagacaagagacgggcagtgatcgagaagtgggtgaacggggagtacagcgaggagccggcacccacacccgtgttggggcggattgcccgcgagggcctggagctgcctcccgagggtgtctacatggtgcagccccaggggtgcagcgatgaggaagaccacgcggaggagccctccaaggacggcggtgccctggaggagaaggattcggacggggcagcctccaaggaggacagcggccccagcaccaggcaggcttcaggagaggcctcctcgctgcgggactacgcggcctccaccatgaccgagttcctcggcatgtttggctatgatgaccagaacacgcgggacgagctggccaggaagatcagctttgagaagctgcacgcgggctccaccccggaggcagccacctcctccatgctgcccacctccgaggataccctcagcaagcgggcgcggttctctaagtatgaggagtacatccgcaagctcaaggctggcgagcagctctcctggccggcccccagcaccaagaccgaggagcgggtgggcaaggaggtggtgggcaccctgcccggcctgcggctgcccagcagcacggcccacctggagaccaaggccaccatcctgcccctgccgtcgcacagcagtgtccagatgcagaacctggtagcccgggcctccaagtacgacttcttcatccaaaaactgaagaccggcgagaatctgcggccccagaacgggagcacctacaagaagccatccaagtacgacctggagaatgtcaagtacctgcacctcttcaaacccggggagggcagccccgacatgggcggggccatcgccttcaagacaggcaaggtggggcgcccttccaagtacgacgtccggggcatccagaagccaggccccgccaaggttccgcccacccccagcctggctcccgcacccctcgccagcgtgcccagtgcccccagcgcccccgggccagggccagagcctcctgcctccctgtccttcaacactcccgagtacctgaagtcaaccttctccaaaacagactccatcaccacggggaccgtctccactgtcaagaacggactgcccacagataaaccagccgtcactgaagatgtaaacatttaccagaaatatattgccaggttctcgggcagccagcactgtggccacatccactgtgcctaccagtaccgcgagcactaccactgccttgaccctgagtgtaactaccagaggttcacgagtaagcaggacgtgatccgccactacaacatgcacaagaagcgcgacaactccctgcagcacggcttcatgcgtttcagcccgctggacgactgcagcgtctactaccacggctgccacctcaatgggaagagcacccactatcactgcatgcaggtgggctgtaacaaggtgtacacgagcacgtctgacgtgatgacccacgagaacttccacaagaagaatacccagctcattaacgacggcttccagcgcttccgagccaccgaagactgtggcacagccgactgccagttctacggacagaagaccacgcacttccactgcaggcgccccggctgcacattcactttcaagaacaagtgtgacatcgagaagcacaagagctaccacatcaaggacgatgcctacgccaaggacggcttcaagaagttctacaagtacgaggagtgcaagtacgagggctgcgtgtacagcaaggctaccaaccacttccactgcatccgcgccggctgcggcttcaccttcacctccaccagccagatgacctctcacaagcgcaagcatgagcgccggcacatccgctcctcgggcgcgctggggctgccgccctcgctgctgggcgccaaggacacggagcacgaggagtccagcaacgacgaccttgttgacttctccgccctgagcagcaagaactccagcctgagcgcctcccctaccagccagcagtcctctgcgtccctggctgccgccactgccgccaccgaggctgggcccagtgccaccaaacctcccaacagcaagatctcggggctgctgccccagggcctgcctggctcaatccccctggccctggccctctccaactcgggcctgcccacccccacgccctacttccccatactggctggccgtgggagcacctccctgcctgtgggcacccccagcctcctgggtgccgtgtcgtctgggtcagcagcctcagccacccctgacacacccacgctggtcgcctcgggagctggagactcagcccccgtggctgccgcctctgtcccggcaccacccgcctccatcatggagaggatctctgcaagcaagggcctcatctcgcccatgatggccaggctggctgcagctgccctcaagccctctgccacctttgacccaggaagcgggcagcaggtcaccccagccaggttccccccggcccaagtgaagccggaacccggtgagagcaccggcgccccaggcccccacgaagcctcccaggaccgcagtctagacctgactgtgaaggagcccagcaacgaatcaaatggccacgcagtcccggcaaattcatctcttttatcctcgcttatgaataagatgtctcagggcaaccctggcctgggcagcctgctgaacatcaaggcggaagcggaggggagccccgctgcggagccctcgcccttcctaggcaaggccgtgaaggcgctggttcaggagaagttggcagagccctggaaggtgtacctgcgcaggtttggtacaaaggacttctgtgacggccagtgtgacttcctccacaaggcccacttccactgcgtggtggaggaatgcggcgcgctcttcagcaccttggacggggccatcaagcacgcaaacttccacttccggacagagggaggagcagcaaaaggaaacacagaggctgcctttccggcctcggccgccgagaccaaacctcccatggccccctcgtcccctccggtccctcctgtcaccacggccacggtgtcctctctggaggggcccgctcccagcccggcctccgtgccctccacccccaccctgctcgcctggaagcagctggcttccaccataccccagatgcctcagatcccagcgtcagtgcctcacctgcccgcctcgcccttggcaacgacttctctagagaacgccaagccccaggtcaaacccggattcctccagttccaggagaacgatccttgcctcgccacggactgcaagtacgccaacaagttccacttccactgtctctttgggaactgcaagtacgtctgcaaaacgtctggcaaggccgaatcccactgcctggaccacatcaaccccaacaacaacctggtgaacgtgcgagaccagtttgcatactactctctgcagtgtctctgtcccaaccagcactgcgagttccgaatgcgtgggcactaccactgcctccgcaccggctgctattttgtgaccaacatcaccaccaagctcccctggcacatcaagaagcatgagaaggcggagcggcgggcagccaatggcttcaaatacttcaccaagcgcgaggagtgtggcaggctaggttgcaagtacaaccaggtgaacagccacttccactgcatccgggagggctgccagttctccttcctcctcaagcaccagatgacctcccacgcgcggaagcacatgcggaggatgctggggaagaacttcgaccgcgtgcccccctcccagggccccccaggcctgatggatgctgagacagatgagtgcatggactacactggctgcagcccaggcgccatgtcctctgagtcatccaccatggaccggagctgctccagcacccccgtgggtaacgagagcaccgcggcagggaacaccatctctatgccgacagcctcgggggccaaaaagcgcttctggatcatcgaggacatgtcgcccttcggcaagcggcggaagacggcgtcctcccggaagatgctggacgagggcatgatgctggagggcttccggcgcttcgacctttacgaggactgcaaggacgcagcttgtcagttctcgctcaaggtcacccactaccactgcacgcgcgagaactgcggctacaagttctgcgggcgcacgcacatgtacaagcacgcgcagcaccacgaccgcgtggacaacctggtgctggacgacttcaagcgcttcaaggcctcactcagctgccacttcgccgactgccccttctcgggcaccagcacgcacttccactgcctgcgctgccgcttccgctgcaccgacagcaccaaggtcacggcgcatcgcaagcaccacggcaaacaggacgtgatcagcgccgcgggcttctgccagttcagctccagcgccgactgcgccgtgcccgactgcaagtacaagctcaagtgctcgcacttccactgcaccttcccgggctgccgccacacggtggtgggcatgtcgcagatggactcgcacaagcgcaagcacgagaagcaggagcgcggcgagcccgcggcagagggccccgcgcccgggcctcccatcagtctggacggctccctgtcgctgggcgccgagccgggctcgctgctcttcctgcagtcggcggccgccggcctgggcctggcgctgggcgacgcgggcgaccccggcccgcccgacgccgccgcccccgggccgcgcgagggcgccgccgccgccgccgccgcagctggggagtcctcgcaggaggacgaggaggaggagctggagctgccggaggaggaggccgaagacgacgaggacgaggacgacgacgaggacgacgacgacgaggacgacgacgaggacgacgacgacgaggacctgcgcaccgactcggaggagtcgctgcccgaggcggcggcggaggcggcgggcgcgggcgcgcggaccccggccttggcggcgctggcggccctgggcgcccccggccccgcgcccactgcagcctcctcgccc

SEQ ID NO: 4848 - DNA, 3498 bp, Homo sapiens
  source 1..3498: mol_type = genomic DNA
atggatcttggaacagctgagggcacccggtgcacggacccgcctgcaggcaagcccgccatggcgcccaaacgcaagggtggcctgaagctgaacgccatctgcgccaagctgagccgccaggtggtggtggagaagcgagctgacgccggctcccacacggagggcagcccatcgcagccccgggaccaagagcgcagtggccctgagtctggggcagcccgggccccccgcagcgaggaagacaagagacgggcagtgatcgagaagtgggtgaacggggagtacagcgaggagccggcacccacacccgtgttggggcggattgcccgcgagggcctggagctgcctcccgagggtgtctacatggtgcagccccaggggtgcagcgatgaggaagaccacgcggaggagccctccaaggacggcggtgccctggaggagaaggattcggacggggcagcctccaaggaggacagcggccccagcaccaggcaggcttcaggagaggcctcctcgctgcgggactacgcggcctccaccatgaccgagttcctcggcatgtttggctatgatgaccagaacacgcgggacgagctggccaggaagatcagctttgagaagctgcacgcgggctccaccccggaggcagccacctcctccatgctgcccacctccgaggataccctcagcaagcgggcgcggttctctaagtatgaggagtacatccgcaagctcaaggctggcgagcagctctcctggccggcccccagcaccaagaccgaggagcgggtgggcaaggaggtggtgggcaccctgcccggcctgcggctgcccagcagcacggcccacctggagaccaaggccaccatcctgcccctgccgtcgcacagcagtgtccagatgcagaacctggtagcccgggcctccaagtacgacttcttcatccaaaaactgaagaccggcgagaatctgcggccccagaacgggagcacctacaagaagccatccaagtacgacctggagaatgtcaagtacctgcacctcttcaaacccggggagggcagccccgacatgggcggggccatcgccttcaagacaggcaaggtggggcgcccttccaagtacgacgtccggggcatccagaagccaggccccgccaaggttccgcccacccccagcctggctcccgcacccctcgccagcgtgcccagtgcccccagcgcccccgggccagggccagagcctcctgcctccctgtccttcaacactcccgagtacctgaagtcaaccttctccaaaacagactccatcaccacggggaccgtctccactgtcaagaacggactgcccacagataaaccagccgtcactgaagatgtaaacatttaccagaaatatattgccaggttctcgggcagccagcactgtggccacatccactgtgcctaccagtaccgcgagcactaccactgccttgaccctgagtgtaactaccagaggttcacgagtaagcaggacgtgatccgccactacaacatgcacaagaagcgcgacaactccctgcagcacggcttcatgcgtttcagcccgctggacgactgcagcgtctactaccacggctgccacctcaatgggaagagcacccactatcactgcatgcaggtgggctgtaacaaggtgtacacgagcacgtctgacgtgatgacccacgagaacttccacaagaagaatacccagctcattaacgacggcttccagcgcttccgagccaccgaagactgtggcacagccgactgccagttctacggacagaagaccacgcacttccactgcaggcgccccggctgcacattcactttcaagaacaagtgtgacatcgagaagcacaagagctaccacatcaaggacgatgcctacgccaaggacggcttcaagaagttctacaagtacgaggagtgcaagtacgagggctgcgtgtacagcaaggctaccaaccacttccactgcatccgcgccggctgcggcttcaccttcacctccaccagccagatgacctctcacaagcgcaagcatgagcgccggcacatccgctcctcgggcgcgctggggctgccgccctcgctgctgggcgccaaggacacggagcacgaggagtccagcaacgacgaccttgttgacttctccgccctgagcagcaagaactccagcctgagcgcctcccctaccagccagcagtcctctgcgtccctggctgccgccactgccgccaccgaggctgggcccagtgccaccaaacctcccaacagcaagatctcggggctgctgccccagggcctgcctggctcaatccccctggccctggccctctccaactcgggcctgcccacccccacgccctacttccccatactggctggccgtgggagcacctccctgcctgtgggcacccccagcctcctgggtgccgtgtcgtctgggtcagcagcctcagccacccctgacacacccacgctggtcgcctcgggagctggagactcagcccccgtggctgccgcctctgtcccggcaccacccgcctccatcatggagaggatctctgcaagcaagggcctcatctcgcccatgatggccaggctggctgcagctgccctcaagccctctgccacctttgacccaggaagcgggcagcaggtcaccccagccaggttccccccggcccaagtgaagccggaacccggtgagagcaccggcgccccaggcccccacgaagcctcccaggaccgcagtctagacctgactgtgaaggagcccagcaacgaatcaaatggccacgcagtcccggcaaattcatctcttttatcctcgcttatgaataagatgtctcagggcaaccctggcctgggcagcctgctgaacatcaaggcggaagcggaggggagccccgctgcggagccctcgcccttcctaggcaaggccgtgaaggcgctggttcaggagaagttggcagagccctggaaggtgtacctgcgcaggtttggtacaaaggacttctgtgacggccagtgtgacttcctccacaaggcccacttccactgcgtggtggaggaatgcggcgcgctcttcagcaccttggacggggccatcaagcacgcaaacttccacttccggacagagggaggagcagcaaaaggaaacacagaggctgcctttccggcctcggccgccgagaccaaacctcccatggccccctcgtcccctccggtccctcctgtcaccacggccacggtgtcctctctggaggggcccgctcccagcccggcctccgtgccctccacccccaccctgctcgcctggaagcagctggcttccaccataccccagatgcctcagatcccagcgtcagtgcctcacctgcccgcctcgcccttggcaacgacttctctagagaacgccaagccccaggtcaaacccggattcctccagttccaggagaag

SEQ ID NO: 4849 - DNA, 1182 bp, Homo sapiens
  source 1..1182: mol_type = genomic DNA
atgatggctgcaaaagtggttcctatgcccccaaagccaaagcagtcctttatactgagagttccgccagactccaagctgggccaagacctacttcgagatgccactaacgggcccaagaccatccaccagctagtgctggagcacttcctcaccttcttgcccaagccaagcctggtccagcccagtcagaaagtcaaggagaccttggttattatgaaagatgtgagctcaagccttcagaacagagtgcatcctcgtcccttggtgaagcttctgcccaaaggagtccaaaaggaacaagagacagtgtctctgtatttgaaagctaaccctgaggagctggtggtctttgaggatttgaatgtatttcactgccaggaagaatgtgtgagcttggatcctactcaacaactcacgtcagagaaggaagatgacagcagtgtcggggaaatgatgttactggtcaatggcagtaatcctgaaggtgaagatcctgagagggaacctgtagaaaatgaagattatagagaaaagtcttcagatgatgatgaaatggattcttccttggtctctcagcagcctcccgataaccaggaaaaggaacgactaaatacatccattccacaaaaaaggaaaatgagaaatctgttagttaccattgagaatgatactcctctagaggaactctcaaaatatgtagacatcagtattattgcccttactcgaaatcggaggacaaggagatggtacacttgtccactgtgtgggaaacagtttaatgaaagttcttacctcatttcccaccagaggacccacactggagaaaaaccctatgactgtaatcactgtgggaaaagcttcaatcataaaacaaacctcaataaacatgagcgaattcatacaggagagaaaccttattcctgttctcagtgtggaaaaaacttccgtcagaattctcatcggagtcgtcatgaaggaatccatataagggagaagatatttaagtgtccagaatgtgggaaaaccttcccaaagaatgaggagtttgtgcttcatctgcagagtcatgaggctgagagaccatatggttgcaaaaaatgtgggagaagatttggtcggctgtcaaactgtacccggcatgagaaaacccactcagcctgtaagacccgaaagcagaag

SEQ ID NO: 4850 - DNA, 1182 bp, Homo sapiens
  source 1..1182: mol_type = genomic DNA
atgatggctgcaaaagtggttcctatgcccccaaagccaaagcagtcctttatactgagagttccgccagactccaagctgggccaagacctacttcgagatgccactaacgggcccaagaccatccaccagctagtgctggagcacttcctcaccttcttgcccaagccaagcctggtccagcccagtcagaaagtcaaggagaccttggttattatgaaagatgtgagctcaagccttcagaacagagtgcatcctcgtcccttggtgaagcttctgcccaaaggagtccaaaaggaacaagagacagtgtctctgtatttgaaagctaaccctgagctggtggtctttgaggatttgaatgtatttcactgccaggaagaatgtgtgagcttggatcctactcaacaactcacgtcagagaaggaagatgacagcagtgtcggggaaatgatgttactggcagtcaatggcagtaatcctgaaggtgaagatcctgagagggaacctgtagaaaatgaagattatagagaaaagtcttcagatgatgatgaaatggattcttccttggtctctcagcagcctcccgataaccaggaaaaggaacgactaaatacatccattccacaaaaaaggaaaatgagaaatctgttagttaccattgagaatgatactcctctagaggaactctcaaaatatgtagacatcagtattattgcccttactcgaaatcggaggacaaggagatggtacacttgtccactgtgtgggaaacagtttaatgaaagttcttacctcatttcccaccagaggacccacactggagaaaaaccctatgactgtaatcactgtgggaaaagcttcaatcataaaacaaacctcaataaacatgagcgaattcatacaggagagaaaccttattcctgttctcagtgtggaaaaaacttccgtcagaattctcatcggagtcgtcatgaaggaatccatataagggagaagatatttaagtgtccagaatgtgggaaaaccttcccaaagaatgaggagtttgtgcttcatctgcagagtcatgaggctgagagaccatatggttgcaaaaaatgtgggagaagatttggtcggctgtcaaactgtacccggcatgagaaaacccactcagcctgtaagacccgaaagcagaag

SEQ ID NO: 4851 - DNA, 1221 bp, Homo sapiens
  source 1..1221: mol_type = genomic DNA
atggagagccgaaaggacatggttgtgtttctggatgggggtcagcttggcactctggttggcaagagagtctcaaatttgtccgaagccgtgggcagcccgctgccggagccgcccgagaaaatggtgccccgtggttgcctgagccctcgggccgtccctccggccacccgggagcgcggcgggggaggcccggaggaggagccggtagatggactcgcaggcagcgcggcggggccgggcgccgagccccaggtagctggggcggccatgctcggcccaggacccccggccccctcagtcgacagcctctccggacaggggcaacccagtagctcggacaccgagtcggatttctatgaagaaatcgaggtgagctgcaccccggactgcgccaccgggaacgccgagtaccagcacagcaaagggtccggctccgaggcgctggtcggcagtccgaacggagggagcgagacccccaagagcaacggcggcagtggtgggggcggctcgcaaggcaccctggcgtgcagcgccagtgaccagatgcgtcgttaccgcaccgccttcacccgagagcagattgcgcggctggagaaggaattctaccgggagaactacgtatccaggccgcggagatgtgagctggcggccgccctaaacctgccggaaaccaccatcaaggtgtggttccagaaccggcgcatgaaggacaagcggcagcgcctggccatgacgtggccgcacccggcggaccccgccttctacacttacatgatgagccatgcggcggccgcgggcggcctgccctaccccttcccatcgcacctgcccctgccctactactcgccggtgggcctgggcgccgcatccgccgcctccgccgccgcctcgcccttcagcggctcgctgcgcccgctcgacacgttccgcgtgctgtcgcagccctacccgcggcccgaactgctgtgcgccttccgccacccgccgctctaccccgggcccgcgcacggactgggcgcctctgccggcggcccctgctcctgcctcgcctgtcacagcggcccggccaacgggctggcgccccgggctgccgccgcctcggacttcacctgtgcctccacctcccgctcggactccttcctcaccttcgcgccctcggtgctcagcaaggcctcctccgtcgcgctggaccagagggaggaggtgcccctcactaga

SEQ ID NO: 4852 - DNA, 3840 bp, Homo sapiens
  source 1..3840: mol_type = genomic DNA
atgggtagcttaaccttccgcgatgtggccatcgagttttctttagaagagtggcagtgcttagacaccgcacagcagaatctgtaccgtaacgtgatgctggagaattaccgcaatttagtctttttaggcattgccgccttcaaaccggatctgattatctttttagaagagggcaaggagagctggaacatgaagcgccatgagatggttgaggaaagcccggtgatctgtagccacttcgcacaagatttatggccggaacaaggtattgaggacagttttcaaaaggtgattctgcgtcgttatgagaaatgcggtcatgagaatttacatctgaagatcggctataccaacgtggacgagtgtaaagtgcacaaagagggctataacaagctgaatcagtctttaacaaccacccagagcaaagttttccagcgtggcaagtatgccaatgttttccataaatgtagcaatagtaatcgccataagatccgccacaccggtaaaaagcatttacagtgcaaagaatacgtgcgtagcttctgcatgctgagtcatttaagccaacacaagcgcatttacacccgcgagaactcttacaagtgtgaggaaggcggtaaggctttcaactggagtagtactttaacatactataaaagcgctcacactggcgaaaaaccttatcgttgtaaggaatgcggtaaggccttcagtaagttctccattttaactaaacacaaggtcatccacaccggtgagaagtcctacaaatgcgaggaatgtggtaaggctttcaatcaaagtgccatcttaaccaaacataaaattatccatactggtgaaaagccgaataagtgtgaggagtgcggtaaggccttcagcaaagtttctactctgaccacccataaagcaattcacgccggtgagaagccgtataaatgcaaggaatgtggtaaggcattctctaaggttagtactttaatcacacataaggctatccatgctggcgagaaaccttataaatgtaaggagtgcggtaaggctttcagcaaattttccattctgactaaacataaagtcatccataccggtgagaaaccttataaatgtgaagaatgtggtaaggcttacaagtggccgagtacattatcttaccacaagaagattcatactggtgagaagccttacaagtgcgaagaatgcggtaagggcttcagcatgttctctattttaacaaaacatgaagtcattcataccggtgaaaagccttacaagtgcgaagaatgcggcaaggcctttaattggagcagcaacttaatggagcataagaagatccacaccggtgaaaccccctataaatgcgaagaatgcggtaagggtttcagtatgtttagtatcttaaccaagcataaagtcatccacaacggtgaaaaaccctataaatgtgaggagtgtgacaaagccactcacgctggtgagaaaccctacaagtgtgaggaatgcggtaaagccttcaattggtcttctaacttaatggagcataaacgtatccataccggtgaaaagccctataaatgtgaggagtgtggtaaaagcttctctacattttctattttgaccaaacataaagttatccatactggcgaaaagccttataagtgcgaggagtgtggtaaagcttataagtggagctccacattaagctatcataagaaaattcacacagtggagaaaccttacaagtgtgaggaatgcggcaaggccttcaaccaaagcgccattttaattaaacacaagcgtattcacaccggtgaaaagccctataaatgcgaagagtgtggtaagacattcagcaaagtgagcaccttaactacccataaagctattcacgctggcgagaaaccctacaagtgcaaagagtgtggcaagacatttattaaagttagcactttaacaacacataaggccattcatgctggcgaaaaaccctacaagtgcaaagaatgtggcaaagcatttagcaagttttctatcttgaccaaacacaaagttattcacaccggcgaaaagccctataaatgtgaggagtgtggtaaagcttttaattggtcttctaatctgatggagcataagcgcattcacactggcgaaaagccttacaaatgcgaggagtgcggcaagagtttcagcacctttagcgtgttaacaaagcacaaagttattcataccggcgaaaagccttacaaatgcgaagagtgtggcaaagcctataaatggtctagcaccttaagctaccacaagaaaattcatacagtcgagaaaccttataagtgcgaggagtgcggcaaagcctttaaccgcagcgccattttaattaagcacaaacgtattcataccgacgaaaaaccttacaagtgtgaagagtgtggcaaaacctttagtaaagtgtctactttaactacccacaaggccatccacgccggtgaaaaaccgtacaagtgtaaagagtgcggtaaggcttttagcaaattcagtatcttgacaaagcataaggtgatccacactggcgaaaaaccttataaatgcgaggaatgcggcaaggcatacaaatggccgtctactctgtcttatcataagaagattcacactggtgaaaaaccttataagtgcgaggagtgtggcaaaggttttagcatgtttagcattttaacaaagcatgaagtgattcacaccggtgagaaaccttataaatgtgaggaatgcggcaaagcctttagttggctgagcgttttcagcaaacataagaaaacccacgctggtgaaaagttttacaagtgcgaagcatgtggtaaagcctataagagcagcagcactttaagctatcacaagaaaattcataccgaagaaaagccttataagtacgaggaatgtggtaaaggctttagcaccttttctattctgactaagcacaaagtgatccacaccggcgaaaaaccttacaaatgcgaggagtgtggtaaggcctttaactggtcctctaacttaatggagcacaaaaagattcacaccggcgagactccttacaaatgcgaagaatgcgataaagcctttagctggccgagttctctgacagagcataaggctacccacgctggtgaaaaaccttacaagtgtgaagaatgcggcaaagctttctcttggcctagccgtttaactgagcataaagcaacccatgctggtgaagagccttataaatgcgaggagtgtggcaaagctttcaattggtcctctaatttgatggaacacaaacgcattcacactggcgaaaaaccctataaatgcgaggagtgcggtaaaagttttagcactttcagtattttaactaaacataaggtcattcatactggcgaaaaaccctataaatgcgaggaatgcggcaaggcctataagtggagtagcacattatcctaccataagaaaattcacaccgtcgaaaagccgtacaaatgtgaggagtgcggcaaaggttttgttatgttttccattttagccaaacataaggttatccatactggcgagaagctgtacaaatgtgaggaatgtggtaaggcttacaagtggcctagcactttacgttatcacaagaaaattcacaccggtgagaagccttacaaatgtgaagagtgtggtaaagccttcagtacattttccatcttaactaagcacaaagtcattcataccggtgaaaaaccgtataaatgtgaggaatgcggtaaggctttcagctggctgagcgtgttcagcaagcataagaagatccataccggcgagaagctg

SEQ ID NO: 4853 - DNA, 1428 bp, Homo sapiens
  source 1..1428: mol_type = genomic DNA
atgatggaaagaataagaaaagagatgattctgatggagagagggctgcacagccctacggcgggcaagagattctccaatttgtccaactcggctggcaatgctgtgctcgaggccctggaaaattcgcagcacccggctcgcctaagcccgcgcctgccgtctgcccccctgcacagcgctctgggagaactccccgccaagggcaaattcgaaatagacactttgttcaacctgcagcacacgggcagcgaaagcaccgtctcctccgaaatctcctccgccgccgagagccgcaagaagccgggccattattcagaggcggccgctgaggccgacatgagcagcgacgtggaggtgggctgctccgcgcttcgctcccccgggggcctcggcgccgctcagcttaaggaaaacaatggcaaagggtacgcagagagcggctcggctgccggcaccacgacgtcggcgtcgggctcaggcctcggaagcctgcatggaggcagcggaggcagcggcgggagcgcggcgctgggtggctccggctctggcgcggatcaagtgcggcgctaccgtacggcgttcacccgcgagcagatcgcgcgcctggagaaggagttctaccgggagaactatgtgtcgcggccccgccggtgcgagctggccgcggcactcaacctgcccgaaaccaccatcaaggtgtggttccagaaccggcgcatgaaggacaagcggcagcgcctggccatgtcctggccgcacccagccgaccccagcttctacacctacatgatgacgcacgcggccgccaccggaagcctgccctaccccttccactcgcacgtgccgctgcactactacccgcacgtgggcgtcacggcggcggcggccgcggctgcagcctcaggcgcggcggccgcggcttcgtcgcccttcgctacttccatccggccactggacaccttccgcgccctctcgcacccctactctcggccggagctgctgtgtagcttccgccaccctggtctctaccaggctcccgcggccgccgcggggctcaacagcgcggcctctgccgcggcagccgcggcagccgcagcggctgcggcctcctcggcggcggcggccggcgcgccccccagcggcggctctgcaccctgctcgtgcctcagttgccacagcagtcagtcggcggcggcagccgcggcagcagctgccgcagccctgggttcccggggtggcggtggcggcggcggtggtggtggtggcggcggcggcgggggcgccggggccgggggaggctcggacttcggctgcagcgcggcggcgccgcgttccgagagcggcttcctgccctactcggccgcggtgcttagtaagacggccgtgagcccgccggaccagagggacgaggctccgctcaccaga

SEQ ID NO: 4854 - DNA, 1095 bp, Homo sapiens
  source 1..1095: mol_type = genomic DNA
atggggccctgcagcggctcccgcctggggcccccagaggcagagtcgccctcccagccccctaagaggaggaagaagaggtacctgcgacatgacaagcccccctacacctacttggccatgatcgccttggtgattcaggccgctccctcccgcagactgaagctggcccagatcatccgtcaggtccaggccgtgttccccttcttcagggaagactacgagggctggaaagactccattcgccacaacctttcctccaaccgatgcttccgcaaggtgcccaaggaccctgcaaagccccaggccaagggcaacttctgggcggtcgacgtgagcctgatcccagctgaggcgctccggctgcagaacaccgccctgtgccggcgctggcagaacggaggtgcgcgtggagccttcgccaaggacctgggcccctacgtgctgcacggccggccataccggccgcccagtcccccgccaccacccagtgagggcttcagcatcaagtccctgctaggagggtccggggagggggcaccctggccggggctagctccacagagcagcccagttcctgcaggcacagggaacagtggggaggaggcggtgcccaccccaccccttccctcttctgagaggcctctgtggcccctctgcccccttcctggccccacgagagtggagggggagactgtgcaggggggagccatcgggccctcaaccctctccccagagcctagggcctggcctctccacttactgcagggcaccgcagttcctgggggacggtccagcgggggacacagggcctccctctgggggcagctgcccacctcctacttgcctatctacactcccaatgtggtaatgcccttggcaccaccacccacctcctgtccccagtgtccgtcaaccagccctgcctactggggggtggcccctgaaacccgagggcccccagggctgctctgcgatctagacgccctcttccaaggggtgccacccaacaaaagcatctacgacgtttgggtcagccaccctcgggacctggcggcccctggcccaggctggctgctctcctggtgcagcctg

SEQ ID NO: 4855 - DNA, 246 bp, Homo sapiens
  source 1..246: mol_type = genomic DNA
atggccaacctggagcgcaccttcatcgccatcaagccggacggcgtgcagcgcggcctggtgggcgagatcatcaagcgcttcgagcagaagggattccgcctcgtggccatgaagttcctccgggcctctgaagaacacctgaagcagcactacattgacctgaaagaccgaccattcttccctgggctggtgaagtacatgaactcagggccggttgtggccatggaacatcattcatggcag

SEQ ID NO: 4856 - DNA, 399 bp, Homo sapiens
  source 1..399: mol_type = genomic DNA
atgatgctcaactcagacaccatggagctggacctgccgcccacccactcagagactgagtcgggcttcagtgactgtgggggcggggcgggccctgatggtgccgggcctgggggtccgggagggggccaggcccgaggcccagagccgggagagcctggccggaaagacctgcagcatctgagccgcgaggagcgccggcgccggcgccgcgccacagccaagtaccgcacggcccacgccacgcgagaacgcatccgcgtggaagccttcaacctggccttcgccgagctgcgcaagctgctgcctacgctgccccccgacaagaagctctccaagattgagattctgcgcctggccatctgctatatctcctacctgaaccacgtgctggacgtc

SEQ ID NO: 4857 - DNA, 735 bp, Homo sapiens
  source 1..735: mol_type = genomic DNA
atgacctccagctacgggcacgttctggagcggcaaccggcgctgggcggccgcttggacagcccgggcaacctcgacaccctgcaggcgaaaaagaacttctccgtcagtcacctgctagacctggaggaagccggggacatggtggcggcacaggcggatgagaacgtgggcgaggctggccggagcctgctggagtcgccgggactcaccagcggcagcgacaccccgcagcaggacaatgaccagctgaactcagaagaaaaaaagaagagaaagcagcgaaggaataggacaaccttcaatagcagccagctgcaggctttggagcgtgtctttgagcggacacactatcctgatgcttttgtgcgagaagaccttgcccgccgggtgaacctcaccgaggcgagagtgcaggtgtggtttcagaaccgaagagccaagttccgcaggaatgagagagccatgctagccaataaaaacgcttccctcctcaaatcctactcaggagacgtgactgctgtggagcagcccatcgtacctcgtcctgctccgagacccaccgattatctctcctgggggacagcgtctccgtacagcgccatggctacttattctgccacatgtgccaacaatagccctgcacagggcatcaacatggccaacagcattgccaacctgagactgaaggccaaggaatatagtttacagaggaaccaggtgccaacagtcaac

SEQ ID NO: 4858 - DNA, 651 bp, Homo sapiens
  source 1..651: mol_type = genomic DNA
atgacctccagctacgggcacgttctggagcggcaaccggcgctgggcggccgcttggacagcccgggcaacctcgacaccctgcaggcgaaaaagaacttctccgtcagtcacctgctagacctggaggaagccggggacatggtggcggcacaggcggatgagaacgtgggcgaggctggccggagcctgctggagtcgccgggactcaccagcggcagcgacaccccgcagcaggacaatgaccagctgaactcagaagaaaaaaagaagagaaagcagcgaaggaataggacaaccttcaatagcagccagctgcaggctttggagcgtgtctttgagcggacacactatcctgatgcttttgtgcgagaagaccttgcccgccgggtgaacctcaccgaggcgagagtgcaggtgtggtttcagaaccgaagagccaagttccgcaggaatgagagagccatgctagccaataaaaacgcttccctcctcaaatcctactcaggagacgtgactgctgtggagcagcccatcgtacctcgtcctgctccgagacccaccgattatctctcctgggggacagcgtctccgtacagatcctcgtccctcccaagatgttgtttacacgaggggcttcataacggattc

SEQ ID NO: 4859 - DNA, 759 bp, Homo sapiens
  source 1..759: mol_type = genomic DNA
atggacagcgcggccgccgccttcgccctggacaagccggcgctgggcccggggccgccgccgcctccacccgcgctggggcccggcgactgcgcccaggcgcgcaagaacttctcggtgagccacctcctggacctggaagaggtggcggcggccgggcggctggcggcgcgccccggggccagggccgaggcgcgggagggcgcagcacgggagccgtccgggggcagcagcggcagcgaggcggcgccgcaggatggtgagtgtcccagcccggggcgcggtagcgccgccaagcggaagaagaagcagcggcggaaccgcaccacgttcaacagcagccaactgcaggcgctggagcgcgtgttcgagcgcacgcactaccccgacgcctttgtgcgcgaggagcttgcccggcgcgtcaacctcagcgaggcgcgcgttcaggtctggtttcagaaccgccgcgccaagttccgcaggaatgaaagggccatgctggccagccgctctgcctcgctgctcaagtcctacagccaggaggccgccatcgagcagcccgtggctccccggcccaccgccctgagtccagattatctctcctggacagcctcgtccccctacagcacagtgccaccctacagccctgggagctcaggccccgcaaccccaggggtcaacatggccaacagcatcgccagcctccgtctcaaggccaaggagttcagcctgcaccacagccaggtgcctacggtgaac

SEQ ID NO: 4860 - DNA, 723 bp, Homo sapiens
  source 1..723: mol_type = genomic DNA
atgtcagacaagctcaaggaacgcaaaagaacccccgtttctcataaagtgatagaaaagcggaggagggacaggatcaaccgctgcttgaacgagctgggcaagacagtgcccatggccttggcgaagcagagttccgggaagctggagaaggcggagatcctcgagatgaccgttcagtacctgagagcactgcactccgctgattttccccggggaagggaaaaagaacttctagcggagtttgccaactacttccactatggctaccacgagtgcatgaagaacctggtgcattacctcaccacggtggagcggatggagaccaaggacacgaagtacgcgcgcatcctcgccttcttgcagtccaaggcccgcctgggcgcggagcccgcctttccgccgctgggttcgctcccggagccggatttctcctatcagctgcaccctgcggggcccgaattcgctggtcacagcccgggcgaggccgctgtgttcccgcagggctctggtgccgggcctttcccctggccgcctggcgcggcccgcagccccgcgctgccctacctgcccagcgcgccagtgccgctcgctagcccagcgcagcagcacagccccttcctgacaccggtgcagggcctggaccggcattacctcaacctgatcggccacgcgcaccccaacgcccttaacctgcacacgccccagcaccccccggtgctc

SEQ ID NO: 4861 - DNA, 726 bp, Homo sapiens
  source 1..726: mol_type = genomic DNA
atgtcagacaagctcaaggaacgcaaaagaacccccgtttctcataaagtgatagaaaagcggaggagggacaggatcaaccgctgcttgaacgagctgggcaagacagtgcccatggccttggcgaagcagagttccgggaagctggagaaggcggagatcctcgagatgaccgttcagtacctgagagcactgcactccgctgattttccccggggaagggaaaaagcagaacttctagcggagtttgccaactacttccactatggctaccacgagtgcatgaagaacctggtgcattacctcaccacggtggagcggatggagaccaaggacacgaagtacgcgcgcatcctcgccttcttgcagtccaaggcccgcctgggcgcggagcccgcctttccgccgctgggttcgctcccggagccggatttctcctatcagctgcaccctgcggggcccgaattcgctggtcacagcccgggcgaggccgctgtgttcccgcagggctctggtgccgggcctttcccctggccgcctggcgcggcccgcagccccgcgctgccctacctgcccagcgcgccagtgccgctcgctagcccagcgcagcagcacagccccttcctgacaccggtgcagggcctggaccggcattacctcaacctgatcggccacgcgcaccccaacgcccttaacctgcacacgccccagcaccccccggtgctc

SEQ ID NO: 4862 - DNA, 768 bp, Homo sapiens
  source 1..768: mol_type = genomic DNA
atgcaagctgtagtgcccttgaacaagatgacagccatctcaccagaacctcaaactctggcctcgactgaacaaaatgaggtcccaagagtggttacttctggggaacaagaagctattttaagaggaaatgctgctgatgcagagtctttcagacagaggtttaggtggttttgttactcagaagtagctggacccaggaaagctctgagtcaactctgggagctctgcaatcagtggctgagaccagacattcacacgaaagaacagattttagagcttctggtgtttgagcagttcctgaccattttgcctggggagatcaggatttgggtaaagtcacaacatcctgagagtagtgaggaagtggtgaccctaatagaagatttgacccagatgcttgaagaaaaagatccagtctctcaagattctactgtttcccaagaggagaactcaaaagaggataaaatggtcactgtttgtcccaatactgagtcctgtgaatctataacattgaaggatgtagctgtgaacttttcaagaggagagtggaagaagctggagccttttcaaaaggagctatataaggaagtgctactggaaaacctcaggaacctagaatttctggactttccagtttcaaaattagagttgatttcccagctaaagtgggttgaattgccatggctgctggaagaagtctcaaaaagctcccgactagacatacatggagcagtaaaaaagatgcagatgttctctgaggctgaa

SEQ ID NO: 4863 - DNA, 2232 bp, Homo sapiens
  source 1..2232: mol_type = genomic DNA
atgcaagctgtagtgcccttgaacaagatgacagccatctcaccagaacctcaaactctggcctcgactgaacaaaatgaggtcccaagagtggttacttctggggaacaagaagctattttaagaggaaatgctgctgatgcagagtctttcagacagaggtttaggtggttttgttactcagaagtagctggacccaggaaagctctgagtcaactctgggagctctgcaatcagtggctgagaccagacattcacacgaaagaacagattttagagcttctggtgtttgagcagttcctgaccattttgcctggggagatcaggatttgggtaaagtcacaacatcctgagagtagtgaggaagtggtgaccctaatagaagatttgacccagatgcttgaagaaaaagatccagtctctcaagattctactgtttcccaagaggagaactcaaaagaggataaaatggtcactgtttgtcccaatactgagtcctgtgaatctataacattgaaggatgtagctgtgaacttttcaagaggagagtggaagaagctggagccttttcaaaaggagctatataaggaagtgctactggaaaacctcaggaacctagaatttctggactttccagtttcaaaattagagttgatttcccagctaaagtgggttgaattgccatggctgctggaagaagtctcaaaaagctcccgactagatgaatcagctttagataaaataatagaaaggtgcctcagggatgatgatcatggcttgatggaagaatcccagcaatattgtggcagctcagaggaggatcacggtaatcagggaaattcaaaaggaagagtcgcacaaaacaaaactcttgggagtggcagtaggggtaagaaatttgacccagataaaagcccctttggacataatttcaaagaaacttcagacttaattaaacatctgagagtctacttgaggaagaaatctcggaggtataatgaaagcaagaaacccttcagttttcattcagaccttgttctgaaccgcaaggagaaaaccgccggagaaaagtcacggaaatctaatgatggtgggaaagtcctgagtcactcttcagctcttactgaacatcagaaacgtcagaagattcatttgggggataggtcccaaaaatgcagtaagtgtgggataatctttattagaagatcaactctttctaggagaaaaacccctatgtgtgagaaatgtcggaaagattcatgtcaagaagcagccttaaataaagatgagggaaatgagagtggagaaaaaactcataaatgtagtaagtgtggaaaagcctttggctatagcgcctcactcaccaaacatcggagaattcacactggagaaaaaccctatatgtgtaatgaatgtggaaaagcttttagtgatagttcatcgctcacaccacatcatagaactcatagtggagagaaacccttcaaatgtgatgactgtgggaaaggtttcaccctaagtgctcacctcattaaacatcagagaattcatactggagaaaaaccttataaatgtaaagactgtgggagaccctttagtgacagttcatctcttattcaacatcagcgaattcatactggagaaaaaccctatacatgtagcaattgtggaaaatccttcagtcatagctcatccctttccaaacatcagagaattcatactggagagaaaccctataaatgtggcgaatgtggaaaagcctttaggcagaattcatgccttacccggcatcagagaattcacactggagaaaaaccatatttgtgtaatgattgcggaatgacttttagccattttacgtctgtgatttatcatcaaagacttcattcaggagaaaaaccctacaaatgtaaccagtgtgagaaagccttcccaacccattcactgctaagtcgtcatcagagaattcatactggtgtaaaaccttataaatgtaaagaatgtgggaagtccttcagtcagagttcatctcttaatgagcaccaccgaattcatacaggagagaaaccctatgagtgtaactattgtggtgcaacctttagtcgaagctcaatccttgtagaacacctaaaaattcataccggaaggagagaatatgaatgtaacgaatgtgagaagacatttaaaagtaattcaggcctcattagacatcggggatttcactctgcagag

SEQ ID NO: 4864 - DNA, 2493 bp, Homo sapiens
  source 1..2493: mol_type = genomic DNA
atggccagctcggagactgagatccgctgggctgagcctggcctggggaagggcccccagcggcggcgctgggcctgggccgaggacaagagggatgtggatagaagtagttcacaaagctgggaagaagagagactctttcccaatgccaccagccccgagctcctagaggacttccgcctggcccagcagcacctgccgcccctggagtgggacccacacccgcagcccgatgggcatcaggattccgagtcaggagagacttcgggagaagaggctgaagcagaggatgtggacagcccagcaagttcccatgagcctcttgcctggctcccccagcagggccgtcagctggacatgactgaagaggagccagatgggaccctcggaagtctggaggttgaggaggctggagagagctcctcaaggttggggtatgaggctggtctcagcttggaaggccatggaaacaccagccccatggctcttgggcatggtcaggccaggggctgggtggcttctggcgaacaagccagtggggacaaactttctgaacattccgaggtcaacccatccgttgaactcagcccggcaaggtcctggagcagtgggacagtgagcctcgaccaccctagtgacagccttgattctacctgggaaggagagaccgatggcccccagcccactgccctggcagaaaccttgccagagggccccagccaccacctcctaagcccagatggcagaactggaggcagtgttgctcgggcaacccccatggaattccaggactcctcagctcccccagcccagagtccgcagcatgccacagatagatggaggagagaaacgaccagattcttctgccctcagcccaaggaacacatctggaagcagacaaagacgtcacctaagccactcccttcccgattcattggctccatcagccccctgaatccccagcccaggccaacgcggcagggcaggccgctgcccagacagggagccactctggctggccgctcctcttctaatgcccccaagtatggccgggggcagttgaactacccactccctgatttctccaaggtagggccccgggtgagattccccaaagatgagagctaccgtccccccaagtccagaagccacaacaggaagcctcaggcccctgccaggcccctcatcttcaagtctccagctgagattgtgcaggaggtgctgttgagcagtggagaagcagccctggcaaaggacacgcctcctgcccaccctatcaccagggtaccccaagaatttcagacgcctgagcaagccactgagctggtccatcagctccaggaagactaccacaggctcctcaccaagtacgctgaggccgagaacaccattgaccagctacgcctcggggccaaggtgaacctgttctctgacccaccccagcccaaccacagcatccacacgggaatggtgccccaggggaccaaggtcttgtccttcaccatcccacagccccgctctgcagagtggtggccgggcccggccgaggacccccaggcctctgcggcctcagggtggccatcagctcgaggagacttgagcccctcctcgcttaccagcatgcccaccctggggtggcttccggagaaccgggacatctctgaggaccagtcctcagcagagcagacccaggcactggcttctcaggccagccagttcctggccaaggtggagtcctttgaaagactgatacaggcaggacgtctcatgccccaggaccaagtcaagggcttccagcggctgaaggctgcccacgcggccctagaggaggagtacctgaaggcttgtcgggagcaacaccctgcccagccgcttgccggctccaaggggacgcctggaagatttgatcctcgcagggagctggaggcagagatataccgtctgggaagctgcctggaagagctgaaggaacacatagaccagacccagcaagagcctgagccgcccgggtcagactcagctctggacagcaccccagccctgccctgcctccatcagccaacgcacctgcctgctccttctggacaagcccccatgccagccatcaagacctcctgccctgagcctgctaccaccactgccgccgccagcactggcccctgcccattgcacgtaaatgtggaggtgagctctggcaacagtgaggtggaggacaggccacaggaccccctggcccgactcaggcacaaggagctgcagatggagcaagtttaccatggcctcatggagcggtacctcagtgtgaagtctctcccagaagccatgagaatggaggaggaggaagaaggagaggaggaggaggaggaagaggggggaggtgactccctggaagttgatggggtggctgcaactccagggaaagcagaggccaccagggtcctcccaaggcagtgcccggtgcaggctgagaaaagtcatggggctcccctggag

SEQ ID NO: 4865 - DNA, 4317 bp, Homo sapiens
  source 1..4317: mol_type = genomic DNA
atggccagctcggagactgagatccgctgggctgagcctggcctggggaagggcccccagcggcggcgctgggcctgggccgaggacaagagggatgtggatagaagtagttcacaaagctgggaagaagagagactctttcccaatgccaccagccccgagctcctagaggacttccgcctggcccagcagcacctgccgcccctggagtgggacccacacccgcagcccgatgggcatcaggattccgagtcaggagagacttcgggagaagaggctgaagcagaggatgtggacagcccagcaagttcccatgagcctcttgcctggctcccccagcagggccgtcagctggacatgactgaagaggagccagatgggaccctcggaagtctggaggttgaggaggctggagagagctcctcaaggttggggtatgaggctggtctcagcttggaaggccatggaaacaccagccccatggctcttgggcatggtcaggccaggggctgggtggcttctggcgaacaagccagtggggacaaactttctgaacattccgaggtcaacccatccgttgaactcagcccggcaaggtcctggagcagtgggacagtgagcctcgaccaccctagtgacagccttgattctacctgggaaggagagaccgatggcccccagcccactgccctggcagaaaccttgccagagggccccagccaccacctcctaagcccagatggcagaactggaggcagtgttgctcgggcaacccccatggaattccaggactcctcagctcccccagcccagagtccgcagcatgccacagatagatggaggagagaaacgaccagattcttctgccctcagcccaaggaacacatctggaagcagacaaagacgtcacctaagccactcccttcccgattcattggctccatcagccccctgaatccccagcccaggccaacgcggcagggcaggccgctgcccagacagggagccactctggctggccgctcctcttctaatgcccccaagtatggccgggggcagttgaactacccactccctgatttctccaaggtagggccccgggtgagattccccaaagatgagagctaccgtccccccaagtccagaagccacaacaggaagcctcaggcccctgccaggcccctcatcttcaagtctccagctgagattgtgcaggaggtgctgttgagcagtggagaagcagccctggcaaaggacacgcctcctgcccaccctatcaccagggtaccccaagaatttcagacgcctgagcaagccactgagctggtccatcagctccaggaagactaccacaggctcctcaccaagtacgctgaggccgagaacaccattgaccagctacgcctcggggccaaggtgaacctgttctctgacccaccccagcccaaccacagcatccacacgggaatggtgccccaggggaccaaggtcttgtccttcaccatcccacagccccgctctgcagagtggtggccgggcccggccgaggacccccaggcctctgcggcctcagggtggccatcagctcgaggagacttgagcccctcctcgcttaccagcatgcccaccctggggtggcttccggagaaccgggacatctctgaggaccagtcctcagcagagcagacccaggcactggcttctcaggccagccagttcctggccaaggtggagtcctttgaaagactgatacaggcaggacgtctcatgccccaggaccaagtcaagggcttccagcggctgaaggctgcccacgcggccctagaggaggagtacctgaaggcttgtcgggagcaacaccctgcccagccgcttgccggctccaaggggacgcctggaagatttgatcctcgcagggagctggaggcagagatataccgtctgggaagctgcctggaagagctgaaggaacacatagaccagacccagcaagagcctgagccgcccgggtcagactcagctctggacagcaccccagccctgccctgcctccatcagccaacgcacctgcctgctccttctggacaagcccccatgccagccatcaagacctcctgccctgagcctgctaccaccactgccgccgccagcactggcccctgcccattgcacgtaaatgtggaggtgagctctggcaacagtgaggtggaggacaggccacaggaccccctggcccgactcaggcacaaggagctgcagatggagcaagtttaccatggcctcatggagcggtacctcagtgtgaagtctctcccagaagccatgagaatggaggaggaggaagaaggagaggaggaggaggaggaagaggggggaggtgactccctggaagttgatggggtggctgcaactccagggaaagcagaggccaccagggtcctcccaaggcagtgcccggtgcaggctgagaaaagtcatggggctcccctggaggaggccacggagaagatggtatctatgaagccaccaggtttccaggcatccctggctagagacgggcacatgtcaggcctgggcaaggctgaggcagcccctccaggccctggcgtgccaccccaccctccaggcaccaagtccgcagcatcccaccaaagtagtatgaccagcctggagggaagcggcatctctgagcgccttccacagaagcctttgcaccgaggcggtgggccccacctggaggagacctggatggcgtccccagagacagacagtggctttgtgggctcagaaacaagcagagtttcacccctcacccagactccagagcaccggctctcccacatcagcacagcaggaacattagcccagccctttgctgcatctgtgcccagggatggagcttcctaccccaaggccaggggttctctgattcccagaagagccacagagcccagcacaccccggagccaagcacagaggtacctctccagcccaagtgggcctctccggcagagggcacccaacttcagcctggagcggacactggcagccgagatggcggttcctggctcagagtttgaggggcacaaacggatttctgaacagccccttcccaacaagacaatcagcccacccccagcccccgcccctgccgctgcgcctctaccctgtggaccaacagagaccatccccagcttcctgctcaccagggcagggcgagaccaggccatctgtgagctgcaagaagaggtgtcccggcttcgtctgcggctggaagacagcctgcaccagccactccagggcagcccgacacgcccagcatctgcctttgaccgccccgcccggacccgcggccggccagcagactccccagccacctggggctcccattatggcagtaaatccacagagagattgcctggtgagcctagaggtgaagagcagattgtccctccaggaaggcagcgagccaggtcttcctcagtgcctcgggaggtgctccgactgtccctgagttcagaatctgagctgccctccctaccactgttctctgagaagagcaagaccaccaaggacagtccacaggcagctcgggatggaaagagaggggtgggcagtgctggatggccagacagggtcaccttccggggccaatacacaggccacgaataccatgttctgtcccctaaggcggtcccaaaaggcaatggcacagtctcctgtccccactgccggcccattaggacccaggatgcgggtggtgctgtcacaggggacccactgggaccgcctcccgctgatacccttcagtgtcccctgtgtggtcaagttgggtctcccccagaggcagatggtccaggctcagccacctctggggcagagaaggccaccacgaggagaaaagcatcttcaactcccagccccaagcagaggagcaagcaggcggggtcgtcgccacgcccaccccccggactgtggtatctggcaacagcgcccccagcaccagcccctccagcctttgcctacatctcctcggttcccatcatgccttatccacctgccgctgtgtactatgcgcctgcaggacctacctcagcccaaccagctgccaagtggccgcccacagcctctcccccaccagcccggagacaccggcactccatccagctcgacctgggcgacctagaggagctcaacaaggccctgagccgggccgtgcaggctgccgagagcgtccgctctaccaccaggcagatgagaagctcgctgtcagccgacctgcgccaggctcacagcctgcggggctcctgcctcttc

SEQ ID NO: 4866 - DNA, 480 bp, Homo sapiens
  source 1..480: mol_type = genomic DNA
atggccctcccgacaccctcggacagcaccctccccgcggaagcccggggacgaggacggcgacggagactcgtttggaccccgagccaaagcgaggccctgcgagcctgctttgagcggaacccgtacccgggcatcgccaccagagaacggctggcccaggccatcggcattccggagcccagggtccagatttggtttcagaatgagaggtcacgccagctgaggcagcaccggcgggaatctcggccctggcccgggagacgcggcccgccagaaggccggcgaaagcggaccgccgtcaccggatcccagaccgccctgctcctccgagcctttgagaaggatcgctttccaggcatcgccgcccgggaggagctggccagagagacgggcctcccggagtccaggattcagatctggtttcagaatcgaagggccaggcacccgggacagggtggcagggcgcccgcgcaggtc

SEQ ID NO: 4867 - DNA, 1272 bp, Homo sapiens
  source 1..1272: mol_type = genomic DNA
atggccctcccgacaccctcggacagcaccctccccgcggaagcccggggacgaggacggcgacggagactcgtttggaccccgagccaaagcgaggccctgcgagcctgctttgagcggaacccgtacccgggcatcgccaccagagaacggctggcccaggccatcggcattccggagcccagggtccagatttggtttcagaatgagaggtcacgccagctgaggcagcaccggcgggaatctcggccctggcccgggagacgcggcccgccagaaggccggcgaaagcggaccgccgtcaccggatcccagaccgccctgctcctccgagcctttgagaaggatcgctttccaggcatcgccgcccgggaggagctggccagagagacgggcctcccggagtccaggattcagatctggtttcagaatcgaagggccaggcacccgggacagggtggcagggcgcccgcgcaggcaggcggcctgtgcagcgcggcccccggcgggggtcaccctgctccctcgtgggtcgccttcgcccacaccggcgcgtggggaacggggcttcccgcaccccacgtgccctgcgcgcctggggctctcccacagggggctttcgtgagccaggcagcgagggccgcccccgcgctgcagcccagccaggccgcgccggcagaggggatctcccaacctgccccggcgcgcggggatttcgcctacgccgccccggctcctccggacggggcgctctcccaccctcaggctcctcggtggcctccgcacccgggcaaaagccgggaggaccgggacccgcagcgcgacggcctgccgggcccctgcgcggtggcacagcctgggcccgctcaagcggggccgcagggccaaggggtgcttgcgccacccacgtcccaggggagtccgtggtggggctggggccggggtccccaggtcgccggggcggcgtgggaaccccaagccggggcagctccacctccccagcccgcgcccccggacgcctccgcctccgcgcggcaggggcagatgcaaggcatcccggcgccctcccaggcgctccaggagccggcgccctggtctgcactcccctgcggcctgctgctggatgagctcctggcgagcccggagtttctgcagcaggcgcaacctctcctagaaacggaggccccgggggagctggaggcctcggaagaggccgcctcgctggaagcacccctcagcgaggaagaataccgggctctgctggaggagctt

SEQ ID NO: 4868 - DNA, 1995 bp, Homo sapiens
  source 1..1995: mol_type = genomic DNA
atgcagacagcagaccaccctgaggtggtcccattcctctataaccggcagcaacgtgcccactctctgtttttggcctcggcggagttctgcaacatcctctctagggtcctgtctcgggcccggagccggccagccaagctctatgtctacatcaatgagctctgcactgttctcaaggcccactcagccaaaaagaagctgaacttggcccctgccgccaccacctccaatgagccctctgggaataaccctcccacacacctctccttggaccccacaaatgctgaaaacactgcctctcagtctccaaggacccgtggttcccggcggcagatccagcgtttggagcagctgctggcgctctatgtggcagagatccggcggctgcaggaaaaggagttggatctctcagaattggatgacccagactccgcatacctgcaggaggcacggttgaagcgtaagctgatccgcctctttgggcgactatgtgagctgaaagactgctcttcactgaccggccgtgtcatagagcagcgcatcccctaccgtggcacccgctacccagaggttaacaggcgcattgagcggctcatcaacaagccagggcctgataccttccctgactatggggatgtgcttcgggctgtagagaaggcagctgcccgacacagccttggcctcccccgacagcagctccagctcatggctcaggatgccttccgagatgtgggcatcaggttacaggagcgacgtcacctcgatctcatctacaactttggctgccacctcacagatgactataggccaggcgttgaccctgcactatcagatcctgtgttggcccggcgccttcgggaaaaccggagtttggccatgagtcggctggatgaggtcatctccaaatatgcaatgttgcaagacaaaagtgaggagggcgagagaaaaaagagaagagctcggctccaaggcacctcttcccactctgcagacacccccgaagcctccttggattctggtgagggccctagtggaatggcatcccaggggtgcccttctgcctccagagctgagacagatgacgaagacgatgaggagagtgatgaggaagaggaggaggaggaggaagaagaagaggaggaggccacagattctgaagaggaggaggatctggaacagatgcaggagggtcaggaggatgatgaagaggaggacgaagaggaagaagcagcagcaggtaaagatggagacaagagccccatgtcctcactacagatctccaatgaaaagaacctggaacctggcaaacagatcagcagatcttcaggggagcagcaaaacaaaggacgcatagtgtcaccatcgttactgtcagaagaacccctggccccctccagcatagatgctgaaagcaatggagaacagcctgaggagctgaccctggaggaagaaagccctgtgtctcagctctttgagctagagattgaagctttgcccctggataccccttcctctgtggagacggacatttcctcttccaggaagcaatcagaggagcccttcaccactgtcttagagaatggagcaggcatggtctcttctacttccttcaatggaggcgtctctcctcacaactggggagattctggtcccccctgcaaaaaatctcggaaggagaagaagcaaacaggatcagggccattaggaaacagctatgtggaaaggcaaaggtcagtgcatgagaagaatgggaaaaagatatgtaccctgcccagcccaccttcccccttggcttccttggccccagttgctgattcctccacgagggtggactctcccagccatggcctggtgaccagctccctctgcatcccttctccagcccggctgtcccaaaccccccattcacagcctcctcggcctggtacttgcaagacaagtgtggccacacaatgcgatccagaagagatcatcgtgctctcagactctgat

SEQ ID NO: 4869 - DNA, 3489 bp, Homo sapiens
  source 1..3489: mol_type = genomic DNA
atgaaccgtgaagaccggaatgtgctgcgtatgaaagaacgggaaaggcggaatcaggaaattcagcagggcgaagacgccttcccacctagctctcctctctttgcagagccatacaaagttactagcaaagaagataagttatcaagtcgtattcagagtatgcttggaaactacgatgaaatgaaggatttcataggagacagatctataccaaagcttgttgcaattcccaagcctacagtaccaccatcagcagatgaaaaatctaacccaaatttctttgaacagagacatggaggctctcatcagagtagcaaatggactccagtaggacccgcacccagcacttctcagtctcagaaacggtcctcaggcttacagagtggacatagtagccagcggaccagcgcaggtagcagtagtggcactaacagtagtggtcagaggcacgaccgtgagtcatataacaatagtgggagcagtagccggaaaaaaggccagcatggatcagaacactccaaatcacgttcttccagccctggaaaaccccaggctgtttcttcattaaactctagtcattccaggtctcatgggaatgatcaccatagcaaggaacatcaacgctccaaatcacctcgggaccctgatgcaaactgggattctccttcccgtgtacctttttcaagtgggcagcactcaactcaatctttcccaccctcattgatgtcaaagtccaattcaatgttacagaaacccactgcctatgtgcggcccatggacggacaggagtccatggaaccaaagctgtcctctgagcactacagcagccaatcccatggcaacagcatgactgagctgaagcccagcagcaaagcacatctcaccaagctgaaaataccttcccaaccactggatgcatcagcttctggtgatgtgagctgtgtggatgaaatcctaaaagagatgacgcattcatggcctccccctctaacggctattcatacaccatgcaaaacagaaccttccaaatttccttttccaactaaggagtctcagcagtccaattttggcactggagaacaaaaaagatataatccttctaaaacttcaaatgggcaccagtctaaatctatgttaaaagatgacttaaaactaagcagcagtgaagacagtgatggggaacaggattgtgataagacaatgccgaggagtacaccaggaagtaactctgaaccttcacaccataatagtgaaggagcagataactccagggatgattctagtagccacagtggatctgaaagcagctctggatctgactcagagagtgaaagtagttccagtgacagtgaggcaaatgagccatcccagagtgcatctcccgagcctgaacccccgccaacaaacaaatggcaacttgataattggctgaataaagtgaacccacataaagtgtcacccgcctcttcagtggacagtaacatcccatcatctcaaggctacaaaaaggaaggccgagagcagggcactgggaatagctacactgatacaagtggacctaaagaaacgagttccgctactccgggacgagactccaaaaccatccaaaagggatcagaaagtgggcgtgggaggcagaaatctcctgcacagagtgacagcacaacacagagaagaactgtaggcaaaaaacaacccaaaaaggctgagaaggcagctgctgaagagcctcgtggaggcctgaagatagaaagtgaaacccctgtagacttggctagcagcatgccctccagcagacacaaagcagccaccaaaggctcaaggaaacccaatataaagaaggagtctaagtcttcccctcgacctacagcagagaaaaagaaatataagtcaacaagtaaatcttcccagaaatcaagggaaatcatagaaacagatacctcatcctcagattcagatgaaagtgagagccttcctccttcctcacaaactcctaagtaccccgagagcaataggactcctgttaaaccctcctcagtggaggaagaagatagcttttttcggcaacgaatgttctctcctatggaagagaaggaacttctttcacccctcagtgagcctgatgacaggtacccacttattgtgaagattgacctgaatcttttgactagaataccaggaaagccttacaaagaaacagagccgcccaagggggaaaagaaaaatgtgccagaaaagcacacgagagaggctcagaaacaagcctcagaaaaagtttccaacaaaggcaagaggaagcataagaatgaagatgataaccgagccagtgagagcaagaaacccaaaacggaggacaagaattcagcaggccataagccatccagcaacagagagtcatctaagcagagtgctgcaaaagaaaaggatttgttgccttctcccgctgggcctgttccttcaaaagatccaaaaacagagcatggctctcggaagaggactattagtcagtcttcttccttaaagtcaagcagtaacagcaacaaggagacgagtggcagcagcaaaaacagttcctccacatcaaagcagaagaagaccgaagggaagacttccagtagctccaaggaggttaaggaaaaggctccaagtagctcctctaactgtcctccatctgcaccaactcttgattcttctaagcctcggagaacaaagcttgtctttgatgacagaaattattcagcagaccattatttacaagaagcaaaaaagctaaagcacaatgcagatgcattgtctgataggtttgagaaagctgtatactatcttgatgctgtggtatctttcattgaatgtgggaatgcattagagaagaatgctcaggaatccaaatccccattccctatgtattcagagacggtggatctcatcaaatacactatgaagctaaagaattacttggcaccagatgctacagctgcagataaacgactcacagtactttgcctgcgatgcgagtctttgctgtacctgaggctgttcaaactgaagaaggaaaatgctctgaagtactcaaagacactgacagagcacctgaagaattcttataataattctcaagcaccatcgcctggcttgggaagcaaagctgtggggatgccttcccctgtttctccaaagctgtcaccaggcaattcaggaaattattcatctggggccagtagtgcttctgcaagtggttcttcagtgaccattccacagaagatccaccagatggcagccagctatgttcaggtcacatccaacttcctctatgccaccgaaatttgggaccaagctgaacagctttccaaagagcaaaaagaattctttgctgaactggataaagtaatgggccctctcatctttaatgcaagcatcatgacagatctagttcgttatacccggcagggactgcactggcttcgccaggatgccaagttgatatct

SEQ ID NO: 4870 - DNA, 3753 bp, Homo sapiens
  source 1..3753: mol_type = genomic DNA
atggacagcttcgacttagccctgctccaggaatgggacctcgagtcactgtggggtgaagacatcttaaaccagaggaatgactctctagttgtggaatttcagtcatcagccagcagatgcaggagtgtctatgaaccagatagaaatgcattacggaggaaagaacgagaaagaagaaatcaagaaactcaacaggatgatggcacgtttaattctagttactctctcttcagtgagccctacaagactaacaagggggatgaactctccaaccggatccagaacactttaggcaattatgatgaaatgaaagactttttaactgatagatccaatcagagtcatctcgttggagttcccaaacctggggttcctcagactcctgtgaacaagatcgatgaacattttgttgcagattcaagagcccagaaccagccctcgtctatctgtagcactacaacttccacaccagcagctgtccccgtgcagcagagtaagagaggcactatgggctggcagaaggctgggcacccaccctctgacggccaacagagagcaacacaacagggctctctcaggaccttgcttggagatggtgttggcagacagcagcctcgggccaaacaagtgtgcaatgtggaggtgggccttcagacccaggagaggccacctgccatggcggccaagcacagcagcagcggacactgtgttcagaactttcctccatccctagcttcaaaacccagcctggtccagcagaaaccgaccgcgtatgtgaggccaatggacggccaagatcaggcccctgatgagtctcctaagctgaagtcgtcttcggaaaccagcgtgcactgcacatcatacaggggagtccctgccagcaagccggagcctgccagagccaaggccaagctctccaagttcagcatccccaagcagggggaggagagtagatctggagaaaccaacagctgtgttgaagaaataatccgggagatgacctggcttccaccactttctgctattcaagcacctggcaaagtggaaccaaccaaatttccatttccaaataaggactctcagcttgtatcctctggacacaataatccaaagaaaggtgatgcagagccagagagtccagacaatggcacatcgaatacatcaatgctggaagatgaccttaagctaagcagtgatgaagaggagaatgaacagcaggcagctcagagaacggctctccgcgctctctctgacagcgccgtggtccagcagcccaactgcagaacctcggtgccttccagcaagggcagcagcagcagcagcagcagcggcagcagcagctcctccagcgactcagagagcagctccggatctgactcggagaccgagagcagctccagcgagagtgagggcagcaagcccccccacttctccagccccgaggctgaaccggcatcctctaacaagtggcagctggataaatggctaaacaaagttaatccccacaagcctcctattctgatccaaaatgaaagccacgggtcagagagcaatcagtactacaacccggtgaaagaggacgtccaggactgtgggaaagtccccgacgtttgccagcccagcctgagagagaaggagatcaagagcacttgcaaggaggagcaaaggccaaggacagccaacaaggcccctgggagtaaaggcgtgaagcagaagtccccgcccgcggccgtggccgtggcggtgagcgcagccgccccgccacccgcagtgccctgtgcgcccgcggagaacgcgcccgcgcctgcccggaggtccgcgggcaagaagcccaccaggcgcaccgagaggacctcagccggggacggcgccaactgccaccggcccgaggagcccgcggccgcggacgcgctggggacgagcgtggtggtccccccggagcccaccaaaaccaggccctgtggcaacaacagagcgagccaccgcaaggagctgcgctcctccgtgacctgcgagaagcgccgcacgcgggggctaagcaggatcgtccccaaatccaaggagttcattgagacagagtcgtcatcttcatcctcctcctcggactccgacctggagtccgagcaggaggagtaccctctgtccaaagcacagaccgtggctgcctctgcctcctccgggaatgatcagaggctgaaggaggccgctgccaacgggggcagtggtcctagggcccctgtaggctccatcaacgccaggaccaccagtgacatcgccaaggagctggaggagcagttctacacactggtcccctttggccggaacgaacttctctcccctctaaaggacagtgatgagatcaggtctctctgggtcaaaatcgacctgaccctcctgtccaggatcccagaacacctgccccaggagccaggggtattgagcgcccctgccaccaaggactctgagagcgcaccgcccagccacacctcggacacacctgcagaaaaggctttgccaaaatccaagaggaaacgcaagtgtgacaacgaagacgactacagggagatcaagaagtcccagggagagaaagacagctcttcaagactggccacctccaccagtaatactttgtctgcaaaccactgcaacatgaacatcaacagtgtggcaataccaataaataaaaatgaaaaaatgcttcggtcgcccatctcacccctctctgatgcatctaaacacaaatacaccagcgaggacttaacttcttccagccgacctaatggcaacagtttgtttacttcagcctcttccagcaaaaagcctaaggccgacagccagctgcagcctcacggcggagacctcacgaaagcagctcacaacaattctgaaaacattcccctccacaagtcacggccgcagacgaagccgtggtctccaggctccaacggccacagggactgcaagaggcagaaacttgtcttcgatgatatgcctcgcagtgccgattattttatgcaagaagctaaacgaatgaagcataaagcagatgcaatggtggaaaagtttggaaaggctttgaactatgctgaagcagcattgtcgtttatcgagtgtggaaatgcaatggaacaaggccccatggaatccaaatctccttatacgatgtattcagaaacagtagagctcatcaggtatgctatgagactaaaaacccactcaggccccaatgccacaccagaagacaaacaactggctgcattatgttaccgatgcctggccctcctgtactggcggatgtttcgactcaaaagggaccacgctgtaaagtattcaaaagcactaatcgactatttcaagaactcatctaaagccgcccaagccccatctccgtggggggccagtggaaagagcactggaaccccatcccccatgtctcccaacccctctcccgccagctccgtggggtctcagggcagcctctccaacgccagcgccctgtccccgtcgaccatcgtcagcatcccacagcgcatccaccagatggcggccaaccacgtcagcatcaccaacagcatcctgcacagctacgactactgggagatggccgacaacctggccaaggaaaaccgagaattcttcaacgacctggatctgctcatggggccggtcaccctgcacagcagcatggagcacctggtccagtactcccaacagggcctgcactggctgcggaacagcgcccacctgtca

SEQ ID NO: 4871 - DNA, 3678 bp, Homo sapiens
  source 1..3678: mol_type = genomic DNA
atggacagcttcgacttagccctgctccaggaatgggacctcgagtcactgtgtgtctatgaaccagatagaaatgcattacggaggaaagaacgagaaagaagaaatcaagaaactcaacaggatgatggcacgtttaattctagttactctctcttcagtgagccctacaagactaacaagggggatgaactctccaaccggatccagaacactttaggcaattatgatgaaatgaaagactttttaactgatagatccaatcagagtcatctcgttggagttcccaaacctggggttcctcagactcctgtgaacaagatcgatgaacattttgttgcagattcaagagcccagaaccagccctcgtctatctgtagcactacaacttccacaccagcagctgtccccgtgcagcagagtaagagaggcactatgggctggcagaaggctgggcacccaccctctgacggccaacagagagcaacacaacagggctctctcaggaccttgcttggagatggtgttggcagacagcagcctcgggccaaacaagtgtgcaatgtggaggtgggccttcagacccaggagaggccacctgccatggcggccaagcacagcagcagcggacactgtgttcagaactttcctccatccctagcttcaaaacccagcctggtccagcagaaaccgaccgcgtatgtgaggccaatggacggccaagatcaggcccctgatgagtctcctaagctgaagtcgtcttcggaaaccagcgtgcactgcacatcatacaggggagtccctgccagcaagccggagcctgccagagccaaggccaagctctccaagttcagcatccccaagcagggggaggagagtagatctggagaaaccaacagctgtgttgaagaaataatccgggagatgacctggcttccaccactttctgctattcaagcacctggcaaagtggaaccaaccaaatttccatttccaaataaggactctcagcttgtatcctctggacacaataatccaaagaaaggtgatgcagagccagagagtccagacaatggcacatcgaatacatcaatgctggaagatgaccttaagctaagcagtgatgaagaggagaatgaacagcaggcagctcagagaacggctctccgcgctctctctgacagcgccgtggtccagcagcccaactgcagaacctcggtgccttccagcaagggcagcagcagcagcagcagcagcggcagcagcagctcctccagcgactcagagagcagctccggatctgactcggagaccgagagcagctccagcgagagtgagggcagcaagcccccccacttctccagccccgaggctgaaccggcatcctctaacaagtggcagctggataaatggctaaacaaagttaatccccacaagcctcctattctgatccaaaatgaaagccacgggtcagagagcaatcagtactacaacccggtgaaagaggacgtccaggactgtgggaaagtccccgacgtttgccagcccagcctgagagagaaggagatcaagagcacttgcaaggaggagcaaaggccaaggacagccaacaaggcccctgggagtaaaggcgtgaagcagaagtccccgcccgcggccgtggccgtggcggtgagcgcagccgccccgccacccgcagtgccctgtgcgcccgcggagaacgcgcccgcgcctgcccggaggtccgcgggcaagaagcccaccaggcgcaccgagaggacctcagccggggacggcgccaactgccaccggcccgaggagcccgcggccgcggacgcgctggggacgagcgtggtggtccccccggagcccaccaaaaccaggccctgtggcaacaacagagcgagccaccgcaaggagctgcgctcctccgtgacctgcgagaagcgccgcacgcgggggctaagcaggatcgtccccaaatccaaggagttcattgagacagagtcgtcatcttcatcctcctcctcggactccgacctggagtccgagcaggaggagtaccctctgtccaaagcacagaccgtggctgcctctgcctcctccgggaatgatcagaggctgaaggaggccgctgccaacgggggcagtggtcctagggcccctgtaggctccatcaacgccaggaccaccagtgacatcgccaaggagctggaggagcagttctacacactggtcccctttggccggaacgaacttctctcccctctaaaggacagtgatgagatcaggtctctctgggtcaaaatcgacctgaccctcctgtccaggatcccagaacacctgccccaggagccaggggtattgagcgcccctgccaccaaggactctgagagcgcaccgcccagccacacctcggacacacctgcagaaaaggctttgccaaaatccaagaggaaacgcaagtgtgacaacgaagacgactacagggagatcaagaagtcccagggagagaaagacagctcttcaagactggccacctccaccagtaatactttgtctgcaaaccactgcaacatgaacatcaacagtgtggcaataccaataaataaaaatgaaaaaatgcttcggtcgcccatctcacccctctctgatgcatctaaacacaaatacaccagcgaggacttaacttcttccagccgacctaatggcaacagtttgtttacttcagcctcttccagcaaaaagcctaaggccgacagccagctgcagcctcacggcggagacctcacgaaagcagctcacaacaattctgaaaacattcccctccacaagtcacggccgcagacgaagccgtggtctccaggctccaacggccacagggactgcaagaggcagaaacttgtcttcgatgatatgcctcgcagtgccgattattttatgcaagaagctaaacgaatgaagcataaagcagatgcaatggtggaaaagtttggaaaggctttgaactatgctgaagcagcattgtcgtttatcgagtgtggaaatgcaatggaacaaggccccatggaatccaaatctccttatacgatgtattcagaaacagtagagctcatcaggtatgctatgagactaaaaacccactcaggccccaatgccacaccagaagacaaacaactggctgcattatgttaccgatgcctggccctcctgtactggcggatgtttcgactcaaaagggaccacgctgtaaagtattcaaaagcactaatcgactatttcaagaactcatctaaagccgcccaagccccatctccgtggggggccagtggaaagagcactggaaccccatcccccatgtctcccaacccctctcccgccagctccgtggggtctcagggcagcctctccaacgccagcgccctgtccccgtcgaccatcgtcagcatcccacagcgcatccaccagatggcggccaaccacgtcagcatcaccaacagcatcctgcacagctacgactactgggagatggccgacaacctggccaaggaaaaccgagaattcttcaacgacctggatctgctcatggggccggtcaccctgcacagcagcatggagcacctggtccagtactcccaacagggcctgcactggctgcggaacagcgcccacctgtca

SEQ ID NO: 4872 - DNA, 3828 bp, Homo sapiens
  source 1..3828: mol_type = genomic DNA
atggatctattcgactttttcagagactgggacttggagcagcagtgtcactatgaacaagaccgtagtgcacttaaaaaaagggaatgggagcggaggaatcaagaagtccagcaagaagacgatctcttttcttcaggctttgatctttttggggagccatacaaggtagctgaatatacaaacaaaggtgatgcacttgccaaccgagtccagaacacgcttggaaactatgatgaaatgaagaatttgctaactaaccattctaatcagaatcacctagtgggaattccaaagaattctgtgccccagaatcccaacaacaaaaatgaaccaagcttttttccagaacaaaagaacagaataattccacctcaccaggataatacccatccttcagcaccaatgcctccaccttctgttgtgatactgaattcaactctaatacacagcaacagaaaatcaaaacctgagtggtcacgtgatagtcataaccctagcactgtactggcaagccaggccagtggtcagccaaacaagatgcagactttgacacaggaccagtctcaagccaaactggaagacttctttgtctacccagctgaacagccccagattggagaagttgaagagtcaaacccatctgcaaaggaagacagtaaccctaattctagtggagaagatgctttcaaagaaatctttcaatccaattcaccggaagaatctgaattcgccgtgcaagcgcctgggtctcccctagtggcttcctctttattagctcctagcagtggcctttcagttcaaaacttcccaccagggctttactgcaaaacaagcatggggcagcaaaagccaactgcatacgtcagacccatggatggccaggaccaggcaccggacatctcaccaacactgaaaccttcaattgaatttgagaacagctttgggaatctgtcatttggaacactcttggatggaaaacccagtgcagccagttcaaagactaaactgccaaagttcaccatcctccaaacaagtgaagtaagccttcccagtgatccaagctgtgttgaagaaatcttgcgggaatcgcagcatctgaccccaggattcaccttacaaaagtggaatgacccaaccaccagagcttctacaaagatgcttgaggatgacctgaagctgagcagtgatgaagatgaccttgagcctgtgaagaccttgaccactcagtgcactgccactgagctctaccaggctgttgaaaaggcaaaacctaggaataatcctgtgaacccacccttggccactccccagcccccacctgcagtgcaagccagcgggggttctggcagctccagcgaatcggagagcagctctgagtcggattcagacactgaaagtagcaccactgacagcgaatctaatgaggcacctcgtgtggcaactccagagcctgagccaccctcaaccaacaagtggcaactggataaatggcttaacaaagtgacatcccagaacaagtcttttatttgtggccaaaatgaaacacccatggagactatttctctgcctcctccaatcatccaaccaatggaagtccagatgaaagtgaagacgaatgccagtcaggtcccagctgaacccaaagaaaggcctctcctcagtctcattagggagaaagcccgtccacggcccactcagaaaattccagaaacaaaggctttgaagcataagttgtcaacaactagtgagacagtgtctcaaaggacaattgggaaaaaacagcccaaaaaagttgagaagaacaccagcactgacgagtttacctggcccaaaccaaatattaccagcagcactcccaaagaaaaagaaagtgtggagcttcatgacccaccaagaggccgcaacaaagccactgcccacaaaccagcccctaggaaagaaccaagacctaacatccctttggctcccgagaagaagaagtacagagggcctggcaagattgtgccaaagtctcgggaattcattgaaacagattcatctacatctgactccaacacagatcaggaagagaccctgcaaatcaaagtcctgcctccgtgcattatttctggaggtaatactgccaaatccaaggaaatctgtggtgccagcctgaccctcagcaccttaatgagtagcagtggcagcaacaacaacttatccatcagtaatgaagagccaacattttcacctattcctgtcatgcaaactgaaatcctgtcccctctgcgagatcatgagaacctgaaaaacctctgggtgaagattgaccttgacttactctctagagtacctggccacagctcactccatgcagcacctgccaagccagaccacaaggagactgccacaaaacccaagcgtcagacagctgtcacagctgtggagaaaccagcccctaagggcaaacgtaagcacaagccaatagaagttgcagagaagatccctgagaagaagcagcgcctggaggaggccacaactatctgcttgctccctccttgcatctcaccagccccaccccacaagcctcccaacactagagaaaataattcatccaggagagcaaatagaagaaaggaagaaaaactatttcctcctccactttccccactgccagaggaccctccacgccgcagaaatgtcagtggcaataatggtccctttggtcaagacaaaaacatcgccatgactggacaaatcacatctaccaaacctaagagaactgaaggcaaattctgtgctactttcaaagggatatcggtaaatgagggagacactccaaaaaaggcatcctctgccaccatcactgtcaccaatactgctattgccactgctactgtcactgctactgccattgtcaccaccactgtcacagctactgccaccgccacggccaccaccacaactactaccactaccatttccaccatcacctctaccatcactactggcctcatggatagcagtcacctggagatgacgtcctgggcggctctgccccttctatccagcagcagcactaatgtccggagacccaagctcacttttgatgactcggttcacaatgctgattattacatgcaagaagctaagaagctgaagcacaaagctgatgcactgttcgagaaatttggcaaagctgtgaattatgctgatgccgccctctccttcactgaatgtggcaatgccatggaacgcgaccctctggaagcaaagtccccatacaccatgtactctgagactgtggagctcctcaggtatgcaatgaggctgaagaactttgcaagtcccttggcttcggatggggacaaaaagctagcagtactatgctaccgatgtttatcactcctctatttgagaatgtttaagctgaagaaggaccatgctatgaagtactccagatcactgatggaatattttaagcaaaatgcttcaaaagtcgcacagataccctctccatgggtaagcaatggaaagaacactccatccccagtgtctctcaacaacgtctcccccatcaacgcaatggggaactgtaacaatggcccagtcaccattccccagcgcattcaccacatggctgccagccacgtcaacatcactagcaatgtgttacggggctatgaacactgggatatggccgacaaactgacaagagaaaacaaagaattctttggtgatctggacacgctgatggggcctctgacccagcacagcagcatgaccaatcttgtccgctacgttcgccaaggactgtgttggctgcgcatcgatgcccacttgttg

SEQ ID NO: 4873 - DNA, 3828 bp, Homo sapiens
  source 1..3828: mol_type = genomic DNA
atggatctattcgactttttcagagactgggacttggagcagcagtgtcactatgaacaagaccgtagtgcacttaaaaaaagggaatgggagcggaggaatcaagaagtccagcaagaagacgatctcttttcttcaggctttgatctttttggggagccatacaagacaaacaaaggtgatgcacttgccaaccgagtccagaacacgcttggaaactatgatgaaatgaagaatttgctaactaaccattctaatcagaatcacctagtgggaattccaaagaattctgtgccccagaatcccaacaacaaaaatgaaccaagcttttttccagaacaaaagaacagaataattccacctcaccaggataatacccatccttcagcaccaatgcctccaccttctgttgtgatactgaattcaactctaatacacagcaacagaaaatcaaaacctgagtggtcacgtgatagtcataaccctagcactgtactggcaagccaggccagtggtcagccaaacaagatgcagactttgacacaggaccagtctcaagccaaactggaagacttctttgtctacccagctgaacagccccagattggagaagttgaagagtcaaacccatctgcaaaggaagacagtaaccctaattctagtggagaagatgctttcaaagaaatctttcaatccaattcaccggaagaatctgaattcgccgtgcaagcgcctgggtctcccctagtggcttcctctttattagctcctagcagtggcctttcagttcaaaacttcccaccagggctttactgcaaaacaagcatggggcagcaaaagccaactgcatacgtcagacccatggatggccaggaccaggcaccggacatctcaccaacactgaaaccttcaattgaatttgagaacagctttgggaatctgtcatttggaacactcttggatggaaaacccagtgcagccagttcaaagactaaactgccaaagttcaccatcctccaaacaagtgaagtaagccttcccagtgatccaagctgtgttgaagaaatcttgcgggaatcgcagcatctgaccccaggattcaccttacaaaagtggaatgacccaaccaccagagcttctacaaagtcagtgtctttcaaatcgatgcttgaggatgacctgaagctgagcagtgatgaagatgaccttgagcctgtgaagaccttgaccactcagtgcactgccactgagctctaccaggctgttgaaaaggcaaaacctaggaataatcctgtgaacccacccttggccactccccagcccccacctgcagtgcaagccagcgggggttctggcagctccagcgaatcggagagcagctctgagtcggattcagacactgaaagtagcaccactgacagcgaatctaatgaggcacctcgtgtggcaactccagagcctgagccaccctcaaccaacaagtggcaactggataaatggcttaacaaagtgacatcccagaacaagtcttttatttgtggccaaaatgaaacacccatggagactatttctctgcctcctccaatcatccaaccaatggaagtccagatgaaagtgaagacgaatgccagtcaggtcccagctgaacccaaagaaaggcctctcctcagtctcattagggagaaagcccgtccacggcccactcagaaaattccagaaacaaaggctttgaagcataagttgtcaacaactagtgagacagtgtctcaaaggacaattgggaaaaaacagcccaaaaaagttgagaagaacaccagcactgacgagtttacctggcccaaaccaaatattaccagcagcactcccaaagaaaaagaaagtgtggagcttcatgacccaccaagaggccgcaacaaagccactgcccacaaaccagcccctaggaaagaaccaagacctaacatccctttggctcccgagaagaagaagtacagagggcctggcaagattgtgccaaagtctcgggaattcattgaaacagattcatctacatctgactccaacacagatcaggaagagaccctgcaaatcaaagtcctgcctccgtgcattatttctggaggtaatactgccaaatccaaggaaatctgtggtgccagcctgaccctcagcaccttaatgagtagcagtggcagcaacaacaacttatccatcagtaatgaagagccaacattttcacctattcctgtcatgcaaactgaaatcctgtcccctctgcgagatcatgagaacctgaaaaacctctgggtgaagattgaccttgacttactctctagagtacctggccacagctcactccatgcagcacctgccaagccagaccacaaggagactgccacaaaacccaagcgtcagacagctgtcacagctgtggagaaaccagcccctaagggcaaacgtaagcacaagccaatagaagttgcagagaagatccctgagaagaagcagcgcctggaggaggccacaactatctgcttgctccctccttgcatctcaccagccccaccccacaagcctcccaacactagagaaaataattcatccaggagagcaaatagaagaaaggaagaaaaactatttcctcctccactttccccactgccagaggaccctccacgccgcagaaatgtcagtggcaataatggtccctttggtcaagacaaaaacatcgccatgactggacaaatcacatctaccaaacctaagagaactgaaggcaaattctgtgctactttcaaagggatatcggagggagacactccaaaaaaggcatcctctgccaccatcactgtcaccaatactgctattgccactgctactgtcactgctactgccattgtcaccaccactgtcacagctactgccaccgccacggccaccaccacaactactaccactaccatttccaccatcacctctaccatcactactggcctcatggatagcagtcacctggagatgacgtcctgggcggctctgccccttctatccagcagcagcactaatgtccggagacccaagctcacttttgatgactcggttcacaatgctgattattacatgcaagaagctaagaagctgaagcacaaagctgatgcactgttcgagaaatttggcaaagctgtgaattatgctgatgccgccctctccttcactgaatgtggcaatgccatggaacgcgaccctctggaagcaaagtccccatacaccatgtactctgagactgtggagctcctcaggtatgcaatgaggctgaagaactttgcaagtcccttggcttcggatggggacaaaaagctagcagtactatgctaccgatgtttatcactcctctatttgagaatgtttaagctgaagaaggaccatgctatgaagtactccagatcactgatggaatattttaagcaaaatgcttcaaaagtcgcacagataccctctccatgggtaagcaatggaaagaacactccatccccagtgtctctcaacaacgtctcccccatcaacgcaatggggaactgtaacaatggcccagtcaccattccccagcgcattcaccacatggctgccagccacgtcaacatcactagcaatgtgttacggggctatgaacactgggatatggccgacaaactgacaagagaaaacaaagaattctttggtgatctggacacgctgatggggcctctgacccagcacagcagcatgaccaatcttgtccgctacgttcgccaaggactgtgttggctgcgcatcgatgcccacttgttg

SEQ ID NO: 4874 - DNA, 3933 bp, Homo sapiens
  source 1..3933: mol_type = genomic DNA
atggatctattcgactttttcagagactgggacttggagcagcagtgtcactatgaacaagaccgtagtgcacttaaaaaaagggaatgggagcggaggaatcaagaagtccagcaagaagacgatctcttttcttcaggctttgatctttttggggagccatacaaggtagctgaatatacaaacaaaggtgatgcacttgccaaccgagtccagaacacgcttggaaactatgatgaaatgaagaatttgctaactaaccattctaatcagaatcacctagtgggaattccaaagaattctgtgccccagaatcccaacaacaaaaatgaaccaagcttttttccagaacaaaagaacagaataattccacctcaccaggataatacccatccttcagcaccaatgcctccaccttctgttgtgatactgaattcaactctaatacacagcaacagaaaatcaaaacctgagtggtcacgtgatagtcataaccctagcactgtactggcaagccaggccagtggtcagccaaacaagatgcagactttgacacaggaccagtctcaagccaaactggaagacttctttgtctacccagctgaacagccccagattggagaagttgaagagtcaaacccatctgcaaaggaagacagtaaccctaattctagtggagaagatgctttcaaagaaatctttcaatccaattcaccggaagaatctgaattcgccgtgcaagcgcctgggtctcccctagtggcttcctctttattagctcctagcagtggcctttcagttcaaaacttcccaccagggctttactgcaaaacaagcatggggcagcaaaagccaactgcatacgtcagacccatggatggccaggaccaggcaccggacatctcaccaacactgaaaccttcaattgaatttgagaacagctttgggaatctgtcatttggaacactcttggatggaaaacccagtgcagccagttcaaagactaaactgccaaagttcaccatcctccaaacaagtgaagtaagccttcccagtgatccaagctgtgttgaagaaatcttgcgggagatgacccattcctggcctactcctctcacttccatgcatactgctggacactctgagcagagcaccttttccatcccaggacaggaatcgcagcatctgaccccaggattcaccttacaaaagtggaatgacccaaccaccagagcttctacaaagtcagtgtctttcaaatcgatgcttgaggatgacctgaagctgagcagtgatgaagatgaccttgagcctgtgaagaccttgaccactcagtgcactgccactgagctctaccaggctgttgaaaaggcaaaacctaggaataatcctgtgaacccacccttggccactccccagcccccacctgcagtgcaagccagcgggggttctggcagctccagcgaatcggagagcagctctgagtcggattcagacactgaaagtagcaccactgacagcgaatctaatgaggcacctcgtgtggcaactccagagcctgagccaccctcaaccaacaagtggcaactggataaatggcttaacaaagtgacatcccagaacaagtcttttatttgtggccaaaatgaaacacccatggagactatttctctgcctcctccaatcatccaaccaatggaagtccagatgaaagtgaagacgaatgccagtcaggtcccagctgaacccaaagaaaggcctctcctcagtctcattagggagaaagcccgtccacggcccactcagaaaattccagaaacaaaggctttgaagcataagttgtcaacaactagtgagacagtgtctcaaaggacaattgggaaaaaacagcccaaaaaagttgagaagaacaccagcactgacgagtttacctggcccaaaccaaatattaccagcagcactcccaaagaaaaagaaagtgtggagcttcatgacccaccaagaggccgcaacaaagccactgcccacaaaccagcccctaggaaagaaccaagacctaacatccctttggctcccgagaagaagaagtacagagggcctggcaagattgtgccaaagtctcgggaattcattgaaacagattcatctacatctgactccaacacagatcaggaagagaccctgcaaatcaaagtcctgcctccgtgcattatttctggaggtaatactgccaaatccaaggaaatctgtggtgccagcctgaccctcagcaccttaatgagtagcagtggcagcaacaacaacttatccatcagtaatgaagagccaacattttcacctattcctgtcatgcaaactgaaatcctgtcccctctgcgagatcatgagaacctgaaaaacctctgggtgaagattgaccttgacttactctctagagtacctggccacagctcactccatgcagcacctgccaagccagaccacaaggagactgccacaaaacccaagcgtcagacagctgtcacagctgtggagaaaccagcccctaagggcaaacgtaagcacaagccaatagaagttgcagagaagatccctgagaagaagcagcgcctggaggaggccacaactatctgcttgctccctccttgcatctcaccagccccaccccacaagcctcccaacactagagaaaataattcatccaggagagcaaatagaagaaaggaagaaaaactatttcctcctccactttccccactgccagaggaccctccacgccgcagaaatgtcagtggcaataatggtccctttggtcaagacaaaaacatcgccatgactggacaaatcacatctaccaaacctaagagaactgaaggcaaattctgtgctactttcaaagggatatcggtaaatgagggagacactccaaaaaaggcatcctctgccaccatcactgtcaccaatactgctattgccactgctactgtcactgctactgccattgtcaccaccactgtcacagctactgccaccgccacggccaccaccacaactactaccactaccatttccaccatcacctctaccatcactactggcctcatggatagcagtcacctggagatgacgtcctgggcggctctgccccttctatccagcagcagcactaatgtccggagacccaagctcacttttgatgactcggttcacaatgctgattattacatgcaagaagctaagaagctgaagcacaaagctgatgcactgttcgagaaatttggcaaagctgtgaattatgctgatgccgccctctccttcactgaatgtggcaatgccatggaacgcgaccctctggaagcaaagtccccatacaccatgtactctgagactgtggagctcctcaggtatgcaatgaggctgaagaactttgcaagtcccttggcttcggatggggacaaaaagctagcagtactatgctaccgatgtttatcactcctctatttgagaatgtttaagctgaagaaggaccatgctatgaagtactccagatcactgatggaatattttaagcaaaatgcttcaaaagtcgcacagataccctctccatgggtaagcaatggaaagaacactccatccccagtgtctctcaacaacgtctcccccatcaacgcaatggggaactgtaacaatggcccagtcaccattccccagcgcattcaccacatggctgccagccacgtcaacatcactagcaatgtgttacggggctatgaacactgggatatggccgacaaactgacaagagaaaacaaagaattctttggtgatctggacacgctgatggggcctctgacccagcacagcagcatgaccaatcttgtccgctacgttcgccaaggactgtgttggctgcgcatcgatgcccacttgttg

SEQ ID NO: 4875 - DNA, 2856 bp, Homo sapiens
  source 1..2856: mol_type = genomic DNA
atgaagttcaaaaggaggcaccaagcatttccgtccttcttcaagatgaaggtaagccttcccagtgatccaagctgtgttgaagaaatcttgcgggaatcgcagcatctgaccccaggattcaccttacaaaagtggaatgacccaaccaccagagcttctacaaagtcagtgtctttcaaatcgatgcttgaggatgacctgaagctgagcagtgatgaagatgaccttgagcctgtgaagaccttgaccactcagtgcactgccactgagctctaccaggctgttgaaaaggcaaaacctaggaataatcctgtgaacccacccttggccactccccagcccccacctgcagtgcaagccagcgggggttctggcagctccagcgaatcggagagcagctctgagtcggattcagacactgaaagtagcaccactgacagcgaatctaatgaggcacctcgtgtggcaactccagagcctgagccaccctcaaccaacaagtggcaactggataaatggcttaacaaagtgacatcccagaacaagtcttttatttgtggccaaaatgaaacacccatggagactatttctctgcctcctccaatcatccaaccaatggaagtccagatgaaagtgaagacgaatgccagtcaggtcccagctgaacccaaagaaaggcctctcctcagtctcattagggagaaagcccgtccacggcccactcagaaaattccagaaacaaaggctttgaagcataagttgtcaacaactagtgagacagtgtctcaaaggacaattgggaaaaaacagcccaaaaaagttgagaagaacaccagcactgacgagtttacctggcccaaaccaaatattaccagcagcactcccaaagaaaaagaaagtgtggagcttcatgacccaccaagaggccgcaacaaagccactgcccacaaaccagcccctaggaaagaaccaagacctaacatccctttggctcccgagaagaagaagtacagagggcctggcaagattgtgccaaagtctcgggaattcattgaaacagattcatctacatctgactccaacacagatcaggaagagaccctgcaaatcaaagtcctgcctccgtgcattatttctggaggtaatactgccaaatccaaggaaatctgtggtgccagcctgaccctcagcaccttaatgagtagcagtggcagcaacaacaacttatccatcagtaatgaagagccaacattttcacctattcctgtcatgcaaactgaaatcctgtcccctctgcgagatcatgagaacctgaaaaacctctgggtgaagattgaccttgacttactctctagagtacctggccacagctcactccatgcagcacctgccaagccagaccacaaggagactgccacaaaacccaagcgtcagacagctgtcacagctgtggagaaaccagcccctaagggcaaacgtaagcacaagccaatagaagttgcagagaagatccctgagaagaagcagcgcctggaggaggccacaactatctgcttgctccctccttgcatctcaccagccccaccccacaagcctcccaacactagagaaaataattcatccaggagagcaaatagaagaaaggaagaaaaactatttcctcctccactttccccactgccagaggaccctccacgccgcagaaatgtcagtggcaataatggtccctttggtcaagacaaaaacatcgccatgactggacaaatcacatctaccaaacctaagagaactgaaggcaaattctgtgctactttcaaagggatatcggtaaatgagggagacactccaaaaaaggcatcctctgccaccatcactgtcaccaatactgctattgccactgctactgtcactgctactgccattgtcaccaccactgtcacagctactgccaccgccacggccaccaccacaactactaccactaccatttccaccatcacctctaccatcactactggcctcatggatagcagtcacctggagatgacgtcctgggcggctctgccccttctatccagcagcagcactaatgtccggagacccaagctcacttttgatgactcggttcacaatgctgattattacatgcaagaagctaagaagctgaagcacaaagctgatgcactgttcgagaaatttggcaaagctgtgaattatgctgatgccgccctctccttcactgaatgtggcaatgccatggaacgcgaccctctggaagcaaagtccccatacaccatgtactctgagactgtggagctcctcaggtatgcaatgaggctgaagaactttgcaagtcccttggcttcggatggggacaaaaagctagcagtactatgctaccgatgtttatcactcctctatttgagaatgtttaagctgaagaaggaccatgctatgaagtactccagatcactgatggaatattttaagcaaaatgcttcaaaagtcgcacagataccctctccatgggtaagcaatggaaagaacactccatccccagtgtctctcaacaacgtctcccccatcaacgcaatggggaactgtaacaatggcccagtcaccattccccagcgcattcaccacatggctgccagccacgtcaacatcactagcaatgtgttacggggctatgaacactgggatatggccgacaaactgacaagagaaaacaaagaattctttggtgatctggacacgctgatggggcctctgacccagcacagcagcatgaccaatcttgtccgctacgttcgccaaggactgtgttggctgcgcatcgatgcccacttgttg

SEQ ID NO: 4876 - DNA, 3654 bp, Homo sapiens
  source 1..3654: mol_type = genomic DNA
atggcatttacagaaagagtcaacagcagtggcaacagtttgtacaatgacgacagaaacctgcttcgaattagagagaaggaaagacgcaaccaggaagcccaccaagagaaagaggcatttcctgaaaagattcccctttttggagagccctacaagacagcaaaaggtgatgagctgtctagtcgaatacagaacatgttgggaaactacgaagaagtgaaggagttccttagtactaagtctcacactcatcgcctggatgcttctgaaaataggttgggaaagccgaaatatcctttaattcctgacaaagggagcagcattccatccagctccttccacactagtgtccaccaccagtccattcacactcctgcgtctggaccactttctgttggcaacattagccacaatccaaagatggcgcagccaagaactgaaccaatgccaagtctccatgccaaaagctgcggcccaccggacagccagcacctgacccaggatcgccttggtcaggaggggttcggctctagtcatcacaagaaaggtgaccgaagagctgacggagaccactgtgcttcggtgacagattcggctccagagagggagctttctcccttaatctctttgccttccccagttccccctttgtcacctatacattccaaccagcaaactcttccccggacgcaaggaagcagcaaggttcatggcagcagcaataacagtaaaggctattgcccagccaaatctcccaaggacctagcagtgaaagtccatgataaagagacccctcaagacagtttggtggcccctgcccagccgccttctcagacatttccacctccctccctcccctcaaaaagtgttgcaatgcagcagaagcccacggcttatgtccggcccatggatggtcaagatcaggcccctagtgaatcccctgaactgaaaccactgccggaggactatcgacagcagacctttgaaaaaacagacttgaaagtgcctgccaaagccaagctcaccaaactgaagatgccttctcagtcagttgagcagacctactccaatgaagtccattgtgttgaagagattctgaaggaaatgacccattcatggccgcctcctttgacagcaatacatacgcctagtacagctgagccatccaagtttcctttccctacaaaggactctcagcatgtcagttctgtaacccaaaaccaaaaacaatatgatacatcttcaaaaactcactcaaattctcagcaaggaacgtcatccatgctcgaagacgaccttcagctcagtgacagtgaggacagtgacagtgaacaaaccccagagaagcctccctcctcatctgcacctccaagtgctccacagtcccttccagaaccagtggcatcagcacattccagcagtgcagagtcagaaagcaccagtgactcagacagttcctcagactcagagagcgagagcagttcaagtgacagcgaagaaaatgagcccctagaaaccccagctccggagcctgagcctccaacaacaaacaaatggcagctggacaactggctgaccaaagtcagccagccagctgcgccaccagagggccccaggagcacagagcccccacggcggcacccagagagtaagggcagcagcgacagtgccacgagtcaggagcattctgaatccaaagatcctccccctaaaagctccagcaaagccccccgggccccacccgaagccccccaccccggaaagaggagctgtcagaagtctccggcacagcaggagcccccacaaaggcaaaccgttggaaccaaacaacccaaaaaacctgtcaaggcctctgcccgggcaggttcacggaccagcctgcagggggaaagggagccagggcttcttccctatggctcccgagaccagacttccaaagacaagcccaaggtgaagacgaaaggacggccccgggccgcagcaagcaacgaacccaagccagcagtgcccccctccagtgagaagaagaagcacaagagctccctccctgccccctctaaggctctctcaggcccagaacccgcgaaggacaatgtggaggacaggacccctgagcactttgctcttgttcccctgactgagagccagggcccaccccacagtggcagcggcagcaggactagtggctgccgccaagccgtggtggtccaggaggacagccgcaaagacagactcccattgcctttgagagacaccaagctgctctcaccgctcagggacactcctcccccacaaagcttgatggtgaagatcaccctagacctgctctctcggataccccagcctcccgggaaggggagccgccagaggaaagcagaagataaacagccgcccgcagggaagaagcacagctctgagaagaggagctcagacagctcaagcaagttggccaaaaagagaaagggtgaagcagaaagagactgtgataacaagaaaatcagactggagaaggaaatcaaatcacagtcatcttcatcttcatcctcccacaaagaatcttctaaaacaaagccctccaggccctcctcacagtcctcaaagaaggaaatgctccccccgccacccgtgtcctcgtcctcccagaagccagccaagcctgcacttaagaggtcaaggcgggaagcagacacctgtggccaggaccctcccaaaagtgccagcagtaccaagagcaaccacaaagactcttccattcccaagcagagaagagtagaggggaagggctccagaagctcctcggagcacaagggttcttccggagatactgcaaatccttttccagtgccttctttgccaaatggtaactctaaaccagggaagcctcaagtgaagtttgacaaacaacaagcagaccttcacatgagggaggcaaaaaagatgaagcagaaagcagagttaatgacggacagggttggaaaggcttttaagtacctggaagccgtcttgtccttcattgagtgcggaattgccacagagtctgaaagccagtcatccaagtcagcttactctgtctactcagaaactgtagatctcattaaattcataatgtcattaaaatccttctcagatgccacagcgccaacacaagagaaaatatttgctgttttatgcatgcgttgccagtccattttgaacatggcgatgtttcgttgtaaaaaagacatagcaataaagtattctcgtactcttaataaacacttcgagagttcttccaaagtcgcccaggcaccttctccatgcattgcaagaagcacaggcacaccatcccctctttccccaatgccttctcctgccagctccgtagggtcccagtcaagtgctggcagtgtggggagcagtggggtggctgccactatcagcaccccagtcaccatccagaatatgacatcttcctatgtcaccatcacatcccatgttcttaccgcctttgacctttgggaacaggccgaggccctcacgaggaagaataaagaattctttgctcggctcagcacaaatgtgtgcaccttggccctcaacagcagtttggtggacctggtgcactatacacgacagggttttcagcagctacaagaattaaccaaaacacct

SEQ ID NO: 4877 - DNA, 3630 bp, Homo sapiens
  source 1..3630: mol_type = genomic DNA
atggcagcccagtcaagtttgtacaatgacgacagaaacctgcttcgaattagagagaaggaaagacgcaaccaggaagcccaccaagagaaagaggcatttcctgaaaagattcccctttttggagagccctacaagacagcaaaaggtgatgagctgtctagtcgaatacagaacatgttgggaaactacgaagaagtgaaggagttccttagtactaagtctcacactcatcgcctggatgcttctgaaaataggttgggaaagccgaaatatcctttaattcctgacaaagggagcagcattccatccagctccttccacactagtgtccaccaccagtccattcacactcctgcgtctggaccactttctgttggcaacattagccacaatccaaagatggcgcagccaagaactgaaccaatgccaagtctccatgccaaaagctgcggcccaccggacagccagcacctgacccaggatcgccttggtcaggaggggttcggctctagtcatcacaagaaaggtgaccgaagagctgacggagaccactgtgcttcggtgacagattcggctccagagagggagctttctcccttaatctctttgccttccccagttccccctttgtcacctatacattccaaccagcaaactcttccccggacgcaaggaagcagcaaggttcatggcagcagcaataacagtaaaggctattgcccagccaaatctcccaaggacctagcagtgaaagtccatgataaagagacccctcaagacagtttggtggcccctgcccagccgccttctcagacatttccacctccctccctcccctcaaaaagtgttgcaatgcagcagaagcccacggcttatgtccggcccatggatggtcaagatcaggcccctagtgaatcccctgaactgaaaccactgccggaggactatcgacagcagacctttgaaaaaacagacttgaaagtgcctgccaaagccaagctcaccaaactgaagatgccttctcagtcagttgagcagacctactccaatgaagtccattgtgttgaagagattctgaaggaaatgacccattcatggccgcctcctttgacagcaatacatacgcctagtacagctgagccatccaagtttcctttccctacaaaggactctcagcatgtcagttctgtaacccaaaaccaaaaacaatatgatacatcttcaaaaactcactcaaattctcagcaaggaacgtcatccatgctcgaagacgaccttcagctcagtgacagtgaggacagtgacagtgaacaaaccccagagaagcctccctcctcatctgcacctccaagtgctccacagtcccttccagaaccagtggcatcagcacattccagcagtgcagagtcagaaagcaccagtgactcagacagttcctcagactcagagagcgagagcagttcaagtgacagcgaagaaaatgagcccctagaaaccccagctccggagcctgagcctccaacaacaaacaaatggcagctggacaactggctgaccaaagtcagccagccagctgcgccaccagagggccccaggagcacagagcccccacggcggcacccagagagtaagggcagcagcgacagtgccacgagtcaggagcattctgaatccaaagatcctccccctaaaagctccagcaaagccccccgggccccacccgaagccccccaccccggaaagaggagctgtcagaagtctccggcacagcaggagcccccacaaaggcaaaccgttggaaccaaacaacccaaaaaacctgtcaaggcctctgcccgggcaggttcacggaccagcctgcagggggaaagggagccagggcttcttccctatggctcccgagaccagacttccaaagacaagcccaaggtgaagacgaaaggacggccccgggccgcagcaagcaacgaacccaagccagcagtgcccccctccagtgagaagaagaagcacaagagctccctccctgccccctctaaggctctctcaggcccagaacccgcgaaggacaatgtggaggacaggacccctgagcactttgctcttgttcccctgactgagagccagggcccaccccacagtggcagcggcagcaggactagtggctgccgccaagccgtggtggtccaggaggacagccgcaaagacagactcccattgcctttgagagacaccaagctgctctcaccgctcagggacactcctcccccacaaagcttgatggtgaagatcaccctagacctgctctctcggataccccagcctcccgggaaggggagccgccagaggaaagcagaagataaacagccgcccgcagggaagaagcacagctctgagaagaggagctcagacagctcaagcaagttggccaaaaagagaaagggtgaagcagaaagagactgtgataacaagaaaatcagactggagaaggaaatcaaatcacagtcatcttcatcttcatcctcccacaaagaatcttctaaaacaaagccctccaggccctcctcacagtcctcaaagaaggaaatgctccccccgccacccgtgtcctcgtcctcccagaagccagccaagcctgcacttaagaggtcaaggcgggaagcagacacctgtggccaggaccctcccaaaagtgccagcagtaccaagagcaaccacaaagactcttccattcccaagcagagaagagtagaggggaagggctccagaagctcctcggagcacaagggttcttccggagatactgcaaatccttttccagtgccttctttgccaaatggtaactctaaaccagggaagcctcaagtgaagtttgacaaacaacaagcagaccttcacatgagggaggcaaaaaagatgaagcagaaagcagagttaatgacggacagggttggaaaggcttttaagtacctggaagccgtcttgtccttcattgagtgcggaattgccacagagtctgaaagccagtcatccaagtcagcttactctgtctactcagaaactgtagatctcattaaattcataatgtcattaaaatccttctcagatgccacagcgccaacacaagagaaaatatttgctgttttatgcatgcgttgccagtccattttgaacatggcgatgtttcgttgtaaaaaagacatagcaataaagtattctcgtactcttaataaacacttcgagagttcttccaaagtcgcccaggcaccttctccatgcattgcaagcacaggcacaccatcccctctttccccaatgccttctcctgccagctccgtagggtcccagtcaagtgctggcagtgtggggagcagtggggtggctgccactatcagcaccccagtcaccatccagaatatgacatcttcctatgtcaccatcacatcccatgttcttaccgcctttgacctttgggaacaggccgaggccctcacgaggaagaataaagaattctttgctcggctcagcacaaatgtgtgcaccttggccctcaacagcagtttggtggacctggtgcactatacacgacagggttttcagcagctacaagaattaaccaaaacacct

SEQ ID NO: 4878 - DNA, 1650 bp, Homo sapiens
  source 1..1650: mol_type = genomic DNA
atggtgcgaggctgggagccgccgcccgggctggactgcgctatctctgaagggcacaaatcagaaggcaccatgcctcctaataaagaggccagcggtctcagtagttcaccagcggggctcatctgcctccctccaatctctgaggagctacagcttgtgtggacgcaagcagcccagaccagtgagctagacagcaatgaacacctgctcaaaaccttcagctactttccctatcccagcctagcagacattgcccttctctgcctacgttatgggttgcagatggagaaagtcaagacttggtttatggcccagcgcctccgctgtggtattagctggtcatctgaagaaatagaagagactcgagcccgagtagtctaccgtcgggaccaactccatttcaaatcccttctctcttttactcatcatgcgggacggcccccagaggaggtgcctcctcctccagtgccagctccagagcaagttggtattggaataggtcctccaactcttagcaagcctacccagacgaaaggattgaaggtagagcctgaggagccctctcagatgccaccactgccacagagtcaccagaaattaaaggagtccctgatgacacctggcagtggagcattcccctaccaatcagatttttggcaacatcttcaaagcagtggcctctcaaaggagcaggcaggcaggggtcccaaccagtcacatggcataggtactgcttcctggaaccactccacaaccgtcccccagccacaagctcgggataaacccccaccaattgcattaattgccagtagttgtaaggaggagtcagcatctagtgttactccctcttcttcctctacctcttcttctttccaggtactggctaatggagctactgccgcctctaaacccctccagccactaggctgtgtcccacagtcagtgtcacccagtgaacaggcattacccccacatctggaaccagcctggccccaagggctacggcataactcagtaccaggtagagttggccccacagagtacctttccccagatatgcaacgccagcgaaagaccaagcgcaaaaccaaagagcagctggctatccttaaatccttttttttacagtgccagtgggcacggcgtgaggattaccaaaagttagaacagatcactggtttacctcggcctgagatcattcagtggtttggtgacacacgctatgccttgaagcatgggcaactaaagtggtttcgggacaacgcagtacctggtgcccctagtttccaagacccagcaattcctacaccaccaccatcaacccgctccttgaacgaaagggctgagacaccacctctgccgatccctccacccccaccggatatacaacccttggagaggtactgggcagcccaccaacagctacgggaaactgatatccctcaattgagtcaggcatcaaggcttagcacccagcaggtgctggattggtttgactctcgattacctcagccagctgaggtggtagtttgtctagatgaagaagaggaagaggaggaggaagaactgccagaagatgatgaggaagaggaggaggaggaggaggaagatgatgatgatgatgatgatgatgtgatcatacaagac

SEQ ID NO: 4879 - DNA, 1728 bp, Homo sapiens
  source 1..1728: mol_type = genomic DNA
atggacgacttgaaatatggagtgtatcctctcaaggaagcaagtggatgccctggggctgagaggaatcttctagtttactcttattttgaaaaggagacattgacatttagggatgtggccatagaattctctctggaggagtgggaatgcctgaaccctgctcagcagaatttatatatgaatgtgatgttagaaaactacaaaaacctggtcttcttgggtgttgctgtctctaagcaagacccagtcacctgtctggagcaagaaaaagagccctggaatatgaagagacatgagatggtggatgaacccccagctatgtgttcttattttaccaaagacctttggccagagcaagacataaaagattcttttcaacaagtaatactgagaagatatggcaaatgtgaacatgagaatttacagttaagaaaaggctccgcaagtgtagatgagtataaggtgcacaaagaaggttataatgagctaaaccagtgtttgacaactacccagagcaaaatatttccatgtgataaatatgtgaaagtctttcataaatttttaaatgcaaatagacataagacaagacatactggaaagaaacctttcaaatgtaaaaaatgtggcaaatcattttgcatgcttttacacctaagtcaacataaaagaattcatattagagagaattcttaccaatgtgaagaatgtggcaaagcttttaaatggttctcaacccttactagacacaagagaattcatactggagagaaacccttcaaatgtgaagaatgtggcaaagcttttaagcagtcctcaacccttactacacataagataattcatactggggagaaaccatatagatgtgaagaatgtggcaaagccttcaaccggtcctcacaccttactacacataagataattcatactggagagaagccctacaaatgtgaagaatgtggcaaagcttttaaccagtcttcaacccttagtacacataagttcattcatgctggagagaaaccctacaaatgtgaggaatgtgacaaagcttttaatcgattctcataccttactaaacataagataattcatactggagaaaaatcttacaaatgtgaagaatgtggcaaaggctttaattggtcctcaacccttactaaacataaaagaattcatactggagagaaaccctacaaatgtgaagtgtgtggcaaagcctttaatgagtcctcaaaccttactacacataagatgattcatactggagagaaaccctacaaatgtgaagaatgtggcaaagcttttaaccggtccccacaacttactgcacataagataattcatactggagagaaaccttacaaatgtgaagaatgtggcaaagcttttagccagtcatcaatccttactacacataagagaattcacactggagagaaaccctacaaatgtgaagaatgtggcaaagcttttaaccgatcctcaaatcttactaaacataagataattcatacaggagagaaatcttacaaatgtgaagaatgtggtaaagcctttaaccaatcctcaactcttactaaacataggaaaattcatactagacagaaaccctacaactgtgaagaatgtgacaatacatttaaccagtcctcaaaccttattaaacaaaataattcatactggagagaaactctacaaatgtcaagaatgtgggaaagcctt

SEQ ID NO: 4880 - DNA, 582 bp, Homo sapiens
  source 1..582: mol_type = genomic DNA
atgggaaaaaggacttccctagaagtgagtcttggggagttggggggagaaaagtgtcgaggagggcgtcggagtttcccaccgctggctgcttcccggcccgcacgcccgggagggtggcggtgggcgcgcagagatctttgcaaaacagcgtccagggcggaaaacaactcacaggcctgccgcccccaaaggcgggcaggtccggacgcgctgggccctggtcccttcggccgcaaacggcgcaagtcacgcactgcgttcaccgcgcaacaggtgctggagctggagcggcgcttcgtcttccagaagtacctggcgccgtccgagcgagacgggctagctacgcgactcggcctggccaacgcgcaggtggtcacttggttccagaaccggcgagccaagctcaagcgcgatgtggaggagatgcgcgccgacgtcgcctcgctacgcgcgttgtccccggaagtcctgtgcagcttagcactgcccgaaggcgctccagatcccggcctctgcctcggccctgccggccctgactcccggccccacctgtcagacgaggagatacaggtggacgat

SEQ ID NO: 4881 - DNA, 594 bp, Homo sapiens
  source 1..594: mol_type = genomic DNA
atgaactcgggacgcgagccccgaacaccccggacactcttaagcatcgcagacatcctagccccgcgcatggtcccccgagcaccctctgcgccgcagcttccagagtcgggtccgggtccaacgtcgccgctgtgcgcgctggaggagctgactagtaaaactttccgcggacttgacgcgcgcgctctgcagccctctgaagggcgggcaggtccggacgcgctgggccctggtcccttcggccgcaaacggcgcaagtcacgcactgcgttcaccgcgcaacaggtgctggagctggagcggcgcttcgtcttccagaagtacctggcgccgtccgagcgagacgggctagctacgcgactcggcctggccaacgcgcaggtggtcacttggttccagaaccggcgagccaagctcaagcgcgatgtggaggagatgcgcgccgacgtcgcctcgctacgcgcgttgtccccggaagtcctgtgcagcttagcactgcccgaaggcgctccagatcccggcctctgcctcggccctgccggccctgactcccggccccacctgtcagacgaggagatacaggtggacgat

SEQ ID NO: 4882 - DNA, 843 bp, Homo sapiens
  source 1..843: mol_type = genomic DNA
atgacttccaaggaggacggcaaggcggcgccgggggaggagcggcggcgcagcccgctggaccacctgcctccgcctgccaactccaacaagccactgacgccgttcagcatcgaggacatcctcaacaagccgtctgtgcggagaagttactcgctgtgcggggcggcgcacctgctggccgccgcggacaagcacgcgcagggcggcttgcccctggcgggccgcgcgctgctctcgcagacctcgccgctgtgcgcgctggaggagctcgccagcaagacgtttaaggggctggaggtcagcgttctgcaggcagccgaaggccgcgacggtatgaccatctttgggcagcggcagacccctaagaagcggcgaaagtcgcgcacggccttcaccaaccaccagatctatgaattggaaaagcgctttctataccagaagtacctgtcccccgccgatcgcgaccaaatcgcgcagcagctgggcctcaccaacgcgcaagtcatcacctggttccagaatcggcgcgctaagctcaagcgggacctggaggagatgaaggccgacgtagagtccgccaagaaactgggccccagcgggcagatggacatcgtggcgctggccgaactcgagcagaactcggaggccacagccggcggtggcggcggctgcggcagggccaagtcgaggcccggctctccggtcctccccccaggcgccccgaaggccccgggcgctggcgccctgcagctctcgcctgcctctccgctcacggaccagccggccagcagccaggactgctcggaggacgaggaagacgaagagatcgacgtggacgat

SEQ ID NO: 4883 - DNA, 2121 bp, Homo sapiens
  source 1..2121: mol_type = genomic DNA
atgtctcgggatcggttccggagtcgtggcggtggcggtggtggcttccacaggcgtggaggaggcggcggccgcggcggcctccacgacttccgttctccgccgcccggcatgggcctcaatcagaatcgcggccccatgggtcctggcccgggccagagcggccctaagcctccgatcccgccaccgcctccacaccaacagcagcaacagccaccaccgcagcagccaccgccgcagcagccgccaccgcatcagccgccgccgcatccacagccgcatcagcagcagcagccgccgccaccgccgcaggactcttccaagcccgtcgttgctcagggacccggccccgctcccggagtaggcagcgcaccaccagcctccagctcggccccgcccgccactccaccaacctcgggggccccgccagggtccgggccaggcccgactccgaccccgccgcctgcagtcacctcggcccctcccggggcgccgccacccaccccgccaagcagcggggtccctaccacacctcctcaggccggaggcccgccgcctccgcccgcggcagtcccgggcccgggtccagggcctaagcagggcccaggtccgggtggtcccaaaggcggcaaaatgcctggcgggccgaagccaggtggcggcccgggcctaagtacgcctggcggccaccccaagccgccgcatcgaggcggcggggagccccgcgggggccgccagcaccacccgccctaccaccagcagcatcaccaggggcccccgcccggcgggcccggcggccgcagcgaggagaagatctcggactcggaggggtttaaagccaatttgtctctcttgaggaggcctggagagaaaacttacacacagcgatgtcggttgtttgttgggaatctacctgctgatatcacggaggatgaattcaaaagactatttgctaaatatggagaaccaggagaagtttttatcaacaaaggcaaaggattcggatttattaagcttgaatctagagctttggctgaaattgccaaagccgaactggatgatacacccatgagaggtagacagcttcgagttcgctttgccacacatgctgctgccctttctgttcgtaatctttcaccttatgtttccaatgaactgttggaagaagcctttagccaatttggtcctattgaaagggctgttgtaatagtggatgatcgtggaagatctacagggaaaggcattgttgaatttgcttctaagccagcagcaagaaaggcatttgaacgatgcagtgaaggtgttttcttactgacgacaactcctcgtccagtcattgtggaaccacttgaacaactagatgatgaagatggtcttcctgaaaaacttgcccagaagaatccaatgtatcaaaaggagagagaaacccctcctcgttttgcccagcatggcacgtttgagtacgaatattctcagcgatggaagtctttggatgaaatggaaaaacagcaaagggaacaagttgaaaaaaacatgaaagatgcaaaagacaaattggaaagtgaaatggaagatgcctatcatgaacatcaggcaaatcttttgcgccaagatctgatgagacgacaggaagaattaagacgcatggaagaacttcacaatcaagaaatgcagaaacgtaaagaaatgcaattgaggcaagaggaggaacgacgtagaagagaggaagagatgatgattcgtcaacgtgagatggaagaacaaatgaggcgccaaagagaggaaagttacagccgaatgggctacatggatccacgggaaagagacatgcgaatgggtggcggaggagcaatgaacatgggagatccctatggttcaggaggccagaaatttccacctctaggaggtggtggtggcataggttatgaagctaatcctggcgttccaccagcaaccatgagtggttccatgatgggaagtgacatgcgtactgagcgctttgggcagggaggtgcggggcctgtgggtggacagggtcctagaggaatggggcctggaactccagcaggatatggtagagggagagaagagtacgaaggcccaaacaaaaaaccccgattt

SEQ ID NO: 4884 - DNA, 3036 bp, Homo sapiens
  source 1..3036: mol_type = genomic DNA
atgacaaagcatccacctaacagacgaggaatcagctttgaagtgggagcccagttggaagcccgggaccgtttaaaaaactggtatccagctcacatagaagacattgactacgaggaaggaaaagtactcatccatttcaagcgttggaaccatcgttatgatgagtggttctgctgggacagtccttatttacgccctttagagaaaatacagctgaggaaagagggcttgcatgaagaggatggatcttctgaatttcaaataaatgagcaggtccttgcttgctggtctgattgtcgtttttacccggccaaagtcactgctgttaacaaggatggtacttacactgtgaaattttatgatggagtagttcagactgtcaaacatattcatgtcaaagctttttccaaagatcagaatattgtgggtaatgctaggcctaaagaaacagatcacaaaagtctttcatcatctcctgataaacgagagaagtttaaagaacagagaaaagcaacagtgaatgtgaagaaagacaaagaagataaacccttaaagacagaaaagcgacccaagcagcctgataaagaaggaaagttaatctgttctgaaaaggggaaagtgtcagagaaaagtcttcccaagaacgagaaggaagacaaggaaaacatttccgaaaatgacagagagtattctggagatgcccaagtggataagaaacctgaaaatgacattgtgaagagtccacaagaaaacttgagggaacccaaaagaaaacgaggcagacccccttccatagctcctactgctgtggattcaaactctcaaactttgcaaccaataacattggaactgagaagaaggaaaatatcaaaaggatgtgaagtcccattaaaacgtcctcggcttgacaaaaattcatcccaggaaaagtcaaaaaactactcggaaaacactgacaaagacttatcgaggagacgttcctccaggctgtccactaatgggacccatgagatcctagatcctgacttggttgtatcagatttggttgatacggatcctttgcaagacacgttgtctagtaccaaggaatctgaagaaggtcagttgaagtctgctttggaagctggccaggtctcatctgcactgacttgccactcctttggggatggatccggggctgcaggcttggagttgaactgcccatcaatgggagaaaacacgatgaaaacagaaccgacttctccccttgtggaattacaagagatttcgactgtggaagtaacaaatacttttaagaaaacagatgattttgggtcatctaatgcaccagctgtcgacctagaccataagtttagatgcaaagttgtggactgtttaaaatttttccgcaaagccaaactgttgcactatcacatgaagtatttccatggaatggagaagtcactggagccagaagagagcccgggaaagaggcatgtccaaaccaggggcccttcagcttcagacaagcccagccaggagaccctgaccaggaagcgggtctctgccagttccccaactacaaaagacaaggaaaagaataaagagaagaaattcaaggagtttgtgagagtgaagccaaagaagaaaaagaaaaagaaaaagaaaaccaaacctgaatgcccctgcagtgaggagatcagtgacacctcccaggaaccttctccacccaaggcatttgctgttaccaggtgtgggtcctcacacaagccaggggtccatatgagcccgcagcttcatggcccagaatctggacaccacaaagggaaagtgaaagcattggaggaggataatttgagtgagtcctcttctgagagctttctctggagtgatgatgagtatggccaagatgtggatgtgaccaccaacccagatgaggaacttgatggggatgaccgctatgacttcgaggtggtccgctgcatctgtgaggtccaggaggaaaatgacttcatgattcagtgtgaagagtgccagtgctggcagcatggggtctgcatgggattactggaagaaaatgtgcccgagaaatacacctgttatgtttgccaagaccctccaggtcagaggcctggcttcaagtactggtatgacaaggagtggctgagcaggggacatatgcatggcctggcatttctagaagagaactactcccatcagaatgccaagaagatcgtggccacccaccagcttcttggtgatgtgcagagagtgattgaggttctgcatggcctgcagctcaagatgagcatcttgcaaagccgggagcatcctgatctgccgctgtggtgccagccttggaaacagcactcaggggaggggagatctcatttcagaaacatccctgtcactgacaccaggagcaaggaggaagctccaagctatagaactttgaacggggcagtggagaagcccaggcccctggccctgcccctgccgcgttctgtggaggaatcctatatcaccagtgagcattgctaccagaagccccgcgcctattaccctgccgtggagcagaagctggtggtggagacgaggggctctgccctcgacgatgcggtcaaccccctccatgagaacggcgatgattccctttccccgcgcctgggctggcctctagaccaagacaggagcaagggggacagtgaccccaaacccggctccccaaaggtgaaggaatatgtctccaaaaaggccctaccagaagaagcccctgctcggaagctgctggacagaggtggagaggggctgctgagctcccagcaccagtggcagtttaacctgctgacccatgtggaatctcttcaggatgaagttacgcacaggatggactccattgagaaggagttggatgtgttggagagctggctggactacactggggaactggagccccctgagccgctggccaggcttccgcagctcaagcattgtatcaagcagctgctgatggacctgggcaaggtgcagcagatcgccctctgctgctcaaca

SEQ ID NO: 4885 - DNA, 1416 bp, Homo sapiens
  source 1..1416: mol_type = genomic DNA
atgatgcaacatgcctccccagcccccgctctgacgatgatggccacgcagaatgtcccgcccccaccctaccaggacagcccacagatgacggcaaccgcccagccaccctccaaggcccaggctgtccacatctctgccccctcagctgctgccagcacacctgtgcccagtgcccccatcgacccccaggcccagctggaggctgacaagcgagctgtatacaggcaccctcttttcccgctcctgacgctgctgtttgagaaatgtgaacaggccacccagggctctgagtgcatcacctccgccagctttgatgtggacatcgagaactttgtccaccagcaggaacaggagcacaaacccttcttcagcgatgacccagaactggacaatctgatggtgaaggcaatccaggtcctgagaatccacctgctggagctggagaaagtcaatgaactctgcaaggacttttgtaaccgttacatcacctgcctcaaaaccaagatgcacagcgacaacctgctcaggaatgatctaggggggccctactcccccaaccagccctccatcaaccttcactcacaggacctcctgcagaattcccccaattccatgtccggagtctccaataacccccaggggattgtggtcccagcctcagcgctccagcagggcaacatcgccatgacaaccgtcaactcacaagttgtgtcaggtggagccttataccaaccggttaccatggtaacctcccagggtcaggtggtcacccaagcaatcccccagggagccatccagatccagaacacacaggttaaccttgacctcacctccctcctggacaatgaggataagaagtccaagaacaaacgaggagtcttgcccaagcatgccaccaatataatgcgttcttggctcttccagcatctcatgcacccctaccccacggaggatgagaagaggcagatcgcagcccagaccaacctcaccctcctgcaagtaaacaactggttcatcaatgcccggaggcgcatcctgcagcccatgcttgatgccagcaacccagatcctgcccccaaagccaagaagatcaagtctcagcaccggcccacccaaagattctggcccaactccatcgctgcgggggtgctgcagcagcagggcggtgccccagggacaaaccccgatggttccatcaacttggacaacctgcagtccctgtcctcagacagtgccaccatggccatgcagcaggctatgatggctgcacacgatgactcattggatgggacagaagaagaggatgaggatgagatggaagaggaggaggaggaggagctggaggaggaggtcgacgagctgcagacgacaaatgtcagcgacctgggcttggaacacagtgactccctggag

SEQ ID NO: 4886 - DNA, 1773 bp, Homo sapiens
  source 1..1773: mol_type = genomic DNA
atgtgtaacgggaggaagactgttctagcagatccagagccagagctctacctcgatcctttctgccctccgggtttctccagtcagaaattccccatgcagcatgtgctgtgtaatcatcccccctggatcttcacatgcttgtgtgcagaaggtaacatccagcctggggatccgggcccaggggaccaggagaagcagcaacaagcctctgaggggagaccctggagtgatcaagcagaaggtcctgagggagaaggtgccatgcctttgtttggaagaaccaagaaaaggactctgggagcgttctccaggccaccccagaggcagccagtcagctctcggaacggcctcagaggggtggagttagaagccagcccagctcagtcagggaaccctgaggaaacagacaaattgttgaagaggatagaagtcttaggatttggaacagtcaactgtggagagtgtggactgagcttcagcaagatgacaaacctgctcagtcaccagcggatacactcaggggagaagccctacgtgtgtggggtatgtgagaagggcttcagcctaaagaagagcctcgccagacaccagaaggcacactcgggggagaagccaattgtgtgcagggagtgtggacgaggctttaaccggaagtcaacgctaatcatacacgaacggacacactccggtgagaaaccttacatgtgcagtgagtgtgggcgaggcttcagccagaagtcaaacctcatcatacaccagaggacacactcaggggaaaagccttacgtgtgccgggaatgtggcaaaggcttcagccagaagtcagctgtcgtgagacaccagaggacacacttggaggagaagaccatcgtgtgcagtgactgtggcctgggcttcagcgacaggtcaaacctcatctcccaccagaggacgcactctggggagaagccctacgcctgcaaggagtgtgggcgatgcttcaggcagaggaccacccttgtcaaccaccagaggacacactcaaaggagaagccctatgtgtgcggggtgtgtgggcacagcttcagccagaattcaaccctcatctctcacaggcggacacacactggggagaagccgtatgtttgtggggtgtgtgggcgaggctttagtctcaagtcacacctcaacagacaccagaacatacactcaggagagaagcccattgtgtgcaaggactgtggccggggcttcagccagcaatccaacctcatcagacaccagaggacgcactcaggcgagaagcccatggtgtgtggggagtgcgggcgaggcttcagccagaagtcaaaccttgttgcacaccagaggacgcactcaggggagaggccgtatgtgtgccgagagtgcgggcgaggctttagccaccaggccggtctcatcaggcacaagcggaagcactcgagggagaagccctacatgtgcaggcagtgtggactgggctttggcaataagtcagctctaattacacacaagcgggctcactcggaagagaagccttgtgtgtgcagagagtgtggccaaggctttctccaaaagtcacacctcaccttacatcaaatgacacatacgggggagaagccatatgtgtgcaagacgtgtgggcggggcttcagcctcaagtctcacctcagcagacacaggaagaccacgtctgtccaccacagactgccagtgcagcccgaccctgagccgtgtgcagggcaaccttcggattccttatactctctc

SEQ ID NO: 4887 - DNA, 1962 bp, Homo sapiens
  source 1..1962: mol_type = genomic DNA
atggcattcagggatgtggctgtggatttcacccaggatgagtggaggctgctgagccctgctcaaaggactctgtacagagaggtgatgctggagaactacagcaacctggtctcactgggaatttcattttctaaaccagaactcatcacccagctggagcaagggaaagagacctggagagaggaaaaaaaatgttcaccggcaacctgtccagcagatccagagccagagctctacctcgatcctttctgccctccgggtttctccagtcagaaattccccatgcagcatgtgctgtgtaatcatcccccctggatcttcacatgcttgtgtgcagaaggtaacatccagcctggggatccgggcccaggggaccaggagaagcagcaacaagcctctgaggggagaccctggagtgatcaagcagaaggtcctgagggagaaggtgccatgcctttgtttggaagaaccaagaaaaggactctgggagcgttctccaggccaccccagaggcagccagtcagctctcggaacggcctcagaggggtggagttagaagccagcccagctcagtcagggaaccctgaggaaacagacaaattgttgaagaggatagaagtcttaggatttggaacagtcaactgtggagagtgtggactgagcttcagcaagatgacaaacctgctcagtcaccagcggatacactcaggggagaagccctacgtgtgtggggtatgtgagaagggcttcagcctaaagaagagcctcgccagacaccagaaggcacactcgggggagaagccaattgtgtgcagggagtgtggacgaggctttaaccggaagtcaacgctaatcatacacgaacggacacactccggtgagaaaccttacatgtgcagtgagtgtgggcgaggcttcagccagaagtcaaacctcatcatacaccagaggacacactcaggggaaaagccttacgtgtgccgggaatgtggcaaaggcttcagccagaagtcagctgtcgtgagacaccagaggacacacttggaggagaagaccatcgtgtgcagtgactgtggcctgggcttcagcgacaggtcaaacctcatctcccaccagaggacgcactctggggagaagccctacgcctgcaaggagtgtgggcgatgcttcaggcagaggaccacccttgtcaaccaccagaggacacactcaaaggagaagccctatgtgtgcggggtgtgtgggcacagcttcagccagaattcaaccctcatctctcacaggcggacacacactggggagaagccgtatgtttgtggggtgtgtgggcgaggctttagtctcaagtcacacctcaacagacaccagaacatacactcaggagagaagcccattgtgtgcaaggactgtggccggggcttcagccagcaatccaacctcatcagacaccagaggacgcactcaggcgagaagcccatggtgtgtggggagtgcgggcgaggcttcagccagaagtcaaaccttgttgcacaccagaggacgcactcaggggagaggccgtatgtgtgccgagagtgcgggcgaggctttagccaccaggccggtctcatcaggcacaagcggaagcactcgagggagaagccctacatgtgcaggcagtgtggactgggctttggcaataagtcagctctaattacacacaagcgggctcactcggaagagaagccttgtgtgtgcagagagtgtggccaaggctttctccaaaagtcacacctcaccttacatcaaatgacacatacgggggagaagccatatgtgtgcaagacgtgtgggcggggcttcagcctcaagtctcacctcagcagacacaggaagaccacgtctgtccaccacagactgccagtgcagcccgaccctgagccgtgtgcagggcaaccttcggattccttatactctctc

SEQ ID NO: 4888 - DNA, 1905 bp, Homo sapiens
  source 1..1905: mol_type = genomic DNA
atgggagctgccggccttcagggcgcgcctggtggcgccgagcatcctgggaggtgtggtccgggcgctgtgccgaggattcggggtagtgtagtcctggcgccccgctggaggagctccccagctggtggctggagcgaccccttgttctttggtggcgctgatccagagccagagctctacctcgatcctttctgccctccgggtttctccagtcagaaattccccatgcagcatgtgctgtgtaatcatcccccctggatcttcacatgcttgtgtgcagaaggtaacatccagcctggggatccgggcccaggggaccaggagaagcagcaacaagcctctgaggggagaccctggagtgatcaagcagaaggtcctgagggagaaggtgccatgcctttgtttggaagaaccaagaaaaggactctgggagcgttctccaggccaccccagaggcagccagtcagctctcggaacggcctcagaggggtggagttagaagccagcccagctcagtcagggaaccctgaggaaacagacaaattgttgaagaggatagaagtcttaggatttggaacagtcaactgtggagagtgtggactgagcttcagcaagatgacaaacctgctcagtcaccagcggatacactcaggggagaagccctacgtgtgtggggtatgtgagaagggcttcagcctaaagaagagcctcgccagacaccagaaggcacactcgggggagaagccaattgtgtgcagggagtgtggacgaggctttaaccggaagtcaacgctaatcatacacgaacggacacactccggtgagaaaccttacatgtgcagtgagtgtgggcgaggcttcagccagaagtcaaacctcatcatacaccagaggacacactcaggggaaaagccttacgtgtgccgggaatgtggcaaaggcttcagccagaagtcagctgtcgtgagacaccagaggacacacttggaggagaagaccatcgtgtgcagtgactgtggcctgggcttcagcgacaggtcaaacctcatctcccaccagaggacgcactctggggagaagccctacgcctgcaaggagtgtgggcgatgcttcaggcagaggaccacccttgtcaaccaccagaggacacactcaaaggagaagccctatgtgtgcggggtgtgtgggcacagcttcagccagaattcaaccctcatctctcacaggcggacacacactggggagaagccgtatgtttgtggggtgtgtgggcgaggctttagtctcaagtcacacctcaacagacaccagaacatacactcaggagagaagcccattgtgtgcaaggactgtggccggggcttcagccagcaatccaacctcatcagacaccagaggacgcactcaggcgagaagcccatggtgtgtggggagtgcgggcgaggcttcagccagaagtcaaaccttgttgcacaccagaggacgcactcaggggagaggccgtatgtgtgccgagagtgcgggcgaggctttagccaccaggccggtctcatcaggcacaagcggaagcactcgagggagaagccctacatgtgcaggcagtgtggactgggctttggcaataagtcagctctaattacacacaagcgggctcactcggaagagaagccttgtgtgtgcagagagtgtggccaaggctttctccaaaagtcacacctcaccttacatcaaatgacacatacgggggagaagccatatgtgtgcaagacgtgtgggcggggcttcagcctcaagtctcacctcagcagacacaggaagaccacgtctgtccaccacagactgccagtgcagcccgaccctgagccgtgtgcagggcaaccttcggattccttatactctctc

SEQ ID NO: 4889 - DNA, 1971 bp, Homo sapiens
  source 1..1971: mol_type = genomic DNA
atggcacacatggcattcagggatgtggctgtggatttcacccaggatgagtggaggctgctgagccctgctcaaaggactctgtacagagaggtgatgctggagaactacagcaacctggtctcactgggaatttcattttctaaaccagaactcatcacccagctggagcaagggaaagagacctggagagaggaaaaaaaatgttcaccggcaacctgtccagcagatccagagccagagctctacctcgatcctttctgccctccgggtttctccagtcagaaattccccatgcagcatgtgctgtgtaatcatcccccctggatcttcacatgcttgtgtgcagaaggtaacatccagcctggggatccgggcccaggggaccaggagaagcagcaacaagcctctgaggggagaccctggagtgatcaagcagaaggtcctgagggagaaggtgccatgcctttgtttggaagaaccaagaaaaggactctgggagcgttctccaggccaccccagaggcagccagtcagctctcggaacggcctcagaggggtggagttagaagccagcccagctcagtcagggaaccctgaggaaacagacaaattgttgaagaggatagaagtcttaggatttggaacagtcaactgtggagagtgtggactgagcttcagcaagatgacaaacctgctcagtcaccagcggatacactcaggggagaagccctacgtgtgtggggtatgtgagaagggcttcagcctaaagaagagcctcgccagacaccagaaggcacactcgggggagaagccaattgtgtgcagggagtgtggacgaggctttaaccggaagtcaacgctaatcatacacgaacggacacactccggtgagaaaccttacatgtgcagtgagtgtgggcgaggcttcagccagaagtcaaacctcatcatacaccagaggacacactcaggggaaaagccttacgtgtgccgggaatgtggcaaaggcttcagccagaagtcagctgtcgtgagacaccagaggacacacttggaggagaagaccatcgtgtgcagtgactgtggcctgggcttcagcgacaggtcaaacctcatctcccaccagaggacgcactctggggagaagccctacgcctgcaaggagtgtgggcgatgcttcaggcagaggaccacccttgtcaaccaccagaggacacactcaaaggagaagccctatgtgtgcggggtgtgtgggcacagcttcagccagaattcaaccctcatctctcacaggcggacacacactggggagaagccgtatgtttgtggggtgtgtgggcgaggctttagtctcaagtcacacctcaacagacaccagaacatacactcaggagagaagcccattgtgtgcaaggactgtggccggggcttcagccagcaatccaacctcatcagacaccagaggacgcactcaggcgagaagcccatggtgtgtggggagtgcgggcgaggcttcagccagaagtcaaaccttgttgcacaccagaggacgcactcaggggagaggccgtatgtgtgccgagagtgcgggcgaggctttagccaccaggccggtctcatcaggcacaagcggaagcactcgagggagaagccctacatgtgcaggcagtgtggactgggctttggcaataagtcagctctaattacacacaagcgggctcactcggaagagaagccttgtgtgtgcagagagtgtggccaaggctttctccaaaagtcacacctcaccttacatcaaatgacacatacgggggagaagccatatgtgtgcaagacgtgtgggcggggcttcagcctcaagtctcacctcagcagacacaggaagaccacgtctgtccaccacagactgccagtgcagcccgaccctgagccgtgtgcagggcaaccttcggattccttatactctctc

SEQ ID NO: 4890 - DNA, 1677 bp, Homo sapiens
  source 1..1677: mol_type = genomic DNA
atgcagcatgtgctgtgtaatcatcccccctggatcttcacatgcttgtgtgcagaaggtaacatccagcctggggatccgggcccaggggaccaggagaagcagcaacaagcctctgaggggagaccctggagtgatcaagcagaaggtcctgagggagaaggtgccatgcctttgtttggaagaaccaagaaaaggactctgggagcgttctccaggccaccccagaggcagccagtcagctctcggaacggcctcagaggggtggagttagaagccagcccagctcagtcagggaaccctgaggaaacagacaaattgttgaagaggatagaagtcttaggatttggaacagtcaactgtggagagtgtggactgagcttcagcaagatgacaaacctgctcagtcaccagcggatacactcaggggagaagccctacgtgtgtggggtatgtgagaagggcttcagcctaaagaagagcctcgccagacaccagaaggcacactcgggggagaagccaattgtgtgcagggagtgtggacgaggctttaaccggaagtcaacgctaatcatacacgaacggacacactccggtgagaaaccttacatgtgcagtgagtgtgggcgaggcttcagccagaagtcaaacctcatcatacaccagaggacacactcaggggaaaagccttacgtgtgccgggaatgtggcaaaggcttcagccagaagtcagctgtcgtgagacaccagaggacacacttggaggagaagaccatcgtgtgcagtgactgtggcctgggcttcagcgacaggtcaaacctcatctcccaccagaggacgcactctggggagaagccctacgcctgcaaggagtgtgggcgatgcttcaggcagaggaccacccttgtcaaccaccagaggacacactcaaaggagaagccctatgtgtgcggggtgtgtgggcacagcttcagccagaattcaaccctcatctctcacaggcggacacacactggggagaagccgtatgtttgtggggtgtgtgggcgaggctttagtctcaagtcacacctcaacagacaccagaacatacactcaggagagaagcccattgtgtgcaaggactgtggccggggcttcagccagcaatccaacctcatcagacaccagaggacgcactcaggcgagaagcccatggtgtgtggggagtgcgggcgaggcttcagccagaagtcaaaccttgttgcacaccagaggacgcactcaggggagaggccgtatgtgtgccgagagtgcgggcgaggctttagccaccaggccggtctcatcaggcacaagcggaagcactcgagggagaagccctacatgtgcaggcagtgtggactgggctttggcaataagtcagctctaattacacacaagcgggctcactcggaagagaagccttgtgtgtgcagagagtgtggccaaggctttctccaaaagtcacacctcaccttacatcaaatgacacatacgggggagaagccatatgtgtgcaagacgtgtgggcggggcttcagcctcaagtctcacctcagcagacacaggaagaccacgtctgtccaccacagactgccagtgcagcccgaccctgagccgtgtgcagggcaaccttcggattccttatactctctc

SEQ ID NO: 4891 - DNA, 2001 bp, Homo sapiens
  source 1..2001: mol_type = genomic DNA
atgggagctgccggccttcagggcgcgcctggtggcgccgagcatcctgggaggtgtggtccgggcgctgtgccgaggattcggggtagtgtagtcctggcgccccgctggaggagctccccagctggtggctggagcgaccccttgttctttggtggcgctggaatttcattttctaaaccagaactcatcacccagctggagcaagggaaagagacctggagagaggaaaaaaaatgttcaccggcaacctgtccagatccagagccagagctctacctcgatcctttctgccctccgggtttctccagtcagaaattccccatgcagcatgtgctgtgtaatcatcccccctggatcttcacatgcttgtgtgcagaaggtaacatccagcctggggatccgggcccaggggaccaggagaagcagcaacaagcctctgaggggagaccctggagtgatcaagcagaaggtcctgagggagaaggtgccatgcctttgtttggaagaaccaagaaaaggactctgggagcgttctccaggccaccccagaggcagccagtcagctctcggaacggcctcagaggggtggagttagaagccagcccagctcagtcagggaaccctgaggaaacagacaaattgttgaagaggatagaagtcttaggatttggaacagtcaactgtggagagtgtggactgagcttcagcaagatgacaaacctgctcagtcaccagcggatacactcaggggagaagccctacgtgtgtggggtatgtgagaagggcttcagcctaaagaagagcctcgccagacaccagaaggcacactcgggggagaagccaattgtgtgcagggagtgtggacgaggctttaaccggaagtcaacgctaatcatacacgaacggacacactccggtgagaaaccttacatgtgcagtgagtgtgggcgaggcttcagccagaagtcaaacctcatcatacaccagaggacacactcaggggaaaagccttacgtgtgccgggaatgtggcaaaggcttcagccagaagtcagctgtcgtgagacaccagaggacacacttggaggagaagaccatcgtgtgcagtgactgtggcctgggcttcagcgacaggtcaaacctcatctcccaccagaggacgcactctggggagaagccctacgcctgcaaggagtgtgggcgatgcttcaggcagaggaccacccttgtcaaccaccagaggacacactcaaaggagaagccctatgtgtgcggggtgtgtgggcacagcttcagccagaattcaaccctcatctctcacaggcggacacacactggggagaagccgtatgtttgtggggtgtgtgggcgaggctttagtctcaagtcacacctcaacagacaccagaacatacactcaggagagaagcccattgtgtgcaaggactgtggccggggcttcagccagcaatccaacctcatcagacaccagaggacgcactcaggcgagaagcccatggtgtgtggggagtgcgggcgaggcttcagccagaagtcaaaccttgttgcacaccagaggacgcactcaggggagaggccgtatgtgtgccgagagtgcgggcgaggctttagccaccaggccggtctcatcaggcacaagcggaagcactcgagggagaagccctacatgtgcaggcagtgtggactgggctttggcaataagtcagctctaattacacacaagcgggctcactcggaagagaagccttgtgtgtgcagagagtgtggccaaggctttctccaaaagtcacacctcaccttacatcaaatgacacatacgggggagaagccatatgtgtgcaagacgtgtgggcggggcttcagcctcaagtctcacctcagcagacacaggaagaccacgtctgtccaccacagactgccagtgcagcccgaccctgagccgtgtgcagggcaaccttcggattccttatactctctc

SEQ ID NO: 4892 - DNA, 906 bp, Homo sapiens
  source 1..906: mol_type = genomic DNA
atggatgatttgatgctgtccccggacgatattgaacaatggttcactgaagacccaggtccagatgaagctcccagaatgccagaggctgctccccccgtggcccctgcaccagcagctcctacaccggcggcccctgcaccagccccctcctggcccctgtcatcttctgtcccttcccagaaaacctaccagggcagctacggtttccgtctgggcttcttgcattctgggacagccaagtctgtgacttgcacgtactcccctgccctcaacaagatgttttgccaactggccaagacctgccctgtgcagctgtgggttgattccacacccccgcccggcacccgcgtccgcgccatggccatctacaagcagtcacagcacatgacggaggttgtgaggcgctgcccccaccatgagcgctgctcagatagcgatggtctggcccctcctcagcatcttatccgagtggaaggaaatttgcgtgtggagtatttggatgacagaaacacttttcgacatagtgtggtggtgccctatgagccgcctgaggttggctctgactgtaccaccatccactacaactacatgtgtaacagttcctgcatgggcggcatgaaccggaggcccatcctcaccatcatcacactggaagactccagtggtaatctactgggacggaacagctttgaggtgcgtgtttgtgcctgtcctgggagagaccggcgcacagaggaagagaatctccgcaagaaaggggagcctcaccacgagctgcccccagggagcactaagcgagcactgcccaacaacaccagctcctctccccagccaaagaagaaaccactggatggagaatatttcacccttcaggaccagaccagctttcaaaaagaaaattgt

SEQ ID NO: 4893 - DNA, 1062 bp, Homo sapiens
  source 1..1062: mol_type = genomic DNA
atggatgatttgatgctgtccccggacgatattgaacaatggttcactgaagacccaggtccagatgaagctcccagaatgccagaggctgctccccccgtggcccctgcaccagcagctcctacaccggcggcccctgcaccagccccctcctggcccctgtcatcttctgtcccttcccagaaaacctaccagggcagctacggtttccgtctgggcttcttgcattctgggacagccaagtctgtgacttgcacgtactcccctgccctcaacaagatgttttgccaactggccaagacctgccctgtgcagctgtgggttgattccacacccccgcccggcacccgcgtccgcgccatggccatctacaagcagtcacagcacatgacggaggttgtgaggcgctgcccccaccatgagcgctgctcagatagcgatggtctggcccctcctcagcatcttatccgagtggaaggaaatttgcgtgtggagtatttggatgacagaaacacttttcgacatagtgtggtggtgccctatgagccgcctgaggttggctctgactgtaccaccatccactacaactacatgtgtaacagttcctgcatgggcggcatgaaccggaggcccatcctcaccatcatcacactggaagactccagtggtaatctactgggacggaacagctttgaggtgcgtgtttgtgcctgtcctgggagagaccggcgcacagaggaagagaatctccgcaagaaaggggagcctcaccacgagctgcccccagggagcactaagcgagcactgcccaacaacaccagctcctctccccagccaaagaagaaaccactggatggagaatatttcacccttcagatccgtgggcgtgagcgcttcgagatgttccgagagctgaatgaggccttggaactcaaggatgcccaggctgggaaggagccaggggggagcagggctcactccagccacctgaagtccaaaaagggtcagtctacctcccgccataaaaaactcatgttcaagacagaagggcctgactcagac

SEQ ID NO: 4894 - DNA, 702 bp, Homo sapiens
  source 1..702: mol_type = genomic DNA
atggccatctacaagcagtcacagcacatgacggaggttgtgaggcgctgcccccaccatgagcgctgctcagatagcgatggtctggcccctcctcagcatcttatccgagtggaaggaaatttgcgtgtggagtatttggatgacagaaacacttttcgacatagtgtggtggtgccctatgagccgcctgaggttggctctgactgtaccaccatccactacaactacatgtgtaacagttcctgcatgggcggcatgaaccggaggcccatcctcaccatcatcacactggaagactccagtggtaatctactgggacggaacagctttgaggtgcgtgtttgtgcctgtcctgggagagaccggcgcacagaggaagagaatctccgcaagaaaggggagcctcaccacgagctgcccccagggagcactaagcgagcactgcccaacaacaccagctcctctccccagccaaagaagaaaccactggatggagaatatttcacccttcagatccgtgggcgtgagcgcttcgagatgttccgagagctgaatgaggccttggaactcaaggatgcccaggctgggaaggagccaggggggagcagggctcactccagccacctgaagtccaaaaagggtcagtctacctcccgccataaaaaactcatgttcaagacagaagggcctgactcagac

SEQ ID NO: 4895 - DNA, 642 bp, Homo sapiens
  source 1..642: mol_type = genomic DNA
atgttttgccaactggccaagacctgccctgtgcagctgtgggttgattccacacccccgcccggcacccgcgtccgcgccatggccatctacaagcagtcacagcacatgacggaggttgtgaggcgctgcccccaccatgagcgctgctcagatagcgatggtctggcccctcctcagcatcttatccgagtggaaggaaatttgcgtgtggagtatttggatgacagaaacacttttcgacatagtgtggtggtgccctatgagccgcctgaggttggctctgactgtaccaccatccactacaactacatgtgtaacagttcctgcatgggcggcatgaaccggaggcccatcctcaccatcatcacactggaagactccagtggtaatctactgggacggaacagctttgaggtgcgtgtttgtgcctgtcctgggagagaccggcgcacagaggaagagaatctccgcaagaaaggggagcctcaccacgagctgcccccagggagcactaagcgagcactgcccaacaacaccagctcctctccccagccaaagaagaaaccactggatggagaatatttcacccttcagatgctacttgacttacgatggtgttacttcctgataaactcgtcg

SEQ ID NO: 4896 - DNA, 1038 bp, Homo sapiens
  source 1..1038: mol_type = genomic DNA
atggaggagccgcagtcagatcctagcgtcgagccccctctgagtcaggaaacattttcagacctatggaaactacttcctgaaaacaacgttctgtcccccttgccgtcccaagcaatggatgatttgatgctgtccccggacgatattgaacaatggttcactgaagacccaggtccagatgaagctcccagaatgccagaggctgctccccccgtggcccctgcaccagcagctcctacaccggcggcccctgcaccagccccctcctggcccctgtcatcttctgtcccttcccagaaaacctaccagggcagctacggtttccgtctgggcttcttgcattctgggacagccaagtctgtgacttgcacgtactcccctgccctcaacaagatgttttgccaactggccaagacctgccctgtgcagctgtgggttgattccacacccccgcccggcacccgcgtccgcgccatggccatctacaagcagtcacagcacatgacggaggttgtgaggcgctgcccccaccatgagcgctgctcagatagcgatggtctggcccctcctcagcatcttatccgagtggaaggaaatttgcgtgtggagtatttggatgacagaaacacttttcgacatagtgtggtggtgccctatgagccgcctgaggttggctctgactgtaccaccatccactacaactacatgtgtaacagttcctgcatgggcggcatgaaccggaggcccatcctcaccatcatcacactggaagactccagtggtaatctactgggacggaacagctttgaggtgcgtgtttgtgcctgtcctgggagagaccggcgcacagaggaagagaatctccgcaagaaaggggagcctcaccacgagctgcccccagggagcactaagcgagcactgcccaacaacaccagctcctctccccagccaaagaagaaaccactggatggagaatatttcacccttcagatgctacttgacttacgatggtgttacttcctgataaactcgtcg

SEQ ID NO: 4897 - DNA, 1179 bp, Homo sapiens
  source 1..1179: mol_type = genomic DNA
atggaggagccgcagtcagatcctagcgtcgagccccctctgagtcaggaaacattttcagacctatggaaactacttcctgaaaacaacgttctgtcccccttgccgtcccaagcaatggatgatttgatgctgtccccggacgatattgaacaatggttcactgaagacccaggtccagatgaagctcccagaatgccagaggctgctccccccgtggcccctgcaccagcagctcctacaccggcggcccctgcaccagccccctcctggcccctgtcatcttctgtcccttcccagaaaacctaccagggcagctacggtttccgtctgggcttcttgcattctgggacagccaagtctgtgacttgcacgtactcccctgccctcaacaagatgttttgccaactggccaagacctgccctgtgcagctgtgggttgattccacacccccgcccggcacccgcgtccgcgccatggccatctacaagcagtcacagcacatgacggaggttgtgaggcgctgcccccaccatgagcgctgctcagatagcgatggtctggcccctcctcagcatcttatccgagtggaaggaaatttgcgtgtggagtatttggatgacagaaacacttttcgacatagtgtggtggtgccctatgagccgcctgaggttggctctgactgtaccaccatccactacaactacatgtgtaacagttcctgcatgggcggcatgaaccggaggcccatcctcaccatcatcacactggaagactccagtggtaatctactgggacggaacagctttgaggtgcgtgtttgtgcctgtcctgggagagaccggcgcacagaggaagagaatctccgcaagaaaggggagcctcaccacgagctgcccccagggagcactaagcgagcactgcccaacaacaccagctcctctccccagccaaagaagaaaccactggatggagaatatttcacccttcagatccgtgggcgtgagcgcttcgagatgttccgagagctgaatgaggccttggaactcaaggatgcccaggctgggaaggagccaggggggagcagggctcactccagccacctgaagtccaaaaagggtcagtctacctcccgccataaaaaactcatgttcaagacagaagggcctgactcagac

SEQ ID NO: 4898 - DNA, 921 bp, Homo sapiens
  source 1..921: mol_type = genomic DNA
atggatgatttgatgctgtccccggacgatattgaacaatggttcactgaagacccaggtccagatgaagctcccagaatgccagaggctgctccccccgtggcccctgcaccagcagctcctacaccggcggcccctgcaccagccccctcctggcccctgtcatcttctgtcccttcccagaaaacctaccagggcagctacggtttccgtctgggcttcttgcattctgggacagccaagtctgtgacttgcacgtactcccctgccctcaacaagatgttttgccaactggccaagacctgccctgtgcagctgtgggttgattccacacccccgcccggcacccgcgtccgcgccatggccatctacaagcagtcacagcacatgacggaggttgtgaggcgctgcccccaccatgagcgctgctcagatagcgatggtctggcccctcctcagcatcttatccgagtggaaggaaatttgcgtgtggagtatttggatgacagaaacacttttcgacatagtgtggtggtgccctatgagccgcctgaggttggctctgactgtaccaccatccactacaactacatgtgtaacagttcctgcatgggcggcatgaaccggaggcccatcctcaccatcatcacactggaagactccagtggtaatctactgggacggaacagctttgaggtgcgtgtttgtgcctgtcctgggagagaccggcgcacagaggaagagaatctccgcaagaaaggggagcctcaccacgagctgcccccagggagcactaagcgagcactgcccaacaacaccagctcctctccccagccaaagaagaaaccactggatggagaatatttcacccttcagatgctacttgacttacgatggtgttacttcctgataaactcgtcg

SEQ ID NO: 4899 - DNA, 783 bp, Homo sapiens
  source 1..783: mol_type = genomic DNA
atgttttgccaactggccaagacctgccctgtgcagctgtgggttgattccacacccccgcccggcacccgcgtccgcgccatggccatctacaagcagtcacagcacatgacggaggttgtgaggcgctgcccccaccatgagcgctgctcagatagcgatggtctggcccctcctcagcatcttatccgagtggaaggaaatttgcgtgtggagtatttggatgacagaaacacttttcgacatagtgtggtggtgccctatgagccgcctgaggttggctctgactgtaccaccatccactacaactacatgtgtaacagttcctgcatgggcggcatgaaccggaggcccatcctcaccatcatcacactggaagactccagtggtaatctactgggacggaacagctttgaggtgcgtgtttgtgcctgtcctgggagagaccggcgcacagaggaagagaatctccgcaagaaaggggagcctcaccacgagctgcccccagggagcactaagcgagcactgcccaacaacaccagctcctctccccagccaaagaagaaaccactggatggagaatatttcacccttcagatccgtgggcgtgagcgcttcgagatgttccgagagctgaatgaggccttggaactcaaggatgcccaggctgggaaggagccaggggggagcagggctcactccagccacctgaagtccaaaaagggtcagtctacctcccgccataaaaaactcatgttcaagacagaagggcctgactcagac

SEQ ID NO: 4900 - DNA, 1023 bp, Homo sapiens
  source 1..1023: mol_type = genomic DNA
atggaggagccgcagtcagatcctagcgtcgagccccctctgagtcaggaaacattttcagacctatggaaactacttcctgaaaacaacgttctgtcccccttgccgtcccaagcaatggatgatttgatgctgtccccggacgatattgaacaatggttcactgaagacccaggtccagatgaagctcccagaatgccagaggctgctccccccgtggcccctgcaccagcagctcctacaccggcggcccctgcaccagccccctcctggcccctgtcatcttctgtcccttcccagaaaacctaccagggcagctacggtttccgtctgggcttcttgcattctgggacagccaagtctgtgacttgcacgtactcccctgccctcaacaagatgttttgccaactggccaagacctgccctgtgcagctgtgggttgattccacacccccgcccggcacccgcgtccgcgccatggccatctacaagcagtcacagcacatgacggaggttgtgaggcgctgcccccaccatgagcgctgctcagatagcgatggtctggcccctcctcagcatcttatccgagtggaaggaaatttgcgtgtggagtatttggatgacagaaacacttttcgacatagtgtggtggtgccctatgagccgcctgaggttggctctgactgtaccaccatccactacaactacatgtgtaacagttcctgcatgggcggcatgaaccggaggcccatcctcaccatcatcacactggaagactccagtggtaatctactgggacggaacagctttgaggtgcgtgtttgtgcctgtcctgggagagaccggcgcacagaggaagagaatctccgcaagaaaggggagcctcaccacgagctgcccccagggagcactaagcgagcactgcccaacaacaccagctcctctccccagccaaagaagaaaccactggatggagaatatttcacccttcaggaccagaccagctttcaaaaagaaaattgt

SEQ ID NO: 4901 - DNA, 627 bp, Homo sapiens
  source 1..627: mol_type = genomic DNA
atgttttgccaactggccaagacctgccctgtgcagctgtgggttgattccacacccccgcccggcacccgcgtccgcgccatggccatctacaagcagtcacagcacatgacggaggttgtgaggcgctgcccccaccatgagcgctgctcagatagcgatggtctggcccctcctcagcatcttatccgagtggaaggaaatttgcgtgtggagtatttggatgacagaaacacttttcgacatagtgtggtggtgccctatgagccgcctgaggttggctctgactgtaccaccatccactacaactacatgtgtaacagttcctgcatgggcggcatgaaccggaggcccatcctcaccatcatcacactggaagactccagtggtaatctactgggacggaacagctttgaggtgcgtgtttgtgcctgtcctgggagagaccggcgcacagaggaagagaatctccgcaagaaaggggagcctcaccacgagctgcccccagggagcactaagcgagcactgcccaacaacaccagctcctctccccagccaaagaagaaaccactggatggagaatatttcacccttcaggaccagaccagctttcaaaaagaaaattgt

SEQ ID NO: 4902 - DNA, 546 bp, Homo sapiens
  source 1..546: mol_type = genomic DNA
atggccatctacaagcagtcacagcacatgacggaggttgtgaggcgctgcccccaccatgagcgctgctcagatagcgatggtctggcccctcctcagcatcttatccgagtggaaggaaatttgcgtgtggagtatttggatgacagaaacacttttcgacatagtgtggtggtgccctatgagccgcctgaggttggctctgactgtaccaccatccactacaactacatgtgtaacagttcctgcatgggcggcatgaaccggaggcccatcctcaccatcatcacactggaagactccagtggtaatctactgggacggaacagctttgaggtgcgtgtttgtgcctgtcctgggagagaccggcgcacagaggaagagaatctccgcaagaaaggggagcctcaccacgagctgcccccagggagcactaagcgagcactgcccaacaacaccagctcctctccccagccaaagaagaaaccactggatggagaatatttcacccttcaggaccagaccagctttcaaaaagaaaattgt

SEQ ID NO: 4903 - DNA, 561 bp, Homo sapiens
  source 1..561: mol_type = genomic DNA
atggccatctacaagcagtcacagcacatgacggaggttgtgaggcgctgcccccaccatgagcgctgctcagatagcgatggtctggcccctcctcagcatcttatccgagtggaaggaaatttgcgtgtggagtatttggatgacagaaacacttttcgacatagtgtggtggtgccctatgagccgcctgaggttggctctgactgtaccaccatccactacaactacatgtgtaacagttcctgcatgggcggcatgaaccggaggcccatcctcaccatcatcacactggaagactccagtggtaatctactgggacggaacagctttgaggtgcgtgtttgtgcctgtcctgggagagaccggcgcacagaggaagagaatctccgcaagaaaggggagcctcaccacgagctgcccccagggagcactaagcgagcactgcccaacaacaccagctcctctccccagccaaagaagaaaccactggatggagaatatttcacccttcagatgctacttgacttacgatggtgttacttcctgataaactcgtcg

SEQ ID NO: 4904 - DNA, 1170 bp, Homo sapiens
  source 1..1170: mol_type = genomic DNA
atggagttaggctcgcgccggcgcagtgtcggctgccggtgccgcggcctttgtctcgcagtcaggagggagcaagtgacgtttgaggacgtggtagtgggcttcagccaggaggagtgggggcagctgaagcctgcccagaggaccctgtaccgtgatgtaatgctggacaccttcaggcttctggtctctgtgggacattggttaccgaagccgaatgtcatctccctgctggagcaagaggcagagctgtgggcggtggagtctagacttccccaaggcgtgtacccagacttggaaactagacccaaagtcaaactgtcagttctaaagcaaggcatctctgaagaaatatccaacagtgtcatcttggtagaaagattcctgtgggatggtctgtggtactgcaggggtgaggacactgagggccactgggaatggagttgtgagagtctagagagcctggcagtgccggtggccttcacgcctgtgaagacgcctgttctggagcagtggcagaggaatgggtttggggaaaacataagtctgaaccctgatctcccacatcaaccaatgactcctgaaagacaaagcccccacacatggggaacacgtggaaaaagggagaagccagacctaaatgttttacagaaaacctgtgtaaaagagaaaccctacaaatgtcaggaatgcggaaaggcctttagtcacagctcagcacttatcgaacaccaccggacgcacacaggagagagaccttacgaatgtcacgaatgcttaaaaggcttccggaacagctcggcacttaccaaacaccagagaatccatactggggagaaaccctataaatgcactcagtgtgggaggaccttcaaccaaattgccccactgatccagcaccagagaactcacacaggtgagaagccctatgaatgcagcgaatgtgggaaatccttcagttttaggtcctccttcagccagcacgagcgaactcacacaggcgagaagccctacgagtgcagtgagtgtgggaaagccttccggcaaagcatccacctcacccagcatctgcgaatccacactggggagaaaccctatcagtgtggtgagtgtggcaaggcctttacccacagctcctcccttaccaagcaccagagaactcacactgga

SEQ ID NO: 4905 - DNA, 2010 bp, Homo sapiens
  source 1..2010: mol_type = genomic DNA
atgacccctggggtgcgcgtctccacagacccggagcaagtgacgtttgaggacgtggtagtgggcttcagccaggaggagtgggggcagctgaagcctgcccagaggaccctgtaccgtgatgtaatgctggacaccttcaggcttctggtctctgtgggacattggttaccgaagccgaatgtcatctccctgctggagcaagaggcagagctgtgggcggtggagtctagacttccccaaggcgtgtacccagagattaagggacatttccagtttttgcttctttcagacttggaaactagacccaaagtcaaactgtcagttctaaagcaaggcatctctgaagaaatatccaacagtgtcatcttggtagaaagattcctgtgggatggtctgtggtactgcaggggtgaggacactgagggccactgggaatggagttgtgagagtctagagagcctggcagtgccggtggccttcacgcctgtgaagacgcctgttctggagcagtggcagaggaatgggtttggggaaaacataagtctgaaccctgatctcccacatcaaccaatgactcctgaaagacaaagcccccacacatggggaacacgtggaaaaagggagaagccagacctaaatgttttacagaaaacctgtgtaaaagagaaaccctacaaatgtcaggaatgcggaaaggcctttagtcacagctcagcacttatcgaacaccaccggacgcacacaggagagagaccttacgaatgtcacgaatgcttaaaaggcttccggaacagctcggcacttaccaaacaccagagaatccatactggggagaaaccctataaatgcactcagtgtgggaggaccttcaaccaaattgccccactgatccagcaccagagaactcacacaggtgagaagccctatgaatgcagcgaatgtgggaaatccttcagttttaggtcctccttcagccagcacgagcgaactcacacaggcgagaagccctacgagtgcagtgagtgtgggaaagccttccggcaaagcatccacctcacccagcatctgcgaatccacactggggagaaaccctatcagtgtggtgagtgtggcaaggccttcagccacagctcatccttgaccaaacaccagcgaatccacacaggggagaagccctacgagtgccatgagtgtggaaaagccttcacccagatcacaccactgattcagcaccagaggacccacacaggagaaaagccctatgagtgtggtgagtgtgggaaagccttcagtcagagcacactcctgaccgagcatcggaggattcacacaggagagaagccctatggatgcaacgagtgtgggaaaaccttcagccacagctcctcactcagccagcatgagcggacacacacaggagagaagccctatgagtgcagtcagtgtgggaaggccttccggcagagcacacacctcacccaacaccagcgaatccacacaggggagaagccctatgaatgcaatgactgcggcaaggcattcagtcacagctcgtccctcaccaaacatcagcgaatccacactggggagaagccctacgaatgcaaccagtgtggcagagccttcagccagcttgctcccctcattcagcatcagaggatccacacaggagagaaaccctatgaatgtaaccagtgtggcagagccttcagccagagctcccttctcatcgaacaccagaggattcacaccaaggaaaagccgtatgggtgcaatgagtgtgggaaatccttcagccacagctcctcgctcagccagcacgaaaggacgcacactggggaaaagccctatgagtgtcacgattgcggaaagtcctttaggcagagcacccacctcactcagcaccggaggatccacacaggagagaagccatatgcatgcagggactgtggaaaggcctttacccacagctcctcccttaccaagcaccagagaactcacactgga

SEQ ID NO: 4906 - DNA, 1974 bp, Homo sapiens
  source 1..1974: mol_type = genomic DNA
atgacccctggggtgcgcgtctccacagacccggagcaagtgacgtttgaggacgtggtagtgggcttcagccaggaggagtgggggcagctgaagcctgcccagaggaccctgtaccgtgatgtaatgctggacaccttcaggcttctggtctctgtgggacattggttaccgaagccgaatgtcatctccctgctggagcaagaggcagagctgtgggcggtggagtctagacttccccaaggcgtgtacccagacttggaaactagacccaaagtcaaactgtcagttctaaagcaaggcatctctgaagaaatatccaacagtgtcatcttggtagaaagattcctgtgggatggtctgtggtactgcaggggtgaggacactgagggccactgggaatggagttgtgagagtctagagagcctggcagtgccggtggccttcacgcctgtgaagacgcctgttctggagcagtggcagaggaatgggtttggggaaaacataagtctgaaccctgatctcccacatcaaccaatgactcctgaaagacaaagcccccacacatggggaacacgtggaaaaagggagaagccagacctaaatgttttacagaaaacctgtgtaaaagagaaaccctacaaatgtcaggaatgcggaaaggcctttagtcacagctcagcacttatcgaacaccaccggacgcacacaggagagagaccttacgaatgtcacgaatgcttaaaaggcttccggaacagctcggcacttaccaaacaccagagaatccatactggggagaaaccctataaatgcactcagtgtgggaggaccttcaaccaaattgccccactgatccagcaccagagaactcacacaggtgagaagccctatgaatgcagcgaatgtgggaaatccttcagttttaggtcctccttcagccagcacgagcgaactcacacaggcgagaagccctacgagtgcagtgagtgtgggaaagccttccggcaaagcatccacctcacccagcatctgcgaatccacactggggagaaaccctatcagtgtggtgagtgtggcaaggccttcagccacagctcatccttgaccaaacaccagcgaatccacacaggggagaagccctacgagtgccatgagtgtggaaaagccttcacccagatcacaccactgattcagcaccagaggacccacacaggagaaaagccctatgagtgtggtgagtgtgggaaagccttcagtcagagcacactcctgaccgagcatcggaggattcacacaggagagaagccctatggatgcaacgagtgtgggaaaaccttcagccacagctcctcactcagccagcatgagcggacacacacaggagagaagccctatgagtgcagtcagtgtgggaaggccttccggcagagcacacacctcacccaacaccagcgaatccacacaggggagaagccctatgaatgcaatgactgcggcaaggcattcagtcacagctcgtccctcaccaaacatcagcgaatccacactggggagaagccctacgaatgcaaccagtgtggcagagccttcagccagcttgctcccctcattcagcatcagaggatccacacaggagagaaaccctatgaatgtaaccagtgtggcagagccttcagccagagctcccttctcatcgaacaccagaggattcacaccaaggaaaagccgtatgggtgcaatgagtgtgggaaatccttcagccacagctcctcgctcagccagcacgaaaggacgcacactggggaaaagccctatgagtgtcacgattgcggaaagtcctttaggcagagcacccacctcactcagcaccggaggatccacacaggagagaagccatatgcatgcagggactgtggaaaggcctttacccacagctcctcccttaccaagcaccagagaactcacactgga

SEQ ID NO: 4907 - DNA, 1848 bp, Homo sapiens
  source 1..1848: mol_type = genomic DNA
atgctggacaccttcaggcttctggtctctgtgggacattggttaccgaagccgaatgtcatctccctgctggagcaagaggcagagctgtgggcggtggagtctagacttccccaaggcgtgtacccagacttggaaactagacccaaagtcaaactgtcagttctaaagcaaggcatctctgaagaaatatccaacagtgtcatcttggtagaaagattcctgtgggatggtctgtggtactgcaggggtgaggacactgagggccactgggaatggagttgtgagagtctagagagcctggcagtgccggtggccttcacgcctgtgaagacgcctgttctggagcagtggcagaggaatgggtttggggaaaacataagtctgaaccctgatctcccacatcaaccaatgactcctgaaagacaaagcccccacacatggggaacacgtggaaaaagggagaagccagacctaaatgttttacagaaaacctgtgtaaaagagaaaccctacaaatgtcaggaatgcggaaaggcctttagtcacagctcagcacttatcgaacaccaccggacgcacacaggagagagaccttacgaatgtcacgaatgcttaaaaggcttccggaacagctcggcacttaccaaacaccagagaatccatactggggagaaaccctataaatgcactcagtgtgggaggaccttcaaccaaattgccccactgatccagcaccagagaactcacacaggtgagaagccctatgaatgcagcgaatgtgggaaatccttcagttttaggtcctccttcagccagcacgagcgaactcacacaggcgagaagccctacgagtgcagtgagtgtgggaaagccttccggcaaagcatccacctcacccagcatctgcgaatccacactggggagaaaccctatcagtgtggtgagtgtggcaaggccttcagccacagctcatccttgaccaaacaccagcgaatccacacaggggagaagccctacgagtgccatgagtgtggaaaagccttcacccagatcacaccactgattcagcaccagaggacccacacaggagaaaagccctatgagtgtggtgagtgtgggaaagccttcagtcagagcacactcctgaccgagcatcggaggattcacacaggagagaagccctatggatgcaacgagtgtgggaaaaccttcagccacagctcctcactcagccagcatgagcggacacacacaggagagaagccctatgagtgcagtcagtgtgggaaggccttccggcagagcacacacctcacccaacaccagcgaatccacacaggggagaagccctatgaatgcaatgactgcggcaaggcattcagtcacagctcgtccctcaccaaacatcagcgaatccacactggggagaagccctacgaatgcaaccagtgtggcagagccttcagccagcttgctcccctcattcagcatcagaggatccacacaggagagaaaccctatgaatgtaaccagtgtggcagagccttcagccagagctcccttctcatcgaacaccagaggattcacaccaaggaaaagccgtatgggtgcaatgagtgtgggaaatccttcagccacagctcctcgctcagccagcacgaaaggacgcacactggggaaaagccctatgagtgtcacgattgcggaaagtcctttaggcagagcacccacctcactcagcaccggaggatccacacaggagagaagccatatgcatgcagggactgtggaaaggcctttacccacagctcctcccttaccaagcaccagagaactcacactgga

SEQ ID NO: 4908 - DNA, 2046 bp, Homo sapiens
  source 1..2046: mol_type = genomic DNA
atggagttaggctcgcgccggcgcagtgtcggctgccggtgccgcggcctttgtctcgcagtcaggagggagcaagtgacgtttgaggacgtggtagtgggcttcagccaggaggagtgggggcagctgaagcctgcccagaggaccctgtaccgtgatgtaatgctggacaccttcaggcttctggtctctgtgggacattggttaccgaagccgaatgtcatctccctgctggagcaagaggcagagctgtgggcggtggagtctagacttccccaaggcgtgtacccagagattaagggacatttccagtttttgcttctttcagacttggaaactagacccaaagtcaaactgtcagttctaaagcaaggcatctctgaagaaatatccaacagtgtcatcttggtagaaagattcctgtgggatggtctgtggtactgcaggggtgaggacactgagggccactgggaatggagttgtgagagtctagagagcctggcagtgccggtggccttcacgcctgtgaagacgcctgttctggagcagtggcagaggaatgggtttggggaaaacataagtctgaaccctgatctcccacatcaaccaatgactcctgaaagacaaagcccccacacatggggaacacgtggaaaaagggagaagccagacctaaatgttttacagaaaacctgtgtaaaagagaaaccctacaaatgtcaggaatgcggaaaggcctttagtcacagctcagcacttatcgaacaccaccggacgcacacaggagagagaccttacgaatgtcacgaatgcttaaaaggcttccggaacagctcggcacttaccaaacaccagagaatccatactggggagaaaccctataaatgcactcagtgtgggaggaccttcaaccaaattgccccactgatccagcaccagagaactcacacaggtgagaagccctatgaatgcagcgaatgtgggaaatccttcagttttaggtcctccttcagccagcacgagcgaactcacacaggcgagaagccctacgagtgcagtgagtgtgggaaagccttccggcaaagcatccacctcacccagcatctgcgaatccacactggggagaaaccctatcagtgtggtgagtgtggcaaggccttcagccacagctcatccttgaccaaacaccagcgaatccacacaggggagaagccctacgagtgccatgagtgtggaaaagccttcacccagatcacaccactgattcagcaccagaggacccacacaggagaaaagccctatgagtgtggtgagtgtgggaaagccttcagtcagagcacactcctgaccgagcatcggaggattcacacaggagagaagccctatggatgcaacgagtgtgggaaaaccttcagccacagctcctcactcagccagcatgagcggacacacacaggagagaagccctatgagtgcagtcagtgtgggaaggccttccggcagagcacacacctcacccaacaccagcgaatccacacaggggagaagccctatgaatgcaatgactgcggcaaggcattcagtcacagctcgtccctcaccaaacatcagcgaatccacactggggagaagccctacgaatgcaaccagtgtggcagagccttcagccagcttgctcccctcattcagcatcagaggatccacacaggagagaaaccctatgaatgtaaccagtgtggcagagccttcagccagagctcccttctcatcgaacaccagaggattcacaccaaggaaaagccgtatgggtgcaatgagtgtgggaaatccttcagccacagctcctcgctcagccagcacgaaaggacgcacactggggaaaagccctatgagtgtcacgattgcggaaagtcctttaggcagagcacccacctcactcagcaccggaggatccacacaggagagaagccatatgcatgcagggactgtggaaaggcctttacccacagctcctcccttaccaagcaccagagaactcacactgga

SEQ ID NO: 4909 - DNA, 7338 bp, Homo sapiens
  source 1..7338: mol_type = genomic DNA
atggacactggggacacagctctaggacaaaaagctacctcaaggtctggagaaactgataaagcatcaggtagatggagacaggaacaatcagctgttattaagatgagcacttttggcagtcatgaaggacagcggcaaccacaaatagagcctgagcaaatcggaaacacagcatcagcacaactgtttggttctgggaaactggcctcccctagtgaagtggtgcagcaagtcgcagagaagcaatatccaccgcatcgtccgagtccttactcatgccaacactcactctctttccctcagcactcattgccacagggggtcatgcacagcaccaagccacatcagagcctcgaaggtcctccgtggcttttccctggccctttgccatccgttgcctctgaggacttatttccttttcctatacatggccacagtggtggttatcctagaaaaaagatttcaagtctgaaccctgcttatagccaatactcccagaaaagtattgaacaggcagaagaggctcacaagaaagagcacaaacccaaaaagcctggcaagtacatttgcccttactgcagcagagcgtgtgccaaacctagtgtactgaaaaaacacatcaggtcccatactggggagcggccatatccatgtataccttgtggtttctctttcaagacaaagagcaatttgtacaagcacaggaagtcacatgcccatgcaattaaggcaggattagtacctttcacagagtcagctgtatctaaattggacctagaggctggttttattgatgtagaagcagaaatacattcagatggtgaacagagtacagacacagatgaggagagttctttatttgccgaggcttctgacaaaatgagtcctggtccacccatcccactggacattgccagcagaggcggctatcatgggtcattggaagaatcattgggaggtccaatgaaggtgccgattttgattatccctaaaagtgggattcctctccctaatgaaagctctcagtatattggccctgatatgctaccaaatccatctttaaatactaaggctgatgattcgcacacagtcaaacagaaacttgcactaagactgtcagagaaaaaaggacaagattctgagccatcgctcaaccttctgagcccgcacagtaaaggaagcactgattctggttacttttctcgctcagaaagtgctgagcagcaaataagccctcccaacacaaatgcaaagtcttatgaagaaatcatctttggaaaatactgtcggcttagtccgagaaatgcactcagtgttacaaccacaagtcaggagcgtgccgcaatgggtaggaagggcataatggaaccattacctcacgttaacaccaggttagatgtcaagatgtttgaagatcctgtttcacagctgatcccaagcaagggagatgtcgaccccagtcaaacgagcatgctgaaatccactaagttcaacagtgagtccagacaaccccagattattccatcatctatcaggaacgaaggaaaactttatccagcaaacttccaaggcagcaacccggttctcttagaagctcctgtagactcttcaccccttattagaagcaactcagtgccaacttcttcagcaactaatctaactattcctccttctttgagaggaagtcactcatttgatgaaaggatgactggttccgacgatgtattctatccagggaccgtgggcataccccctcagcgcatgctaagaagacaagcggcatttgagctgccttcggtacaggagggccacgtggaagtcgagcaccatggcaggatgttgaagggtatcagcagttcatccctgaaggaaaagaaattgtctcctggggacagggttgggtatgactatgatgtctgtcggaaaccctataagaagtgggaggactctgaaacaccaaagcaaaactacagggacatttcctgcttgagttctttaaagcatggtggagaatatttcatggatcccgtggtgccattgcagggagtaccaagcatgtttggaactacctgtgaaaacaggaaacgccggaaagagaagagcgtaggggatgaagaggacacgcccatgatctgcagcagcattgtaagcactcctgtgggcatcatggcttccgattatgaccccaaactgcagatgcaggaaggagtcaggagtggatttgccatggctggacacgaaaacctttctcatggtcacacggaacgctttgacccatgtcggccccaactgcagcctggaagtccatctcttgtgtcagaggagtcaccttcagccattgattcagacaagatgtcagacctagggggcaggaaacctcctggaaatgtgatttctgtgattcagcacaccaactcactgagccgacccaattcatttgaaaggtctgagtcagccgaacttgtggcttgcacacaggataaagccccttccccttcagagacttgtgacagtgagatttcagaagccccagtgagtcctgagtgggctccacctggggatggtgcagaaagtggggggaaaccctctccatctcagcaggtgcagcagcagtcctatcacacacagcccaggctagttcggcaacacaacatccaggttcctgagattcgagtgaccgaggagcctgataaacctgagaaggagaaggaagcccagagcaaagagccagagaagcctgtggaagaatttcagtggccccagagaagtgagaccctttcccagctccccgcggagaagttgccacccaaaaagaagcgtctgcgacttgcagatatggagcactcctcaggggagtccagctttgaatccacaggcacaggcctctcccgcagccccagccaagaaagcaacttgtcccacagctccagtttctccatgtcttttgaaagagaagaaaccagtaagctttctgcacttcctaagcaggatgagtttgggaagcattcagagtttctgactgtccctgctggttcatactcattgtctgtcccaggccatcaccaccagaaagagatgcgacgctgctcatcagagcagatgccttgtcctcacccagcggaagtcccagaagttcggagcaaatcatttgattatgggaatctgtcccatgctcctgtgtcgggagcagcagcctccacggtatcaccgtccagggagaggaagaaatgctttctggtgcggcaagcttccttcagtggctccccagaaatctcccagggcgaggttggcatggatcagagcgtgaagcaagagcagctggagcacctgcatgctggcctccggtccgggtggcaccatggcccgcctgctgtgctgcctcctcttcagcaagaggacccagggaagcaggtggcgggtccttgtcccccgctgagctcggggccactgcacctggcccagccacagatcatgcacatggacagtcaggaatctttgagaaatcccttgatccaaccaacatcctatatgacaagcaagcacttacctgaacagccacacttatttccacatcaagagacaattccattttctccaatccagaatgccttgtttcagtttcagtatcctacagtttgtatggttcatttaccagctcagcagcctccctggtggcaggcacatttcccacatccctttgctcagcaccctcagaagagctatggcaagccctcttttcagacagaaatccattcgagctatcccttagagcatgtggcagagcacactggaaagaaacctgctgagtatgcacacacgaaagagcagacctacccatgttattcaggagcatcagggctacacccaaagaaccttcttccaaagtttccatcagaccagagcagtaagtcaactgaaacgccctctgagcaggttcttcaagaagattttgcctcggcaaatgctgggtctttgcagtccctcccaggaacagtggttcctgttcggatccagacgcacgtaccatcctatggaagtgtcatgtacacaagcatttctcagatacttgggcagaatagccctgccattgtcatatgcaaagtcgatgagaatatgacccaaaggacactggtcaccaacgcagccatgcaagggataggattcaacattgcccaggtgctggggcagcatgcgggcttggagaagtaccccatttggaaagcacctcagactttgcccctcggcttagaatcctccatccccttgtgtttaccttccacctctgacagcgtggccaccctgggaggtagcaagcgaatgctttctccagccagtagcttggagctcttcatggaaaccaagcagcagaaaagggtcaaagaagaaaagatgtacggacagattgtggaggagcttagtgctgtggagctgaccaactcagacatcaaaaaggacctctcccgcccccagaaaccccagctggttcgacaaggatgtgcttctgagccaaaagatggcttgcagtcagggtcatcttccttctcctcgctgtcgccctcctcatctcaagactatccttctgttagcccgtcttccagggagccattcctgcccagcaaggagatgctttccggttcccgggcaccacttccggggcagaagtccagtgggccttctgaaagcaaagaatcttcagatgaattagatatcgatgagacggcatcggacatgagcatgagcccacagagttcttcattaccagcaggagatggtcagctggaagaggaagggaagggccacaagcggcctgttggcatgctggtccgcatggcctctgcccccagcgggaacgtggcagactcaactcttcttctcacggacatggcagatttccagcagattcttcagttccccagtctgcggacaacaactactgtgagttggtgcttcttgaattatacaaaacccaattatgtgcaacaggccaccttcaaatcctcggtttatgcttcatggtgcattagttcctgtaatccaaacccatcaggattgaacaccaagaccacgctggctcttctgaggtccaagcaaaaaatcactgcagaaatttatactctggctgctatgcataggcctggaaccggcaagcttacatcatcaagtgcttggaagcagtttactcagatgaaacctgatgcgtcctttttatttggcagcaaactagaaaggaaactagtgggaaatatcttaaaggaaagagggaaaggagatattcatggagataaagatattggatccaaacaaactgagccaatccgaattaaaatatttgaaggagggtacaaatcgaatgaagattatgtatatgtcagaggacgtggccggggaaagtacatttgtgaagaatgtgggattcgctgtaagaagccaagcatgctcaaaaaacacatccgtacccatactgatgttcggccttatgtatgcaagttatgtaactttgccttcaaaacgaaaggaaacctaacgaagcatatgaaatctaaagcacacatgaaaaaatgcctggaattgggagtctcaatgacatcggtggatgatacagaaactgaggaagcagaaaatttggaagatttgcacaaagcagcagagaagcatagcatgtccagcatttcaactgatcatcagttctccgatgctgaggaatcagatggtgaggatggagatgataatgatgatgatgatgaagatgaagatgactttgacgaccagggagatttaacaccaaaaacaagatcaagaagcaccagtcctcagcctcctagattctcctccttgcctgtgaatgttggcgccgtaccccacggggttccttcagatagttccctgggacattcttcgttgatcagctatttggttactttgccaagtattcgagttactcagcttatgacacccagtgattcatgtgaagatacccagatgacagaataccagaggctattccagagcaaaagtacggactcagaaccagacaaagacagattggacatacctagttgtatggatgaggagtgcatgctaccttcagagccaagctcctctcccagggacttctcaccctcaagccaccattcctctccaggatatgattcttcaccctgtcgagataattcaccaaagaggtatctgatacccaaaggagatttatctcccaggagacatttatcacctaggagagatctgtcacccatgagacatctttcaccaagaaaggaagctgcattgagaagagagatgtcccaaagagatgtttcaccaagaaggcatttgtctccaaggaggccagtgtctcctgggaaagatatcacagcaagaagagacctctctcctagaagagagagaagatacatgaccacaataagagcgccatctcccagaagggctttataccataacccaccattgtccatgggacagtatttgcaagcagagccaattgtattggggcctcctaatttaagaagaggattacctcaggttccttacttcagtctctatggagaccaagaaggtgcttatgaacatccaggctccagccttttccctgagggtcctaatgactatgtcttcagtcatcttccactccactctcagcaacaagtgcgagcccctatccccatggtgcccgttggtgggatccagatggttcactccatgccgccagccctttccagtttacatccttcacccacattgcccctgccaatggagggctttgaggagaagaaaggcgcgtcaggggagtccttctccaaggacccctatgtgctttctaagcagcatgagaagcgaggtcctcacgctttgcagtcatctggtccacctagcactccctcctctcctcggctgttgatgaaacagagcacttcggaagacagcctaaacgcaacagagcgggaacaggaggaaaatatacagacttgtacaaaagccattgcctctctccggattgccacggaagaggcagctctgctcgggccagatcagccagcgcgggtgcaggagccccaccagaaccccctgggaagtgcacatgttagcattagacactttagtagacctgagccaggtcagccctgtacctcagccacccaccctgacttgcatgatggtgaaaaggacaattttggtacatcacagactccattagctcactccacgttttacagcaagagttgtgtggatgacaagcagttggactttcacagcagcaaggaattatcttcaagcacagaggaaagcaaagatccttcatcagaaaagagtcagctacat

SEQ ID NO: 4910 - DNA, 3024 bp, Homo sapiens
  source 1..3024: mol_type = genomic DNA
atgtcctggatgttcaagagggatccagtttggaagtacttgcagactgtccagtatggagttcatggaaattttccacgcctctcatatccaactttctttccacgttttgaattccaagatgttatccctccagatgactttctaactagtgatgaagaagtagattccgttttatttggaagtttgagaggtcatgtggttggactacgctattacacgggagtagttaataataatgaaatggttgcattacaacgagatcctaataacccttatgataagaatgcaattaaagtaaacaatgtgaatggaaatcaagttggccatttaaagaaagagcttgcaggtgctttggcctatatcatggacaacaaattggcacaaattgaaggggtagttccttttggtgcaaacaatgcttttaccatgcctctgcatatgactttttggggaaaagaagaaaatagaaaagcggtttcagatcagttgaagaaacatggatttaaattgggtcctgcaccaaaaactttaggattcaatttggaaagtggttggggctctggaagagctggaccaagctatagtatgccagtgcatgctgcagtacagatgacaactgaacagcttaaaacagaatttgacaaattgtttgaagatttaaaagaagatgataaaacccatgaaatggaaccagctgaggctattgaaacaccactgcttccacatcaaaaacaagctctagcttggatggtgtcacgggaaaatagcaaagaacttccaccattctgggaacagcgaaatgacttatactataacacaataacaaatttttctgagaaggaccgaccagaaaatgtccatggaggaattttagctgatgatatgggtttgggtaaaactcttacggccattgcagtaatccttaccaacttccatgatggcagacctcttcctattgaaagagttaaaaagaatctactgaagaaggaatataatgttaacgatgactctatgaaacttggaggaaacaataccagtgaaaaggcagatggactaagcaaagacgcatctagatgtagtgaacaacccagtatttcagatatcaaggagaagagtaagtttcgcatgtcagaattgtctagctcccgccccaaaagaagaaaaactgctgtccagtacatagaaagcagtgattcagaggaaattgaaacaagtgaattgccgcagaaaatgaaaggcaaactgaaaaatgtacagtctgaaactaaaggcagggcgaaaggatcttctaaggttatagaagatgtggcatttgcatgtgcattaacttcatctgttcctacaacaaaaaagaaaatgttgaaaaagggagcttgtgcagtggaggggtcaaagaaaactgatgttgaggagagaccaagaacaacactgatcatctgtccgctttctgtgttaagcaactggattgaccagtttggacaacatataaaatcagatgtacacttgaatttttatgtttattatggtcctgatcgtattagagaaccggccttactttcaaaacaggatattgttttgactacgtataatattttaactcatgactatggaactaaaggagatagtccattacatagcataaggtggctaagagtgatcctggatgaaggacatgccatacgaaatccaaatgctcagcagacaaaagctgtacttgacttagaatcagaaagaagatgggttttgacaggtactccaatccagaattctttaaaggacttgtggtctcttctttcctttttaaaacttaaaccatttattgatagagaatggtggcatagaacaatacagcgtcctgtcacaatgggagatgaaggaggacttaggcgtttacagtccctaattaaaaatattacacttagaagaacaaagacaagcaaaattaaaggaaaacctgttttggagttaccagaacgtaaagtatttattcagcacattacactttcagatgaagagagaaagatttatcagtctgtgaaaaatgaaggcagagccactattggaaggtattttaatgaagggactgtcctggcacattatgcagatgtcctgggtcttttgcttagactgcggcaaatttgttgccatacttaccttcttacaaatgcagtgtcttccaatggcccctcaggaaatgatacacctgaagaactgagaaagaagttaataaggaagatgaagttaattctgagctcaggttcagatgaggaatgtgcaatttgcctggattctttaacagttcctgtgataacacattgtgcacatgtattttgtaaaccctgtatttgccaagtcattcagaatgagcagccacatgctaaatgccctttatgcagaaatgatatacatgaagataatttattagaatgtcctccagaagaattagcacgtgacagtgagaaaaagtctgatatggaatggacatccagttcaaagattaatgcgctaatgcacgcattgactgacttaagaaagaagaatcccaacataaaaagtttggttgtttctcagtttacaacattcctgtctttaatagaaataccacttaaagcctctggatttgtgtttactcgtttggatggttccatggcccaaaagaaaagagttgaatcaattcagtgttttcaaaacactgaagcaggatctccaactataatgcttctgtccttaaaagcaggtggagttggtttgaatctgtctgcagcttctcgagtgtttttaatggatccagcctggaatcctgctgctgaagatcagtgctttgacagatgccatagacttggtcagaagcaagaagttatcatcacaaaattcattgtaaaggactctgttgaagaaaatatgctgaaaatacaaaacaaaaagagagaacttgcagcaggagcctttggaactaaaaaaccaaatgctgacgaaatgaaacaagccaaaattaatgaaatcagaacattaattgactta

SEQ ID NO: 4911 - DNA, 3027 bp, Homo sapiens
  source 1..3027: mol_type = genomic DNA
atgtcctggatgttcaagagggatccagtttggaagtacttgcagactgtccagtatggagttcatggaaattttccacgcctctcatatccaactttctttccacgttttgaattccaagatgttatccctccagatgactttctaactagtgatgaagaagtagattccgttttatttggaagtttgagaggtcatgtggttggactacgctattacacgggagtagttaataataatgaaatggttgcattacaacgagatcctaataacccttatgataagaatgcaattaaagtaaacaatgtgaatggaaatcaagttggccatttaaagaaagagcttgcaggtgctttggcctatatcatggacaacaaattggcacaaattgaaggggtagttccttttggtgcaaacaatgcttttaccatgcctctgcatatgactttttggggaaaagaagaaaatagaaaagcggtttcagatcagttgaagaaacatggatttaaattgggtcctgcaccaaaaactttaggattcaatttggaaagtggttggggctctggaagagctggaccaagctatagtatgccagtgcatgctgcagtacagatgacaactgaacagcttaaaacagaatttgacaaattgtttgaagatttaaaagaagatgataaaacccatgaaatggaaccagctgaggctattgaaacaccactgcttccacatcaaaaacaagctctagcttggatggtgtcacgggaaaatagcaaagaacttccaccattctgggaacagcgaaatgacttatactataacacaataacaaatttttctgagaaggaccgaccagaaaatgtccatggaggaattttagctgatgatatgggtttgggtaaaactcttacggccattgcagtaatccttaccaacttccatgatggcagacctcttcctattgaaagagttaaaaagaatctactgaagaaggaatataatgttaacgatgactctatgaaacttggaggaaacaataccagtgaaaaggcagatggactaagcaaagacgcatctagatgtagtgaacaacccagtatttcagatatcaaggagaagagtaagtttcgcatgtcagaattgtctagctcccgccccaaaagaagaaaaactgctgtccagtacatagaaagcagtgattcagaggaaattgaaacaagtgaattgccgcagaaaatgaaaggcaaactgaaaaatgtacagtctgaaactaaaggcagggcgaaagcaggatcttctaaggttatagaagatgtggcatttgcatgtgcattaacttcatctgttcctacaacaaaaaagaaaatgttgaaaaagggagcttgtgcagtggaggggtcaaagaaaactgatgttgaggagagaccaagaacaacactgatcatctgtccgctttctgtgttaagcaactggattgaccagtttggacaacatataaaatcagatgtacacttgaatttttatgtttattatggtcctgatcgtattagagaaccggccttactttcaaaacaggatattgttttgactacgtataatattttaactcatgactatggaactaaaggagatagtccattacatagcataaggtggctaagagtgatcctggatgaaggacatgccatacgaaatccaaatgctcagcagacaaaagctgtacttgacttagaatcagaaagaagatgggttttgacaggtactccaatccagaattctttaaaggacttgtggtctcttctttcctttttaaaacttaaaccatttattgatagagaatggtggcatagaacaatacagcgtcctgtcacaatgggagatgaaggaggacttaggcgtttacagtccctaattaaaaatattacacttagaagaacaaagacaagcaaaattaaaggaaaacctgttttggagttaccagaacgtaaagtatttattcagcacattacactttcagatgaagagagaaagatttatcagtctgtgaaaaatgaaggcagagccactattggaaggtattttaatgaagggactgtcctggcacattatgcagatgtcctgggtcttttgcttagactgcggcaaatttgttgccatacttaccttcttacaaatgcagtgtcttccaatggcccctcaggaaatgatacacctgaagaactgagaaagaagttaataaggaagatgaagttaattctgagctcaggttcagatgaggaatgtgcaatttgcctggattctttaacagttcctgtgataacacattgtgcacatgtattttgtaaaccctgtatttgccaagtcattcagaatgagcagccacatgctaaatgccctttatgcagaaatgatatacatgaagataatttattagaatgtcctccagaagaattagcacgtgacagtgagaaaaagtctgatatggaatggacatccagttcaaagattaatgcgctaatgcacgcattgactgacttaagaaagaagaatcccaacataaaaagtttggttgtttctcagtttacaacattcctgtctttaatagaaataccacttaaagcctctggatttgtgtttactcgtttggatggttccatggcccaaaagaaaagagttgaatcaattcagtgttttcaaaacactgaagcaggatctccaactataatgcttctgtccttaaaagcaggtggagttggtttgaatctgtctgcagcttctcgagtgtttttaatggatccagcctggaatcctgctgctgaagatcagtgctttgacagatgccatagacttggtcagaagcaagaagttatcatcacaaaattcattgtaaaggactctgttgaagaaaatatgctgaaaatacaaaacaaaaagagagaacttgcagcaggagcctttggaactaaaaaaccaaatgctgacgaaatgaaacaagccaaaattaatgaaatcagaacattaattgactta

SEQ ID NO: 4912 - DNA, 612 bp, Homo sapiens
  source 1..612: mol_type = genomic DNA
atggccgaagacacctattcacacaagatggtaaaaacaaatcataggcgctgtcgcacaaaattcacagaagaacagttgaaaatcctcatcaataccttcaatcaaaagccttacccaggttatgctaccaaacaaaaacttgctttagaaatcaatacagaagagtccagaatccagatttggtttcagaatcgaagagctaggcacggattccagaaaagaccagaagctgagactttagaatcaagccagagccaggggcaagatcaacctggtgtggagtttcaaagtagagaagccagacggtgtcgtaccacctacagcgcctctcagttacacactctcatcaaggcatttatgaaaaacccatatcctgggattgattccagagaagaacttgctaaagaaatcggtgttccagagtcaagagtccaaatttggttccaaaatcgaagatctagattacttctccagagaaaaagggaacctgtggcgtccttagaacaagaagagcagggcaagattcctgagggactgcaaggtgcagaagatacacaaaatggcaccaacttcactagtgactctcatttctctggagccagaacgtgg

SEQ ID NO: 4913 - DNA, 1215 bp, Homo sapiens
  source 1..1215: mol_type = genomic DNA
atggcggctgtggtggagaatgtagtgaagctccttggggagcagtactacaaagatgccatggagcagtgccacaattacaatgctcgcctctgtgctgagcgcagcgtgcgcctgcctttcttggactcacagaccggagtagcccagagcaattgttacatctggatggaaaagcgacaccggggtccaggattggcctccggacagctgtactcctaccctgcccggcgctggcggaaaaagcggcgagcccatccccctgaggatccacgactttccttcccatctattaagccagacacagaccagaccctgaagaaggaggggctgatctctcaggatggcagtagtttagaggctctgttgcgcactgaccccctggagaagcgaggtgccccggatccccgagttgatgatgacagcctgggcgagtttcctgtgaccaacagtcgagcgcgaaagcggatcctagaaccagatgacttcctggatgacctcgatgatgaagactatgaagaagatactcccaagcgtcggggaaaggggaaatccaagggtaagggtgtgggcagtgcccgtaagaagctggatgcttccatcctggaggaccgggataagccctatgcctgtgacaatagtttcaaacaaaagcatacctcgaaagcgccccagagagtttgtggaaaacgttacaagaaccgaccaggcctcagttaccactatgcccactcccacttggctgaggaggagggcgaggacaaggaagactctcaaccacccactcctgtttcccagaggtctgaggagcagaaatccaaaaagggtcctgatggattggccttgcccaacaactactgtgacttctgcctgggggactcaaagattaacaagaagacgggacaacccgaggagctggtgtcctgttctgactgtggccgctcagggcatccatcttgcctccaatttacccccgtgatgatggcggcagtgaagacataccgctggcagtgcatcgagtgcaaatgttgcaatatctgcggcacctccgagaatgacgaccagttgctcttctgtgatgactgcgatcgtggctaccacatgtactgtctcaccccgtccatgtctgagccccctgaaggaagttggagctgccacctgtgtctggacctgttgaaagagaaagcttccatctaccagaaccagaactcctct

SEQ ID NO: 4914 - DNA, 957 bp, Homo sapiens
  source 1..957: mol_type = genomic DNA
atggtaaaagcaatccaggttttgcgcattcatcttcttgagctggaaaaggttaacgaactctgcaaagatttctgcagtcgatacattgcttgtctgaaaacaaaaatgaacagtgaaactctgttgagtggagagcctggaagcccgtactcaccagtgcagtcccagcagattcaaagtgccatcacaggcaccatcagccctcagggaattgtggtgccggcgtccgcgctgcagcagggaaacgtagccatggcgacggtggcaggtggcacagtgtatcagcctgtcacggtcgtcactccccaaggccaagtggtcacacagacattgtcgcctgggacaattaggatccagaactcccagcttcagttacagttaaaccaagatctcagcatcttgcatcaagatgatggttcatctaagaacaagaggggcgtcctgccaaagcatgccacgaacgtgatgcggtcctggctcttccagcacatcgggcatccctacccaacagaggatgagaaaaaacagattgctgctcagacaaatttgacactactccaagtcaacaactggttcatcaatgccagaagacgaattcttcagccaatgttggattcaagttgttcagagacccccaaaacaaagaaaaaaactgctcagaaccggccagttcagaggttttggcctgattctattgcatcaggagtcgcacagccaccgccgagcgagctcaccatgtcggaaggagctgttgtcaccatcaccacgcccgtgaacatgaacgtggacagccttcagtctctgtcctcggacggggccaccctggcggtgcagcaggtcatgatggcagggcagagcgaggacgagtctgtggacagcacagaggaggatgcgggtgccctggcccctgcccacatcagcgggctggtcttggagaacagtgactccctgcag

SEQ ID NO: 4915 - DNA, 1233 bp, Homo sapiens
  source 1..1233: mol_type = genomic DNA
atgctcagcctcagggagcaacagctgcaggtgtggttcaagaatcgccgcgccaaactagctcgggagcggcggctccagcagcagccccagcgcgtccctgggcagagaggccgaggagcccgcgctgcgcccctagtccctgcagcctctgcctccgcacctcagcggggcccctcgggaatccttccagcggcggaacccacgatctgcagcctccaccaggcctggggtggccctgggtgcagagcccagaagggcatcccagctgccctgagtccaggccctggcccgatccctgccccaatcccaggcccagcccagatcccaggcccactccctggctcaattccaggcccaattccaggcccagctcagatcccaagcccgatcccagccccaatcccaggcccaatttcaggcccagtccagatcccaggcccattccgtggcccaatcccaggcccaatttcaggcccagccccgatcccaggcccaatctcaggcccattctcaggcccaaacccaggcccgatcccaggcccaaacccaggcccgatcccaggcccaatctcaggcccgatcccaggcccaatctcagtcccgatcccaggcccgatcccaggcccaatctcaggcccaatctcaggcccaaacccaggcccgatcccaggcccaatcccaggcccaatctcaggcccgaacccaggcccgatcccaggcccaatctcaggcccgaacccaggcctgatcccaggcccaatcccaggcccaatctcaggcccaggcccaattataggcccgattcccagcccagcccagatcccaggcccaggcagactccaaggcccaggtcccatcttaagtcctggccggatgcgaagccctggctcacttccaggcctagccccgattttaggcccaggctcaggcccaggctcaggctcagtcccagctccaatcccaggcccaggatcactcccagccccagcccccttatggcctcagagccccgatgcctccgacttcttgccagacacccagttattccctcacttcacagagctgctcctacccctagaccccttggagggatcctcagtctccaccatgacctctcagtaccaagaaggggatgactctatgggcaaaaaacactcagggtctcagccccaagaggagggtggctctgtgaatgaaaatcactcaggccccaggttattactggattta

SEQ ID NO: 4916 - DNA, 1497 bp, Homo sapiens
  source 1..1497: mol_type = genomic DNA
atgggaccattgcaatttagagatgtggccatagaattctctctggaggagtggcattgcctggacactgcacagcggaatttatatagggatgtgatgttagagaactacagaaacttggtcttccttggtattgttgtctctaagccagacctggttacctgtctggagcaaggaaaaaaacctttaactatggaaagacatgagatgattgccaaacccccagttatgagttctcattttgcccaagacctttggccagagaacatacaaaattctttccaaatagggatgctgagaagatatgaagaatgcagacatgacaatttacagttaaaaaaaggctgtaaaagcgtgggtgagcataaggtgcacaaaggaggttataatggacttaaccaatgtttgacaactacccagaaagaaatatttcaatgtgataaatatggaaaagtctttcataagttttcaaattcaaacacatataagacaagacatactggaataaatcttttcaaatgtataatatgtggcaaagcttttaaacggtcctcaacccttactacacataagaaaattcatactggagagaaaccttacagatgtgaagaatgtggcaaagcttttaaccaatctgcaaaccttactacacataagagaattcataccggagagaaaccctacagatgtgaagaatgtggcaaagcctttaagcagtcctcaaaccttactacacataagaaaattcatactggagagaaaccctacaaatgtgaagaatgtggcaaagccttcaaccgatccacagaccttactacacataagatagttcatactggagagaaaccctacaaatgtgaagaatgtggcaaagcctttaagcacccctcacacgttaccacacataagaaaattcatactagagggaaaccctacaactgtgaagaatgtggcaaatcctttaagcactgctctaaccttactatacataagagaattcatacaggagagaaaccctacaaatgtgaagaatgtggcaaagcctttcacctatcctcacaccttactacacataagatacttcatactggagagaaaccctacagatgtagagaatgtggcaaagcttttaaccattccacaacccttttttcacatgagaaaattcatactggagagaaaccctacaaatgtgatgaatgtggcaaaacctttacctggccctcaatcctctccaaacataaaagaactcatactggagagaaaccctacaaatgtgaagaatgtggcaaatcctttactgcatcctcaactctaactacacataagagaattcatactggagagaaaccttacaaatgtgaagaatgtggcaaagcttttaactggtcctcagaccttaataaacataagaaaattcatattgaacgaaaaccctacatagtgaagaatgtgacagatcttttaaatgttcctccacttttaattagcataaga

SEQ ID NO: 4917 - DNA, 1722 bp, Homo sapiens
  source 1..1722: mol_type = genomic DNA
atggcagcggctgtgccgaggcgcccaactcagggcactgtgacctttgaagatgtggctgtgaacttttcccaggaggagtggtgtcttcttagtgaggctcagaggtgcttgtaccgtgatgtgatgctagagaacctggctctcatatcctcgctgggttgttggtgtggatcaaaagatgaggaggcaccttgtaagcagagaatttctgtacaaagagagtctcagagcaggactcctagggcaggtgtttctcctaagaaggctcacccctgtgaaatgtgtggcctcatcttggaggatgtttttcactttgctgaccaccaggaaactcatcacaagcagaagctgaacaggagtggagcatgtggaaaaaacttggatgacactgcataccttcatcagcaccagaagcagcatattggagagaaattctacagaaagagtgtcagagaagcatcgtttgtaaagaaacgtaagctcagggtgtcacaggagccatttgtcttccgcgagtttgggaaggacgttctgcccagttcaggattgtgccaagaagaagctgctgtagagaagacagacagtgaaactatgcatggcccaccctttcaggagggaaaaactaattacagttgtggaaaacgcacaaaagccttcagcaccaaacactcagttattccacaccagaaacttttcactagagatggatgttatgtgtgcagtgattgtggaaaatcctttagcagatatgtcagcttcagtaatcatcagcgagatcacactgcaaaaggaccttatgattgtggagagtgtgggaaatcttatagtcgaaagagcagccttattcaacatcagcgagtccacactggacagacagcttatccctgtgaggagtgcgggaaatcttttagtcagaagggcagccttattagccatcagcttgttcacactggagaagggccttatgagtgtagagaatgtgggaaatcttttggtcaaaagggtaacctcattcaacatcagcaaggtcacactggagagagagcttatcactgtggggaatgtgggaaatcttttcgtcagaagttctgctttattaaccatcagcgtgttcacactggagaaaggccttacaagtgtggagaatgtgggaaatcttttggtcaaaagggcaacctcgttcaccatcagcgaggtcatactggagaaaggccctatgagtgcaaggaatgtgggaaatcatttaggtacagatcccacctcactgaacaccagagacttcacactggggaaagaccttacaattgtagggaatgtgggaaattatttaacaggaagtatcatcttctggttcatgagagagttcacactggagaaaggccatatgcgtgtgaggtatgtgggaaattatttggcaataagcacagcgtgactatacatcagaggattcacactggagaaaggccgtatgaatgcagtgaatgtgggaaatcatttctttccagctctgcgcttcatgttcataaaagagttcattctggacaaaagccttataagtgcagtgaatgtggaaaatccttttctgaatgttccagtctcattaaacacaggagaattcacactggagaaaggccttatgaatgcaccaaatgtggaaaaacatttcagcgaagctctaccctccttcatcatcagagttcacacaggagaaaggcctta

SEQ ID NO: 4918 - DNA, 1725 bp, Homo sapiens
  source 1..1725: mol_type = genomic DNA
atggcagcggctgtgccgaggcgcccaactcagcagggcactgtgacctttgaagatgtggctgtgaacttttcccaggaggagtggtgtcttcttagtgaggctcagaggtgcttgtaccgtgatgtgatgctagagaacctggctctcatatcctcgctgggttgttggtgtggatcaaaagatgaggaggcaccttgtaagcagagaatttctgtacaaagagagtctcagagcaggactcctagggcaggtgtttctcctaagaaggctcacccctgtgaaatgtgtggcctcatcttggaggatgtttttcactttgctgaccaccaggaaactcatcacaagcagaagctgaacaggagtggagcatgtggaaaaaacttggatgacactgcataccttcatcagcaccagaagcagcatattggagagaaattctacagaaagagtgtcagagaagcatcgtttgtaaagaaacgtaagctcagggtgtcacaggagccatttgtcttccgcgagtttgggaaggacgttctgcccagttcaggattgtgccaagaagaagctgctgtagagaagacagacagtgaaactatgcatggcccaccctttcaggagggaaaaactaattacagttgtggaaaacgcacaaaagccttcagcaccaaacactcagttattccacaccagaaacttttcactagagatggatgttatgtgtgcagtgattgtggaaaatcctttagcagatatgtcagcttcagtaatcatcagcgagatcacactgcaaaaggaccttatgattgtggagagtgtgggaaatcttatagtcgaaagagcagccttattcaacatcagcgagtccacactggacagacagcttatccctgtgaggagtgcgggaaatcttttagtcagaagggcagccttattagccatcagcttgttcacactggagaagggccttatgagtgtagagaatgtgggaaatcttttggtcaaaagggtaacctcattcaacatcagcaaggtcacactggagagagagcttatcactgtggggaatgtgggaaatcttttcgtcagaagttctgctttattaaccatcagcgtgttcacactggagaaaggccttacaagtgtggagaatgtgggaaatcttttggtcaaaagggcaacctcgttcaccatcagcgaggtcatactggagaaaggccctatgagtgcaaggaatgtgggaaatcatttaggtacagatcccacctcactgaacaccagagacttcacactggggaaagaccttacaattgtagggaatgtgggaaattatttaacaggaagtatcatcttctggttcatgagagagttcacactggagaaaggccatatgcgtgtgaggtatgtgggaaattatttggcaataagcacagcgtgactatacatcagaggattcacactggagaaaggccgtatgaatgcagtgaatgtgggaaatcatttctttccagctctgcgcttcatgttcataaaagagttcattctggacaaaagccttataagtgcagtgaatgtggaaaatccttttctgaatgttccagtctcattaaacacaggagaattcacactggagaaaggccttatgaatgcaccaaatgtggaaaaacatttcagcgaagctctaccctccttcatcatcagagttcacacaggagaaaggcctta

SEQ ID NO: 4919 - DNA, 1722 bp, Homo sapiens
  source 1..1722: mol_type = genomic DNA
atgtgtcctcattttgctcaagacctttggccagagcagggcatggaagattcttttcaaaaagcaatactgagaagatatggaaaatatggacatgagaatttacagttaagaaaaggctgtaaaagtgtggatgagtataaggtgaacaaagaaggttataatggacttaaccagtgtttcacaactgcccagagcaaagtatttcaatgtgataaatatttgaaagtcttctataaatttttaaattcaaacagacctaagataagacatactgaaaagaaatctttcaaatgtaaaaaacgtgtcaaattattttgcatgctttcacataaaacccaacacaaaagcatttatcatagagagaagtcctacaaatgtaaagaatgtggaaaaacctttaattggtcctcaacccttactaatcataggaaaatttatactgaagagaaaccttacaaatgtgaagaatataacaaatctcctaagcaactctcaacccttactacacatgaaataattcatgctggagagaaactctacaaatgtgaagaatgtggtgaagcttttaatcgatcctcaaatcttactacacataagataattcatactggagagaaaccttacaagtgtgaagaatgtggcaaagcatttatctggtcctcaacccttactgagcataagaaaattcatactagaaagaaaccctacaagtgtgaagaatgtggcaaagcatttatatggtcctcaacactaactagacataagaggatgcacactggagagaaaccctacaaatgtgaagaatgtggcaaagcttttagccagtcctcaacccttactacacataagataattcatactggagagaaacgctacaaatgcttagaatgtggcaaagcttttaagcaactctcaactcttactacacataaaataattcatgttggagagaaactctacaaatgtgaagaatgcggcaaaggttttaatcgatcttcaaatcttactacacataagataattcatactggagagaaaccttacaagtgtgaagaatgtggcaaagcatttatctggtcctcaacccttactaaacataagagaattcatactagagagaaaccctacaaatgtgaagaatgtggcaaggcatttatatggtcctcaaccctaactagacataagaggatgcacactggagagaaaccctacaaatgtgaagaatgtggcaaatcttttagccaatcctcaacccttactacacataagataattcatactggagagaaaccctacaaatgtgaagaatgtggcaaagcctttaactggtcctcaactcttactaaacataagataattcatactgaagagaaaccctacaaatgtgaaaaatgtggcaaagcctttaagcagtcttcaatccttactaaccataagagaattcatactggagagaaaccctataaatgtgaagaatgtggcaaatcttttaaccggtcttcaacttttactaaacataaggtaattcatactggagtaaaaccctacaaatgtgaagaatgtggcaaagcatttttctggtcctcaaccctaactaaacataagagaattcatactggagagcaaccctacaaatgggaaaaatttggcaaagcctttaatcggtcctcgcacctcaccacagataagataactcattggagagaaatcttacaagta

SEQ ID NO: 4920 - DNA, 1758 bp, Homo sapiens
  source 1..1758: mol_type = genomic DNA
atgaagcgacatgagatggtggatgaacccccaggtatgtgtcctcattttgctcaagacctttggccagagcagggcatggaagattcttttcaaaaagcaatactgagaagatatggaaaatatggacatgagaatttacagttaagaaaaggctgtaaaagtgtggatgagtataaggtgaacaaagaaggttataatggacttaaccagtgtttcacaactgcccagagcaaagtatttcaatgtgataaatatttgaaagtcttctataaatttttaaattcaaacagacctaagataagacatactgaaaagaaatctttcaaatgtaaaaaacgtgtcaaattattttgcatgctttcacataaaacccaacacaaaagcatttatcatagagagaagtcctacaaatgtaaagaatgtggaaaaacctttaattggtcctcaacccttactaatcataggaaaatttatactgaagagaaaccttacaaatgtgaagaatataacaaatctcctaagcaactctcaacccttactacacatgaaataattcatgctggagagaaactctacaaatgtgaagaatgtggtgaagcttttaatcgatcctcaaatcttactacacataagataattcatactggagagaaaccttacaagtgtgaagaatgtggcaaagcatttatctggtcctcaacccttactgagcataagaaaattcatactagaaagaaaccctacaagtgtgaagaatgtggcaaagcatttatatggtcctcaacactaactagacataagaggatgcacactggagagaaaccctacaaatgtgaagaatgtggcaaagcttttagccagtcctcaacccttactacacataagataattcatactggagagaaacgctacaaatgcttagaatgtggcaaagcttttaagcaactctcaactcttactacacataaaataattcatgttggagagaaactctacaaatgtgaagaatgcggcaaaggttttaatcgatcttcaaatcttactacacataagataattcatactggagagaaaccttacaagtgtgaagaatgtggcaaagcatttatctggtcctcaacccttactaaacataagagaattcatactagagagaaaccctacaaatgtgaagaatgtggcaaggcatttatatggtcctcaaccctaactagacataagaggatgcacactggagagaaaccctacaaatgtgaagaatgtggcaaatcttttagccaatcctcaacccttactacacataagataattcatactggagagaaaccctacaaatgtgaagaatgtggcaaagcctttaactggtcctcaactcttactaaacataagataattcatactgaagagaaaccctacaaatgtgaaaaatgtggcaaagcctttaagcagtcttcaatccttactaaccataagagaattcatactggagagaaaccctataaatgtgaagaatgtggcaaatcttttaaccggtcttcaacttttactaaacataaggtaattcatactggagtaaaaccctacaaatgtgaagaatgtggcaaagcatttttctggtcctcaaccctaactaaacataagagaattcatactggagagcaaccctacaaatgggaaaaatttggcaaagcctttaatcggtcctcgcacctcaccacagataagataactcattggagagaaatcttacaagta

SEQ ID NO: 4921 - DNA, 1854 bp, Homo sapiens
  source 1..1854: mol_type = genomic DNA
atgttagagaactacagaaacctggccttcctgggtattgctgtctctaagccagacctgatcacctgtctggaacaagggaaagagccctggaatatgaagcgacatgagatggtggatgaacccccaggtatgtgtcctcattttgctcaagacctttggccagagcagggcatggaagattcttttcaaaaagcaatactgagaagatatggaaaatatggacatgagaatttacagttaagaaaaggctgtaaaagtgtggatgagtataaggtgaacaaagaaggttataatggacttaaccagtgtttcacaactgcccagagcaaagtatttcaatgtgataaatatttgaaagtcttctataaatttttaaattcaaacagacctaagataagacatactgaaaagaaatctttcaaatgtaaaaaacgtgtcaaattattttgcatgctttcacataaaacccaacacaaaagcatttatcatagagagaagtcctacaaatgtaaagaatgtggaaaaacctttaattggtcctcaacccttactaatcataggaaaatttatactgaagagaaaccttacaaatgtgaagaatataacaaatctcctaagcaactctcaacccttactacacatgaaataattcatgctggagagaaactctacaaatgtgaagaatgtggtgaagcttttaatcgatcctcaaatcttactacacataagataattcatactggagagaaaccttacaagtgtgaagaatgtggcaaagcatttatctggtcctcaacccttactgagcataagaaaattcatactagaaagaaaccctacaagtgtgaagaatgtggcaaagcatttatatggtcctcaacactaactagacataagaggatgcacactggagagaaaccctacaaatgtgaagaatgtggcaaagcttttagccagtcctcaacccttactacacataagataattcatactggagagaaacgctacaaatgcttagaatgtggcaaagcttttaagcaactctcaactcttactacacataaaataattcatgttggagagaaactctacaaatgtgaagaatgcggcaaaggttttaatcgatcttcaaatcttactacacataagataattcatactggagagaaaccttacaagtgtgaagaatgtggcaaagcatttatctggtcctcaacccttactaaacataagagaattcatactagagagaaaccctacaaatgtgaagaatgtggcaaggcatttatatggtcctcaaccctaactagacataagaggatgcacactggagagaaaccctacaaatgtgaagaatgtggcaaatcttttagccaatcctcaacccttactacacataagataattcatactggagagaaaccctacaaatgtgaagaatgtggcaaagcctttaactggtcctcaactcttactaaacataagataattcatactgaagagaaaccctacaaatgtgaaaaatgtggcaaagcctttaagcagtcttcaatccttactaaccataagagaattcatactggagagaaaccctataaatgtgaagaatgtggcaaatcttttaaccggtcttcaacttttactaaacataaggtaattcatactggagtaaaaccctacaaatgtgaagaatgtggcaaagcatttttctggtcctcaaccctaactaaacataagagaattcatactggagagcaaccctacaaatgggaaaaatttggcaaagcctttaatcggtcctcgcacctcaccacagataagataactcattggagagaaatcttacaagta

SEQ ID NO: 4922 - DNA, 1848 bp, Homo sapiens
  source 1..1848: mol_type = genomic DNA
atgtcgaggcgcaagcaggcgaaaccccagcacatcaactcggaggaggaccagggcgagcagcagccgcagcagcagaccccggagtttgcagatgcggccccagcggcgcccgcggcgggggagctgggtgctccagtgaaccacccagggaatgacgaggtggcgagtgaggatgaagccacagtaaagcggcttcgtcgggaggagacgcacgtctgtgagaaatgctgtgcggagttcttcagcatctctgagttcctggaacataagaaaaattgcactaaaaatccacctgtcctcatcatgaatgacagcgaggggcctgtgccttcagaagacttctccggagctgtactgagccaccagcccaccagtcccggcagtaaggactgtcacagggagaatggcggcagctcagaggacatgaaggagaagccggatgcggagtctgtggtgtacctaaagacagagacagccctgccacccaccccccaggacataagctatttagccaaaggcaaagtggccaacactaatgtgaccttgcaggcactacggggcaccaaggtggcggtgaatcagcggagcgcggatgcactccctgcccccgtgcctggtgccaacagcatcccgtgggtcctcgagcagatcttgtgtctgcagcagcagcagctacagcagatccagctcaccgagcagatccgcatccaggtgaacatgtgggcctcccacgccctccactcaagcggggcaggggccgacactctgaagaccttgggcagccacatgtctcagcaggtttctgcagctgtggctttgctcagccagaaagctggaagccaaggtctgtctctggatgccttgaaacaagccaagctacctcacgccaacatcccttctgccaccagctccctgtccccagggctggcacccttcactctgaagccggatgggacccgggtgctcccgaacgtcatgtcccgcctcccgagcgctttgcttcctcaggccccgggctcggtgctcttccagagccctttctccactgtggcgctagacacatccaagaaagggaaggggaagccaccgaacatctccgcggtggatgtcaaacccaaagacgaggcggccctctacaagcacaagtgtcggagcagtctcccttccacgtttatccgagccccgccgacctatgtcaaggttgaagttcctggcacatttgtgggaccctcgacattgtccccagggatgacccctttgttagcagcccagccacgccgacaggccaagcaacatggctgcacacggtgtgggaagaacttctcgtctgctagcgctcttcagatccacgagcggactcacactggagagaagccttttgtgtgcaacatttgtgggcgagcttttaccaccaaaggcaacttaaaggttcactacatgacacacggggcgaacaataactcagcccgccgtggaaggaagttggccatcgagaacaccatggctctgttaggtacggacggaaaaagagtctcagaaatctttcccaaggaaatcctggccccttcagtgaatgtggaccctgttgtgtggaaccagtacaccagcatgctcaatggcggtctggccgtgaagaccaatgagatctctgtgatccagagtgggggggttcctaccctcccggtttccttgggggccacctccgttgtgaataacgccactgtctccaagatggatggctcccagtcgggtatcagtgcagatgtggaaaaaccaagtgctactgacggcgttcccaaacaccagtttcctcacttcctggaagaaaacaagattgcggtcagc

SEQ ID NO: 4923 - DNA, 3681 bp, Homo sapiens
  source 1..3681: mol_type = genomic DNA
atgaatgacacagttaacaaaacagatcaagtggactgcagcgacctttcagaacacaacggacttgacagggaagagtccatggaggtggaggccccggttgctaacaaaagcggcagcggcacttccagcggcagccacagcagtaccgccccaagcagcagcagcagcagcagcagcagcagcggcggcggcggcagctcctccacaggtacctcagcgatcacaacctctctacctcaactcggggacctgacaacactgggcaacttctccgtaatcaacagcaacgtcatcatcgagaacctccagagcaccaaggtggcggtggcccagttctcccaggaagcgaggtgcggcggggcctctgggggcaagctggccgtcccagccctcatggaacaactcctagctctgcagcagcagcagatccaccagctgcaattgatcgaacagattcgtcaccaaatattgctgttggcttctcagaatgcagacttgccaacatcttctagtccttctcaaggtactttacgaacatctgccaaccccttgtccacgctaagttcccatttatctcagcagctggcagcagcagctggattggcacagagcctcgccagccaatctgccagcattagtggtgtgaaacagctacccccaatccagctacctcagagcagttctggcaacaccatcattccatccaacagcggctcttctcccaatatgaacatattggcagcggcagttaccaccccgtcctctgaaaaagtggcttcaagtgctggggcctcccatgtcagcaacccagcggtctcatcatcgtcctcaccagcttttgcaataagcagtttattaagtcctgcgtctaatccacttctacctcagcaagcctccgctaactcggttttccccagccctttgcccaacatcggaacaactgcagaggatttaaactccttgtctgccttggcccagcaaagaaaaagcaagccaccaaatgtcactgcctttgaagcgaaaagtacttccgatgaggcattcttcaaacacaagtgcaggttctgcgcgaaggtctttgggagtgacagtgccttgcagatccacttgcgttcccataccggagagaggccattcaagtgcaacatctgcgggaacaggttctccaccaaggggaatctgaaagtccactttcagcgccacaaagagaaataccctcatatccagatgaacccctatcctgtgcctgagcatttggacaatatccccacgagtactggcatcccatatggcatgtccatccctccagagaagccagtcaccagctggctagacaccaaaccagtcctgcctactctgaccacttcagtcggcctgccgttgcccccaaccctcccaagcctcatacccttcatcaagacggaagagccagcccccatccccatcagccattctgccaccagccccccaggctcagtcaaaagtgactccgggggccctgagtcagccacaagaaacctaggtgggctcccagaggaagccgaagggtccactctgccaccctctggtggcaaaagcgaagagagtggcatggtcaccaactcagtcccgacggcgagcagtagcgtcctgagctccccagcggcagactgcggccccgcgggcagtgccaccaccttcaccaaccctttgttgccgctcatgtccgagcagttcaaggccaagtttccttttgggggactcctggactcagctcaggcatcagagacgtccaagcttcagcaactggtagaaaacattgacaagaaggccactgaccccaatgagtgcatcatctgccaccgggttctcagctgccagagcgccttgaaaatgcactacaggacacacactggggagaggccctttaagtgtaagatctgtggccgggctttcaccacgaaagggaatcttaaaacccactacagtgtccatcgtgctatgcccccgctcagagtccagcattcctgccccatctgccagaagaagttcacgaacgctgtggtcctgcagcagcacatccgaatgcatatgggaggccagatccccaacaccccagtccccgacagctactctgagtccatggagtctgacacaggttcctttgatgagaaaaattttgatgacctagacaacttctctgatgaaaacatggaagactgtcctgagggcagcatccctgatacacctaagtctgcagacgcctcccaagacagcttatcctcttcgcctttgcccctcgagatgtcgagcatcgctgctttggaaaatcagatgaagatgatcaatgctggcctggcagagcagctacaggccagcctgaagtcagtggagaatgggtccatcgagggggatgtcctgaccaatgattcatcctcagtgggtggtgacatggaaagccaaagtgctggcagcccagccatctcagagtctacctcttccatgcaggctctgtccccgtccaacagcacgcaggagttccacaagtcacccagcattgaggagaaaccacagagagcggtcccaagcgagtttgccaatggtttgtctcccaccccagtgaatggtggggctttggatttgacatctagtcacgcagagaaaatcatcaaagaagattctttggggatcctcttcccttttagagaccggggtaaatttaaaaacactgcttgtgacatttgtggcaaaacatttgcttgtcagagtgccttggacattcactatagaagtcataccaaagagagaccatttatttgcacagtttgcaatcgtggcttttccacaaagggtaatttgaagcagcacatgttgacacatcagatgcgagatctgccatcccagctctttgagcccagttccaaccttggccccaatcagaactcagcggtgattcccgccaactcgttgtcatctctcatcaagacagaggtcaacggcttcgtgcatgtttctcctcaggacagtaaggacacccccaccagtcacgtcccgtctgggcctctgtcttcctctgccacatccccagttctgctccctgctctgcccaggagaactcccaagcagcactactgcaacacatgtggcaaaaccttctcctcatcgagtgccctgcagattcacgagagaactcacactggagagaaaccctttgcttgcactatttgtggaagagctttcacgactaaaggcaatcttaaggtacacatgggcactcacatgtggaatagcacccctgcacgacggggtcggcggctctctgtggatggccccatgacatttctaggaggcaatcccgtcaagttcccagaaatgttccagaaggatttggcggcaagatcaggaagtggggatccttccagcttctggaatcagtatgcagcagcgctctccaacgggctggcgatgaaggccaacgagatctccgtcattcagaacggtggcatccctccaattcctggaagcctcggcagtgggaacagctcacctgttagtgggctgacgggaaacctggagaggctccagaactcagagcccaatgctcccctggccggcctggagaaaatggcaagcagtgagaacggaaccaacttccgcttcacccgcttcgtggaggacagcaaggagatcgtcacgagt

SEQ ID NO: 4924 - DNA, 3972 bp, Homo sapiens
  source 1..3972: mol_type = genomic DNA
atgtcgcggaggaagcaagcgaagcctcaacatttccaatccgaccccgaagtggcctcgctcccccggcgagatggagacacagaaaagggtcaaccgagtcgccctactaagagcaaggatgcccacgtctgtggccggtgctgtgccgagttctttgaattatcagatcttctgctccacaagaagaactgtactaaaaatcaattagttttaatcgtaaatgaaaatccagcctccccacccgaaaccttctcccccagcccccctcctgataatcctgatgaacaaatgaatgacacagttaacaaaacagatcaagtggactgcagcgacctttcagaacacaacggacttgacagggaagagtccatggaggtggaggccccggttgctaacaaaagcggcagcggcacttccagcggcagccacagcagtaccgccccaagcagcagcagcagcagcagcagcagcagcggcggcggcggcagctcctccacaggtacctcagcgatcacaacctctctacctcaactcggggacctgacaacactgggcaacttctccgtaatcaacagcaacgtcatcatcgagaacctccagagcaccaaggtggcggtggcccagttctcccaggaagcgaggtgcggcggggcctctgggggcaagctggccgtcccagccctcatggaacaactcctagctctgcagcagcagcagatccaccagctgcaattgatcgaacagattcgtcaccaaatattgctgttggcttctcagaatgcagacttgccaacatcttctagtccttctcaaggtactttacgaacatctgccaaccccttgtccacgctaagttcccatttatctcagcagctggcagcagcagctggattggcacagagcctcgccagccaatctgccagcattagtggtgtgaaacagctacccccaatccagctacctcagagcagttctggcaacaccatcattccatccaacagcggctcttctcccaatatgaacatattggcagcggcagttaccaccccgtcctctgaaaaagtggcttcaagtgctggggcctcccatgtcagcaacccagcggtctcatcatcgtcctcaccagcttttgcaataagcagtttattaagtcctgcgtctaatccacttctacctcagcaagcctccgctaactcggttttccccagccctttgcccaacatcggaacaactgcagaggatttaaactccttgtctgccttggcccagcaaagaaaaagcaagccaccaaatgtcactgcctttgaagcgaaaagtacttccgatgaggcattcttcaaacacaagtgcaggttctgcgcgaaggtctttgggagtgacagtgccttgcagatccacttgcgttcccataccggagagaggccattcaagtgcaacatctgcgggaacaggttctccaccaaggggaatctgaaagtccactttcagcgccacaaagagaaataccctcatatccagatgaacccctatcctgtgcctgagcatttggacaatatccccacgagtactggcatcccatatggcatgtccatccctccagagaagccagtcaccagctggctagacaccaaaccagtcctgcctactctgaccacttcagtcggcctgccgttgcccccaaccctcccaagcctcatacccttcatcaagacggaagagccagcccccatccccatcagccattctgccaccagccccccaggctcagtcaaaagtgactccgggggccctgagtcagccacaagaaacctaggtgggctcccagaggaagccgaagggtccactctgccaccctctggtggcaaaagcgaagagagtggcatggtcaccaactcagtcccgacggcgagcagtagcgtcctgagctccccagcggcagactgcggccccgcgggcagtgccaccaccttcaccaaccctttgttgccgctcatgtccgagcagttcaaggccaagtttccttttgggggactcctggactcagctcaggcatcagagacgtccaagcttcagcaactggtagaaaacattgacaagaaggccactgaccccaatgagtgcatcatctgccaccgggttctcagctgccagagcgccttgaaaatgcactacaggacacacactggggagaggccctttaagtgtaagatctgtggccgggctttcaccacgaaagggaatcttaaaacccactacagtgtccatcgtgctatgcccccgctcagagtccagcattcctgccccatctgccagaagaagttcacgaacgctgtggtcctgcagcagcacatccgaatgcatatgggaggccagatccccaacaccccagtccccgacagctactctgagtccatggagtctgacacaggttcctttgatgagaaaaattttgatgacctagacaacttctctgatgaaaacatggaagactgtcctgagggcagcatccctgatacacctaagtctgcagacgcctcccaagacagcttatcctcttcgcctttgcccctcgagatgtcgagcatcgctgctttggaaaatcagatgaagatgatcaatgctggcctggcagagcagctacaggccagcctgaagtcagtggagaatgggtccatcgagggggatgtcctgaccaatgattcatcctcagtgggtggtgacatggaaagccaaagtgctggcagcccagccatctcagagtctacctcttccatgcaggctctgtccccgtccaacagcacgcaggagttccacaagtcacccagcattgaggagaaaccacagagagcggtcccaagcgagtttgccaatggtttgtctcccaccccagtgaatggtggggctttggatttgacatctagtcacgcagagaaaatcatcaaagaagattctttggggatcctcttcccttttagagaccggggtaaatttaaaaacactgcttgtgacatttgtggcaaaacatttgcttgtcagagtgccttggacattcactatagaagtcataccaaagagagaccatttatttgcacagtttgcaatcgtggcttttccacaaagggtaatttgaagcagcacatgttgacacatcagatgcgagatctgccatcccagctctttgagcccagttccaaccttggccccaatcagaactcagcggtgattcccgccaactcgttgtcatctctcatcaagacagaggtcaacggcttcgtgcatgtttctcctcaggacagtaaggacacccccaccagtcacgtcccgtctgggcctctgtcttcctctgccacatccccagttctgctccctgctctgcccaggagaactcccaagcagcactactgcaacacatgtggcaaaaccttctcctcatcgagtgccctgcagattcacgagagaactcacactggagagaaaccctttgcttgcactatttgtggaagagctttcacgactaaaggcaatcttaaggtacacatgggcactcacatgtggaatagcacccctgcacgacggggtcggcggctctctgtggatggccccatgacatttctaggaggcaatcccgtcaagttcccagaaatgttccagaaggatttggcggcaagatcaggaagtggggatccttccagcttctggaatcagtatgcagcagcgctctccaacgggctggcgatgaaggccaacgagatctccgtcattcagaacggtggcatccctccaattcctggaagcctcggcagtgggaacagctcacctgttagtgggctgacgggaaacctggagaggctccagaactcagagcccaatgctcccctggccggcctggagaaaatggcaagcagtgagaacggaaccaacttccgcttcacccgcttcgtggaggacagcaaggagatcgtcacgagt

SEQ ID NO: 4925 - DNA, 1689 bp, Homo sapiens
  source 1..1689: mol_type = genomic DNA
atgggaccactgacaattagggatgtgactgtagaattctctctggaggagtggcattgcctggacactgcacagcagaatttatatagggatgtgatgttagagaactacagaaacctggtcttcctgggtattgctgtctctaagccagacctgatcacctgtctggagcaaggaaaagagccctgtaatatgaagagacatgagatggtagccaaacccccagttatgtgttctcatattgctgaagacctttgcccagagcgagacataaaatattttttccaaaaagtcatactgaggagatatgataaatgtgaacatgagaatttacaattaagaaagggctgtaaaagtgtggatgagtgtaaggtgtgcaaaggaggttataatggacttaaccaatgtctgataactacccagagcaaaatgtatcaatgtgataaatatgtaaaagtcttctataagttttcaaattcagatagacataagataagacatactgaaaagaaaacttgcaaatgtaaagaatgtggcaaatcattttgcatgctttcacaactaactcgacataagagaattcatattagagagaattcccacaaatgtgaagaatgtggcaaagcctttaaccagtcctcagctcttactcgacataagatgactcatactggagagaaaccctacaaatgtgaagagtgtggaaaagcttttaaccggtcttcacaccttactcaacataaggtaattcatactagagagaaaccctacaaatgtgaagagtgtggcaaagcctttaaccggtcttcacacattactcaacataagagaattcataatagagagaagcccttcaaatatgatgaatgttgcaaagcctttaagtggtcctcagctcttactacccttactcaacataagagaattcatactggagagaaaccctacaaatgtgaagagtgtggcaaagcctttaaccagtcctcagcccttactcgacataagatgattcatactggagagaaacccttccaatgtgaagagtgtggcaaagcttttaaccggtcttcacaccttactcaacataagataattcatactaaagagaaaccctacaaatgtgaagagtgtggaaaagcctttaaccggtcttcacaccttactaaacataagagaattcatactagagagaaggcctacaaatgtgatgaatattgcaaagcttttaactggtcctcagctcttactacccttactcagcataagataattcatactggagagaaaccctacaaatgtgaagagtgtggcaaagcctttaaccggtcttcataccttattcgacataagataattcatactggagagaaaccctacaaatgtgaagagtgtggcaaagcctttaaccagtcttcacaccttactcaacataaaataattcatactggggagaagccctacaaatgtgaagaatgtggcaaagcctttaaccggtcttcacacctttctcaacataagataattcatactggagagaaaccctacaaatgtgaagaatgtggcaagccttttaatcgtttctcataccttaccgtacataagagaattcatgctggagagaaccccaacaaatatgaagaatgtggcaaagcttgtaaccattcctcaaaccttactaaacataattca

SEQ ID NO: 4926 - DNA, 3900 bp, Homo sapiens
  source 1..3900: mol_type = genomic DNA
atgtctcggcgcaagcaggccaagccccagcacctcaagtcggacgaggagctgctgccgcctgacggggctcccgagcacgccgccccgggggaaggtgcggaggacgcagacagcgggcccgagagccgcagcgggggcgaggagaccagcgtgtgcgagaaatgctgcgccgagttcttcaagtgggcggacttcctggagcaccagcggagctgcaccaagctcccgcccgtgctgatcgtgcacgaggacgcgcccgcgccgccccccgaggacttccccgagccttcgcccgccagctcccccagcgagcgcgccgaaagcgaggcggccgaggaggcgggtgcggagggcgcggagggcgaggccaggccggtggagaaggaggccgagcccatggacgcggaacccgcgggggacacgcgcgcgccccggcccccgcctgcggcccctgcacccccaacgcccgcctacggcgcgcccagcaccaacgtgaccctggaggcgctgctgagcaccaaggtggcggtggcgcagttctcgcagggcgcgcgcgcggcaggcggctcgggagcaggtggaggcgtggcagctgcagccgtgcccctgatcctggaacagctcatggccctgcagcagcagcagatccaccagctgcagctcatcgagcagatccgcagccaggtggccctcatgcagcgcccgccgccgcggccctcactcagccccgcggccgccccgagcgcaccgggcccggcccccagccagctgcccgggctggccgcgctcccgctgtcggccggggcccctgccgccgccatcgcgggctcgggccccgccgccccggccgccttcgagggcgcgcagccgctgtcccggcccgagtctggcgccagcacccccggcggccctgcggagcccagcgcgcccgccgcccccagcgccgcccctgcccccgctgcccccgccccggcgccagcgccgcagagcgcagcctcgtcgcagccgcagagcgcatccacgccgcctgccctggccccggggtccctgctgggtgcggcgcccggcctgccaagtccgcttctacctcagacttccgccagcggcgtcatcttccccaacccgctggtcagcatcgcggccacggccaacgctctggacccgctgtccgcgctcatgaagcaccgcaagggcaagccgcccaatgtgtcggtgttcgagcccaaagccagcgccgaggacccgttcttcaagcacaaatgccgcttctgcgccaaggtcttcggcagcgacagcgcgctccagatccacctgcgctcgcacacaggcgagcggcccttcaagtgcaacatctgcgggaaccgcttctccaccaaaggcaacctgaaggtgcacttccagaggcacaaggagaagtacccccacatccagatgaacccttacccggtccccgagtacctggacaacgtgcccacctgctcgggcatcccctacggcatgtcgctgccccccgagaagcccgtgaccacctggctggacagcaagcccgtgctgcccaccgtgcccacgtccgtggggctgcaactgccgcccactgtccctggcgcgcacggctacgccgactctcccagcgccaccccagccagccgctccccgcagaggccctcgcccgcctccagcgagtgcgcctccttgtccccaggcctcaaccacgtggagtccggcgtgtcggccaccgccgagtccccacagtcgctcctcggcgggccgcccctcactaaagccgagcccgtcagcctgccctgcaccaacgccagggccggggacgctcccgtgggcgcgcaggctagcgctgcacccacatcggtggacggcgcacccacgagcctcggcagccccgggctgcccgccgtctccgagcagttcaaggcccagtttccgttcggggggctgctagactcgatgcaaacgtcggaaacctcgaagctgcagcagctggtggagaacatcgacaagaagatgacggacccgaaccagtgcgtcatctgccaccgggtgctgagctgccagagcgcgctgaagatgcactaccggacgcacacgggggagcggccgttcaagtgcaagatctgcggccgcgccttcaccaccaagggcaacctcaagacgcacttcggcgtgcaccgtgcaaagccgcccctgcgcgtgcagcactcctgccccatctgccagaagaagttcaccaacgccgtggtcctgcagcagcacatccgcatgcacatgggcggccagatccccaacacgccgctgccggagggcttccaggatgccatggactccgagctggcctacgacgacaagaacgcggagaccctgagcagctacgatgacgacatggacgagaactccatggaggacgacgctgagctgaaggacgcggccaccgacccggccaagccactcctgtcctacgcggggtcctgcccgccctccccgccctcggtcatctccagcattgccgccctggagaaccagatgaagatgatcgactcggtcatgagctgccagcagctgaccggcctcaagtccgtggagaacgggtccggggagagtgaccgcctgagcaacgactcctcgtcggccgtgggcgacctggagagccgcagcgcgggcagccccgccctgtccgagtcctcgtcctcgcaggccctgtcgccggcccccagcaatggtgagagcttccgctccaagtccccgggcctgggcgccccggaggagccccaggaaatcccgctcaagaccgagaggccggacagcccagccgccgccccgggcagcggaggcgcccctggccgcgcgggcatcaaggaggaggcgcccttcagcctgctgttcctgagcagggagcggggtaagtgtcccagcactgtgtgtggtgtctgtggcaagccttttgcttgcaagagcgcgttggaaatccactaccgcagccatactaaggagcggccattcgtctgcgcgctctgcaggcgagggtgctccactatgggtaatttaaaacagcacttactgacacacagattgaaagagctgccttctcagttatttgaccccaactttgctctaggtcccagccaaagcactcctagcctgatctccagcgccgcacccaccatgatcaaaatggaagtgaacggtcacggcaaggccatggcgctgggcgagggtcccccgctgcccgcgggcgtccaggtccccgccgggcctcagacagtgatgggcccgggcctggcgcccatgctggcccccccaccgcgccggacgcccaagcagcacaactgccagtcgtgcgggaagaccttctcctcggccagcgccctgcagatccatgagcgcacgcacaccggcgagaagccgttcggctgcaccatctgcggccgggccttcaccactaagggcaacctcaaggtgcacatggggacacacatgtggaataacgcccccgcgagacgcggccgccgcctgtctgtggagaaccccatggctctcctagggggtgatgccctgaagttctctgaaatgttccagaaggacctggcagctcgggcaatgaacgtcgaccccagtttttggaaccagtatgctgcagccatcactaacgggctcgccatgaagaacaacgagatctccgtcatccagaacggcggcatcccccagctccccgtgagtcttgggggcagcgccctcccccctctgggcagcatggccagtgggatggacaaagcacgcactggcagtagcccacccatcgtcagcttggacaaagcgagctcagaaacagcagccagccgcccattcacgcggtttatcgaggataacaaggagattggtatcaac

SEQ ID NO: 4927 - DNA, 3021 bp, Homo sapiens
  source 1..3021: mol_type = genomic DNA
atgtctcggcgaaagcagcggaaaccccaacagttaatctcggactgcgaaggtcccagcgcgtctgagaacggtgatgctagcgaggaggatcacccccaagtctgtgccaagtgctgcgcacaattcactgacccaactgaattcctcgcccaccagaacgcatgttctactgaccctcctgtaatggtgataattgggggccaggagaaccccaacaactcttcggcctcctctgaaccccggcctgagggtcacaataatcctcaggtcatggacacagagcatagcaaccccccagattctgggtcctccgtgcccacggatcccacctggggcccagagaggagaggagaggagtcttcagggcatttcctggtcgctgccacaggtacagcggctgggggaggcgggggcctgatcttggccagtcccaagctgggagcaaccccattacctccagaatcgacccctgcaccccctcctcctccaccaccccctccgcccccaggggtaggcagtggccacttgaatatccccctgatcttggaagagctacgggtgctgcagcagcggcagatccatcagatgcagatgactgagcaaatctgcaggcaggtgctgttgcttggctccttaggccagacggtgggtgcccctgccagtccctcagagctacctgggacagggactgcctcttccaccaagcccctactacccctcttcagccccatcaagcctgtccaaaccagcaagacactggcatcttcctcctcctcctcctcttcctcttcaggggcagaaacgcccaagcaggccttcttccacctttaccacccactggggtcacagcatcctttctctgctggaggggttgggcgaagccacaaacccacccctgccccttccccagccttgccaggcagcacagatcagctgattgcctcgcctcatctggcattcccaagcaccacgggactactggcagcacagtgtcttggggcagcccgaggccttgaggccactgcctccccagggctcctgaagccaaagaatggaagtggtgagctgagctacggagaagtgatgggtcccttggagaagcctggtggaaggcacaaatgccgcttctgtgccaaagtatttggcagtgacagtgccctgcagatccaccttcgttcccacacgggtgagaggccctataagtgcaatgtctgtggaaaccgttttaccacccgtggcaacctcaaagtgcatttccaccggcatcgtgagaagtacccacatgtgcagatgaacccacacccagtaccagagcacctagactatgtcattaccagcagtggcttgccttatggtatgtccgtgccaccagagaaggccgaggaggaggcagccactccaggtggaggggttgagcgcaagcctctggtggcctccacaacagcactcagtgccacagagagcctgactctgctctccaccagtgcaggcacagccacggctccaggactccctgctttcaataagtttgtgctcatgaaagcagtggaacccaagaataaagctgatgaaaacacccccccagggagtgagggctcagccatcagtggagtggcagaaagtagcacggcaactcgcatgcaactaagtaagttggtgacttcactaccaagctgggcactgcttaccaaccacttcaagtccactggcagcttccccttcccctatgtgctagagcccttgggggcctcaccctctgagacatcaaagctgcagcaactggtagaaaagattgaccggcaaggagctgtggcggtgacctcagctgcctcaggagcccccaccacctctgcccctgcaccttcatcctcagcctcttctggacctaaccagtgtgtcatctgtctccgagtgcttagctgtcctcgggccctacgccttcattatggccaacatggaggtgagaggcccttcaaatgcaaagtgtgtggcagagccttctccaccaggggtaatctgcgtgcacatttcgtgggccacaaggccagtccagctgcccgggcacagaattcctgccccatctgccagaagaagttcaccaatgctgtcactctgcagcagcatgtccggatgcacctggggggccagatccccaacggtggtactgcactccctgaaggtggaggagctgctcaggagaatggctccgagcaatctacagtctccggggcacggagtttcccccagcagcagtcccagcagccatcaccggaagaggagttgtctgaggaggaggaagaggaggatgaggaagaagaggaagatgtgactgatgaagattccctggcagggagaggctcagagagtggaggtgagaaggcaatatcagtgagaggtgattcagaagaggcatctggggcagaggaggaggtggggacagtggcggcagcagccacagctgggaaggagatggacagtaatgagaaaactactcaacagtcttctttgccaccaccaccaccacctgacagcctggatcagcctcagccaatggagcagggaagcagtggtgttttaggaggcaaggaagaggggggcaaaccggagagaagctcaagtccggcatcagcactcaccccagaaggggaagccaccagcgtgaccttggtagaggagctgagcctgcaggaggcaatgagaaaggagccaggagagagcagcagcagaaaggcctgcgaagtgtgtggccaggcctttccctcccaggcagctctggaggagcatcagaagacccaccccaaggaggggccgctcttcacttgtgttttctgcaggcagggctttcttgagcgggctaccctcaagaagcatatgctcctggcacaccaccaggtacagccctttgccccccatggccctcagaatattgctgctctttctctagtccctggctgttcgccttccatcacctccacagggctctccccctttccccgaaaagatgaccccacgatccca

SEQ ID NO: 4928 - DNA, 2718 bp, Homo sapiens
  source 1..2718: mol_type = genomic DNA
atggcgcacgaatccgagaggagctctcgtctcggggtgccctgcggggagccggcagagctcggaggtgatgctagcgaggaggatcacccccaagtctgtgccaagtgctgcgcacaattcactgacccaactgaattcctcgcccaccagaacgcatgttctactgaccctcctgtaatggtgataattgggggccaggagaaccccaacaactcttcggcctcctctgaaccccggcctgagggtcacaataatcctcaggtcatggacacagagcatagcaaccccccagattctgggtcctccgtgcccacggatcccacctggggcccagagaggagaggagaggagtcttcagggcatttcctggtcgctgccacaggggcagaaacgcccaagcaggccttcttccacctttaccacccactggggtcacagcatcctttctctgctggaggggttgggcgaagccacaaacccacccctgccccttccccagccttgccaggcagcacagatcagctgattgcctcgcctcatctggcattcccaagcaccacgggactactggcagcacagtgtcttggggcagcccgaggccttgaggccactgcctccccagggctcctgaagccaaagaatggaagtggtgagctgagctacggagaagtgatgggtcccttggagaagcctggtggaaggcacaaatgccgcttctgtgccaaagtatttggcagtgacagtgccctgcagatccaccttcgttcccacacgggtgagaggccctataagtgcaatgtctgtggaaaccgttttaccacccgtggcaacctcaaagtgcatttccaccggcatcgtgagaagtacccacatgtgcagatgaacccacacccagtaccagagcacctagactatgtcattaccagcagtggcttgccttatggtatgtccgtgccaccagagaaggccgaggaggaggcagccactccaggtggaggggttgagcgcaagcctctggtggcctccacaacagcactcagtgccacagagagcctgactctgctctccaccagtgcaggcacagccacggctccaggactccctgctttcaataagtttgtgctcatgaaagcagtggaacccaagaataaagctgatgaaaacacccccccagggagtgagggctcagccatcagtggagtggcagaaagtagcacggcaactcgcatgcaactaagtaagttggtgacttcactaccaagctgggcactgcttaccaaccacttcaagtccactggcagcttccccttcccctatgtgctagagcccttgggggcctcaccctctgagacatcaaagctgcagcaactggtagaaaagattgaccggcaaggagctgtggcggtgacctcagctgcctcaggagcccccaccacctctgcccctgcaccttcatcctcagcctcttctggacctaaccagtgtgtcatctgtctccgagtgcttagctgtcctcgggccctacgccttcattatggccaacatggaggtgagaggcccttcaaatgcaaagtgtgtggcagagccttctccaccaggggtaatctgcgtgcacatttcgtgggccacaaggccagtccagctgcccgggcacagaattcctgccccatctgccagaagaagttcaccaatgctgtcactctgcagcagcatgtccggatgcacctggggggccagatccccaacggtggtactgcactccctgaaggtggaggagctgctcaggagaatggctccgagcaatctacagtctccggggcacggagtttcccccagcagcagtcccagcagccatcaccggaagaggagttgtctgaggaggaggaagaggaggatgaggaagaagaggaagatgtgactgatgaagattccctggcagggagaggctcagagagtggaggtgagaaggcaatatcagtgagaggtgattcagaagaggcatctggggcagaggaggaggtggggacagtggcggcagcagccacagctgggaaggagatggacagtaatgagaaaactactcaacagtcttctttgccaccaccaccaccacctgacagcctggatcagcctcagccaatggagcagggaagcagtggtgttttaggaggcaaggaagaggggggcaaaccggagagaagctcaagtccggcatcagcactcaccccagaaggggaagccaccagcgtgaccttggtagaggagctgagcctgcaggaggcaatgagaaaggagccaggagagagcagcagcagaaaggcctgcgaagtgtgtggccaggcctttccctcccaggcagctctggaggagcatcagaagacccaccccaaggaggggccgctcttcacttgtgttttctgcaggcagggctttcttgagcgggctaccctcaagaagcatatgctcctggcacaccaccagaaccagtatgtggcattcctgtcaaatggcctgcccatgaagccctggaattccagctccacctccactaccactccaagcctggccccaccagtgctgtttggcctaggaactgtggctgggaaggtgcctccaacaatgggatccagggaagccaaggagaagacagcccccctcctatttcagcctcctgcacccaaggcagtgcctgagaagcccatcatagacaagaag

SEQ ID NO: 4929 - DNA, 1590 bp, Homo sapiens
  source 1..1590: mol_type = genomic DNA
atggcgactcccgacgtgagtgtgcacatggaggaggtggtggttgtgacaactccggacactgcagtggacggcagtggtgtggagggggtgaagaccgtgttggtgacgaccaacttggcccctcacgggggcgacctgacggaagataacatggagacagaaaatgcagcggcagcagctgccgcggccttcacagcctcctcccagctcaaggaagccgtgttagtgaagatggctgaagagggggagaacctggaagctgagattgtgtaccccatcacctgtggagacagcagagccaacctcatctggaggaagtttgtgtgtcccggcatcaatgtgaaatgtgttcagtacgacgagcatgtaatcagcccaaaggaatttgtgcacctggccgggaagtccaccctgaaggactggaagagagccatccgcatgaacggcatcatgctcaggaagatcatggactccggggaactggacttctaccagcatgacaaggtctgctccaacacctgccgcagcacaaagattgacctctcaggagcccgtgtgtccctgagcagccccacgtcggccgagtacattcccctcacgcccgccgcagccgacgtgaatgggtctcctgcgaccatcaccatagagacctgtgaagaccctggcgactggaccgcggccattggagatgacacatttaccttctggcgggggctgaaggacgccggcctgctggacgaggtcatccaggagttccaccaggagctggtggagaccatgagaggcctgcagcagcgggtccaggaccctcccctgcagcttcgagatgctgtacttctcaacaacatcgtgcagaacttcggcatgctggacctggtgaagaaggtgctggccagccacaagtgccagatggaccgctcgcgggagcagtacgcccgggacctggcagccctggagcagcagtgtgatgagcatcgtcgccgagccaaggagctgaagcacaagtcccagcacctcagcaacgtgctcatgacgctgacgccggtctccctgccaccgcctgtgaagcggccccggcttgcacgtgccacatcaggaccggccgccatggcctcgcaggtgctcacccagtctgcccagctggcgcttggcccgggcgtgcccgtcccccagctgaccagcgtgccccttggtaaagtggtgtccaccctgccgtccaccgtcctgggcaagggttcccttcaggcgccccccgccagctccccggcctccccgctgctcgggggatacacagtcttggcctcttccggctccacctaccccagcacagtggagatccacccggacgcgtccagcctcacggtcctgagcacggccgccgtgcaggacggtagcacggtgttcaaggtggtcagcccgctacagctgctcacgttgcctggcctgggccccaccctgcagaacgtggcccaggcctcgcctggctccagcacaattgtgacagtgcccgcaggggctgcccccgggcctgaggagcacacggccaccattgaggtggctgccatggcagaggaccacgagcggaag

SEQ ID NO: 4930 - DNA, 1719 bp, Homo sapiens
  source 1..1719: mol_type = genomic DNA
atggctaatgcagaagtgagtgtcccagtgggggatgtggttgtggtacctactgaaggaaatgaaggggagaatcctgaagacactaaaacccaagtgattttgcagttacagcctgtgcaacaaggtttgtttatcgatggacacttttacaacaggatttatgaagctgggtcggagaacaacacggcagttgtagcagtagaaactcacacgatacacaaaattgaagaagggattgatacaggcactatagaagcaaatgaggatatggaaattgcttaccccataacttgtggggagagcaaagccatcctcctctggaagaagtttgtatgtccaggaataaacgtgaagtgtgtcaagttcaatgatcagttgatcagccccaagcactttgttcatctggctggcaagtccactctgaaggactggaagagagctattcgtctgggtgggatcatgctcaggaaaatgatggactccggacagattgatttttaccaacatgacaaagtttgctccaatacctgcagaagcaccaaatttgatcttctgatcagcagtgcaagagctccagtgccaggacagcagacaagtgtggtgcagacacccacttcggctgatggtagcatcacgcagattgccatctcagaagagagcatggaagaggcagggctggaatggaactcagctctcaccgctgctgtcaccatggccacggaggagggtgtaaagaaagactcagaggaaatttcagaggacactttgatgttctggaaaggaatagctgatgtagggctgatggaagaggttgtctgcaatatacagaaggaaatagaggagctactcaggggagttcagcagcggctcatccaggctcccttccaagtcacagatgctgctgttctcaacaatgtagcacacacatttggcctaatggacacagtcaagaaggttttagacaacagaaggaaccaagtagagcagggagaagaacagtttctctatactctgacagacttggaacgccagttggaggagcagaagaagcaaggccaggatcacaggctgaaatctcagacagttcaaaatgtggtactgatgcctgtgagcactcctaagcctccaaaaaggccccggctccagcggccagcctccaccactgtcttgagcccttctcctcctgtccagcagcctcagttcacagtcatctcacccatcaccatcaccccagtgggtcagtcattttccatgggcaatattccagtggccaccctcagccagggctccagtcctgtgactgtccacacactgccttctggccctcagctcttccgctatgccacagtggtctcctctgccaagagcagctcaccagacacagtgaccatccacccttcatctagcttggcgctgctgagctctactgccatgcaggatgggagtacactgggcaacatgaccaccatggttagccctgtggaattggtggccatggagtccggcctaacctcggcaattcaggctgttgaaagcacctcagaggatgggcagaccatcattgagattgatccagccccggacccagaagctgaagatactgagggcaaagcagtcatcttggagacagagctgaggactgaggagaaagttgtggctgagatggaagaacaccagcatcaagttcacaatgtggagattgtggtcttagaggat

SEQ ID NO: 4931 - DNA, 1560 bp, Homo sapiens
  source 1..1560: mol_type = genomic DNA
atggcaggtgggggcagcgacctgagcaccaggctgttcacggaagaccaggatgtagatgagggacttgtctatgacactgtattcaagcacttcaaaagacataagctggagatatcaaatgcaataaaaaagacatttccattccttgagggcctccgcgatcgggaactcatcacaaataaaatgtttgaagattctgaagattcttgtagaaacctggtccctgtacaaagagtggtgtacaatgttctcagtgaactggagaagacatttaacctgtcagttttggaagcactgttcagcgaggtcaacatgcaggaataccccgatttaattcacatttataaaagcttcaaaaatgcaatccaagacaaattgtctttccaagaaagtgatcgaaaagaaagggaagagaggcctgacatcaaactaagtcttaaacaaggagaagtgccagaaagcccggaagcaaggaaggaaagtgaccaagcatgtggcaaaatggatactgtggatattgcaaacaactctactttgggaaaacccaagaggaaaagaagaaaaaagaaggggcatggctggagcagaatgggaacgagaacgcagaaaaacaaccaacaaaatgataacagcaaagccgatggccagctggtctcgagtgaaaagaaggcgaacatgaatctgaaagacctttccaagattagggggagaaagagaggcaaacctggaacccactttactcagagtgacagagctccacagaaaagagtccgatcaagaggaaccttggcaaagtgtatacagactgaggatggaaaatggttcacccccatggaatttgaaatcaaaggaggctacgcaagatcaaagaactggaggctgagtgtgcgctgtggcgggtggcccctacgacggctgatggaggaaggatctctacctaatcctccaagaatatattacaggaacaaaaagagaatactgaagtctcaaaacaatagctcagttgacccttgtatgagaaacttggatgagtgtgaggtgtgccgggacggaggggagctgttctgttgcgacacttgttcaagagtcttccatgaggactgccacatcccacctgtggaaagtgagaagaccccgtggaattgcatcttctgcaggatgaaggagtctccgggaagccaacagtgttgtcaggaatctgaggtcctggagaggcagatgtgtcctgaggaacagttgaaatgtgagttcctcctcttgaaagtctattgctgttctgagagctccttttttgccaagattccatactattattatattagagaggcgtgtcaaggcctgaaggagcccatgtggttggataaaatcaagaaaaggctgaatgagcacggttacccccaagtggaggggtttgtacaagacatgcgcctcatcttccagaaccacagggcctcttacaagtataaggattttggccaaatgggacttagactggaggctgaatttgagaaggatttcaaggaagtgtttgctattcaggaaacaaatgggaacagt

SEQ ID NO: 4932 - DNA, 1740 bp, Homo sapiens
  source 1..1740: mol_type = genomic DNA
atggcaggtgggggcagcgacctgagcaccagggggctgaacggaggtgtttcacaagtagcaaatgagatgaaccatcttcctgcacacagccaaagtctgcaaaggctgttcacggaagaccaggatgtagatgagggacttgtctatgacactgtattcaagcacttcaaaagacataagctggagatatcaaatgcaataaaaaagacatttccattccttgagggcctccgcgatcgggaactcatcacaaataaaatgtttgaagattctgaagattcttgtagaaacctggtccctgtacaaagagtggtgtacaatgttctcagtgaactggagaagacatttaacctgtcagttttggaagcactgttcagcgaggtcaacatgcaggaataccccgatttaattcacatttataaaagcttcaaaaatgcaatccaagacaaattgtctttccaagaaagtgatcgaaaagaaagggaagagaggcctgacatcaaactaagtcttaaacaaggagaagtgccagaaagcccggaagcaaggaaggaaagtgaccaagcatgtggcaaaatggatactgtggatattgcaaacaactctactttgggaaaacccaagaggaaaagaagaaaaaagaaggggcatggctggagcagaatgggaacgagaacgcagaaaaacaaccaacaaaatgataacagcaaagccgatggccagctggtctcgagtgaaaagaaggcgaacatgaatctgaaagacctttccaagattagggggagaaagagaggcaaacctggaacccactttactcagagtgacagagctccacagaaaagagtccgatcaagagcttcaagaaagcacaaagatgaaactgtggattttcaggctcctttacttccagtgacctgtggtggggtgaagggaattttacataaggagaaattggaacaaggaaccttggcaaagtgtatacagactgaggatggaaaatggttcacccccatggaatttgaaatcaaaggaggctacgcaagatcaaagaactggaggctgagtgtgcgctgtggcgggtggcccctacgacggctgatggaggaaggatctctacctaatcctccaagaatatattacaggaacaaaaagagaatactgaagtctcaaaacaatagctcagttgacccttgtatgagaaacttggatgagtgtgaggtgtgccgggacggaggggagctgttctgttgcgacacttgttcaagagtcttccatgaggactgccacatcccacctgtggaaagtgagaagaccccgtggaattgcatcttctgcaggatgaaggagtctccgggaagccaacagtgttgtcaggaatctgaggtcctggagaggcagatgtgtcctgaggaacagttgaaatgtgagttcctcctcttgaaagtctattgctgttctgagagctccttttttgccaagattccatactattattatattagagaggcgtgtcaaggcctgaaggagcccatgtggttggataaaatcaagaaaaggctgaatgagcacggttacccccaagtggaggggtttgtacaagacatgcgcctcatcttccagaaccacagggcctcttacaagtataaggattttggccaaatgggacttagactggaggctgaatttgagaaggatttcaaggaagtgtttgctattcaggaaacaaatgggaacagt

SEQ ID NO: 4933 - DNA, 1665 bp, Homo sapiens
  source 1..1665: mol_type = genomic DNA
atggcaggtgggggcagcgacctgagcaccaggctgttcacggaagaccaggatgtagatgagggacttgtctatgacactgtattcaagcacttcaaaagacataagctggagatatcaaatgcaataaaaaagacatttccattccttgagggcctccgcgatcgggaactcatcacaaataaaatgtttgaagattctgaagattcttgtagaaacctggtccctgtacaaagagtggtgtacaatgttctcagtgaactggagaagacatttaacctgtcagttttggaagcactgttcagcgaggtcaacatgcaggaataccccgatttaattcacatttataaaagcttcaaaaatgcaatccaagacaaattgtctttccaagaaagtgatcgaaaagaaagggaagagaggcctgacatcaaactaagtcttaaacaaggagaagtgccagaaagcccggaagcaaggaaggaaagtgaccaagcatgtggcaaaatggatactgtggatattgcaaacaactctactttgggaaaacccaagaggaaaagaagaaaaaagaaggggcatggctggagcagaatgggaacgagaacgcagaaaaacaaccaacaaaatgataacagcaaagccgatggccagctggtctcgagtgaaaagaaggcgaacatgaatctgaaagacctttccaagattagggggagaaagagaggcaaacctggaacccactttactcagagtgacagagctccacagaaaagagtccgatcaagagcttcaagaaagcacaaagatgaaactgtggattttcaggctcctttacttccagtgacctgtggtggggtgaagggaattttacataaggagaaattggaacaaggaaccttggcaaagtgtatacagactgaggatggaaaatggttcacccccatggaatttgaaatcaaaggaggctacgcaagatcaaagaactggaggctgagtgtgcgctgtggcgggtggcccctacgacggctgatggaggaaggatctctacctaatcctccaagaatatattacaggaacaaaaagagaatactgaagtctcaaaacaatagctcagttgacccttgtatgagaaacttggatgagtgtgaggtgtgccgggacggaggggagctgttctgttgcgacacttgttcaagagtcttccatgaggactgccacatcccacctgtggaaagtgagaagaccccgtggaattgcatcttctgcaggatgaaggagtctccgggaagccaacagtgttgtcaggaatctgaggtcctggagaggcagatgtgtcctgaggaacagttgaaatgtgagttcctcctcttgaaagtctattgctgttctgagagctccttttttgccaagattccatactattattatattagagaggcgtgtcaaggcctgaaggagcccatgtggttggataaaatcaagaaaaggctgaatgagcacggttacccccaagtggaggggtttgtacaagacatgcgcctcatcttccagaaccacagggcctcttacaagtataaggattttggccaaatgggacttagactggaggctgaatttgagaaggatttcaaggaagtgtttgctattcaggaaacaaatgggaacagt

SEQ ID NO: 4934 - DNA, 1881 bp, Homo sapiens
  source 1..1881: mol_type = genomic DNA
atgaacgcgagcagcgagggcgagagcttcgcgggctcggtgcaaattccaggtggcacaacggtgctggtggagctgactcccgacatccatatctgcggcatctgcaagcagcagtttaacaacctggatgcctttgtagctcacaagcaaagtggctgccagctgacaggcacatccgcagcagcccccagcacggtccagtttgtatcggaggaaacagtgcctgccacccagactcagaccaccaccagaaccatcacctcggagacccagacaatcacaggttgccaattcaagactgcttatggcatgaaggacatggagcggcatttaaaaattcacacgggagacaaaccccataagtgtgaagtctgtggcaagtgctttagccggaaagacaagctgaaaactcacatgcggtgccacacgggcgtgaagccctacaagtgtaagacgtgtgactacgccgctgccgacagcagcagcctcaacaagcacctgaggatccactcggacgagcggcccttcaaatgccagatctgcccctacgccagccgcaactccagccagctcactgtccacctgcgatcccacacgggggacgcccccttccagtgctggctctgtagcgccaagttcaaaatcagctcggacttgaaaaggcacatgcgggtgcactcgggggagaagcctttcaagtgcgagttctgcaatgtccgctgcaccatgaaggggaacctcaagtcgcacatccgtatcaagcacagcgggaataacttcaagtgtcctcattgcgacttcctgggtgacagcaaagccaccctccggaagcacagccgcgtgcaccagtcggagcatcctgagaagtgctcggaatgcagctactcctgctccagcaaggccgccctgcgcatccacgagcgtatccactgcaccgaccgccctttcaagtgcaactactgcagcttcgacaccaaacagcccagcaacctgagcaagcacatgaagaagttccatggggacatggttaagactgaggctctagagaggaaggacaccggcaggcagagcagccggcaggtggccaagctggatgccaagaagagtttccactgcgatatatgcgatgcctccttcatgcgggaggactcgctccgcagccacaagagacagcacagtgagtacagtgagagtaagaactcggacgtgaccgttctccagtttcagatcgaccccagcaagcagcccgccacgcccctcactgtgggacacctccaggtgcccctccagcccagccaagtgccccagttcagcgagggaagagtcaaaatcatcgttgggcatcaggtgccccaggcgaacaccatcgtccaggctgccgccgctgcagtgaacatcgtcccgcctgccttggtggcccagaacccagaggaactcccagggaacagccggctgcagatcctgcgccaggtcagtctgatcgccccccctcagtcctcgcggtgtccgagcgaggcgggcgcaatgacccagccggctgtcctgctgaccacccacgagcagacggacggagccactctgcaccagactctcatccccacggcctcaggtggcccccaggaaggctctggcaatcaaactttcattaccagttcgggtattacttgcactgactttgaaggcctaaacgccttgattcaggaggggacagcagaagtgacagtggtgagcgatggaggccagaacatcgcagtggccaccacagcgccaccggtcttctcctcctcttcccagcaagaactacccaagcagacctactccatcattcaaggggcagcccatccagctttgctctgtcccgccgactccattccagat

SEQ ID NO: 4935 - DNA, 1278 bp, Homo sapiens
  source 1..1278: mol_type = genomic DNA
atgtcgcggcgcaagcaggccaagccccagcacctcaactccgaggagccgcggcctgcgcgccgggagtgtgcggaggtggccccgcaggtggcgggggagccggcttcagaacttgatgatgatgttccaaaagcaaactgcctctccactgaaagcactgacactccgaaggcccctgtcatcactcttccctcagaggcaagggaacaaatggccacccttggagagaggacgttcaactgttgctacccaggttgccacttcaaaactgtccatggcatgaaagacttggaccgccatctcagaatccacacgggagacaaaccgcacaagtgtgagttctgtgacaagtgcttcagccggaaggacaacctgaccatgcacatgcggtgccacaccagtgtgaagccacacaagtgtcacctgtgtgactacgctgccgtggacagcagtagcctcaagaagcacctgcggatccactctgatgagcggccgtacaaatgccagctctgcccctatgccagccgcaactccagccagctcaccgtccacctgcgatctcacacgggggatacccccttccagtgctggctctgtagcgccaagttcaaaatcagctcggacttgaaaaggcacatgatcgtgcactcgggggagaagcctttcaagtgcgagttctgcgacgtccgctgcaccatgaaggcgaatctcaaatcgcacatccgcatcaagcacaccttcaaatgtctgcactgtgccttccagggccgggaccgggctgacctcctggagcacagccggctgcaccaggccgaccacccggagaagtgtccagagtgcagctactcctgctccagcgcggccgccctgcgcgtgcacagcagagtccactgtaaggaccgtcccttcaagtgtgacttctgcagcttcgacacgaagcggcccagcagcctggccaagcacgtcgacaaggtgcacagggacgaggccaagacggagaaccgggcccctctgggcaaggaagggctcagagagggcagctcccagcacgtggccaagatcgtgacgcagagggccttccgctgtgagacctgcggcgcctccttcgtcagggatgactctctgagatgccacaagaagcagcacagtgatcagagtgagaacaagaactcagacttggtcaccttcccaccggaaagcggtgcctcgggacagctcagcaccctggtctccgtggggcagctcgaggctcccctagagcccagccaagacctc

SEQ ID NO: 4936 - DNA, 1935 bp, Homo sapiens
  source 1..1935: mol_type = genomic DNA
atgaacgcgagcagcgagggcgagagcttcgcgggctcggtgcaaattccaggtggcacaacggtgctggtggagctgactcccgacatccatatctgcggcatctgcaagcagcagtttaacaacctggatgcctttgtagctcacaagcaaagtggctgccagctgacaggcacatccgcagcagcccccagcacggtccagtttgtatcggaggaaacagtgcctgccacccagactcagaccaccaccagaaccatcacctcggagacccagacaatcacagtttcagctccagaatttgtttttgaacatggctatcaaacttacctgcccacggaaagtaatgaaaaccagacagccactgtcatctctctccctgccaagtcacgcaccaaaaagcccacaacaccacctgctcagaaaaggcttaactgttgctatccaggttgccaattcaagactgcttatggcatgaaggacatggagcggcatttaaaaattcacacgggagacaaaccccataagtgtgaagtctgtggcaagtgctttagccggaaagacaagctgaaaactcacatgcggtgccacacgggcgtgaagccctacaagtgtaagacgtgtgactacgccgctgccgacagcagcagcctcaacaagcacctgaggatccactcggacgagcggcccttcaaatgccagatctgcccctacgccagccgcaactccagccagctcactgtccacctgcgatcccacacggcttcagaacttgatgatgatgttccaaaagcaaactgcctctccactgaaagcactgacactccgaaggcccctgtcatcactcttccctcagaggcaagggaacaaatggccacccttggagagaggacgttcaactgttgctacccaggttgccacttcaaaactgtccatggcatgaaagacttggaccgccatctcagaatccacacgggagacaaaccgcacaagtgtgagttctgtgacaagtgcttcagccggaaggacaacctgaccatgcacatgcggtgccacaccagtgtgaagccacacaagtgtcacctgtgtgactacgctgccgtggacagcagtagcctcaagaagcacctgcggatccactctgatgagcggccgtacaaatgccagctctgcccctatgccagccgcaactccagccagctcaccgtccacctgcgatctcacacgggggatacccccttccagtgctggctctgtagcgccaagttcaaaatcagctcggacttgaaaaggcacatgatcgtgcactcgggggagaagcctttcaagtgcgagttctgcgacgtccgctgcaccatgaaggcgaatctcaaatcgcacatccgcatcaagcacaccttcaaatgtctgcactgtgccttccagggccgggaccgggctgacctcctggagcacagccggctgcaccaggccgaccacccggagaagtgtccagagtgcagctactcctgctccagcgcggccgccctgcgcgtgcacagcagagtccactgtaaggaccgtcccttcaagtgtgacttctgcagcttcgacacgaagcggcccagcagcctggccaagcacgtcgacaaggtgcacagggacgaggccaagacggagaaccgggcccctctgggcaaggaagggctcagagagggcagctcccagcacgtggccaagatcgtgacgcagagggccttccgctgtgagacctgcggcgcctccttcgtcagggatgactctctgagatgccacaagaagcagcacagtgatcagagtgagaacaagaactcagacttggtcaccttcccaccggaaagcggtgcctcgggacagctcagcaccctggtctccgtggggcagctcgaggctcccctagagcccagccaagacctc

SEQ ID NO: 4937 - DNA, 2037 bp, Homo sapiens
  source 1..2037: mol_type = genomic DNA
atgaacgcgagcagcgagggcgagagcttcgcgggctcggtgcaaagtggcacaacggtgctggtggagctgactcccgacatccatatctgcggcatctgcaagcagcagtttaacaacctggatgcctttgtagctcacaagcaaagtggctgccagctgacaggcacatccgcagcagcccccagcacggtccagtttgtatcggaggaaacagtgcctgccacccagactcagaccaccaccagaaccatcacctcggagacccagacaatcacagtttcagctccagaatttgtttttgaacatggctatcaaacttacctgcccacggaaagtaatgaaaaccagacagccactgtcatctctctccctgccaagtcacgcaccaaaaagcccacaacaccacctgctcagaaaaggcttaactgttgctatccaggttgccaattcaagactgcttatggcatgaaggacatggagcggcatttaaaaattcacacgggagacaaaccccataagtgtgaagtctgtggcaagtgctttagccggaaagacaagctgaaaactcacatgcggtgccacacgggcgtgaagccctacaagtgtaagacgtgtgactacgccgctgccgacagcagcagcctcaacaagcacctgaggatccactcggacgagcggcccttcaaatgccagatctgcccctacgccagccgcaactccagccagctcactgtccacctgcgatcccacacgggggacgcccccttccagtgctggctctgtagcgccaagttcaaaatcagctcggacttgaaaaggcacatgcgggtgcactcgggggagaagcctttcaagtgcgagttctgcaatgtccgctgcaccatgaaggggaacctcaagtcgcacatccgtatcaagcacagcgggaataacttcaagtgtcctcattgcgacttcctgggtgacagcaaagccaccctccggaagcacagccgcgtgcaccagtcggagcatcctgagaagtgctcggaatgcagctactcctgctccagcaaggccgccctgcgcatccacgagcgtatccactgcaccgaccgccctttcaagtgcaactactgcagcttcgacaccaaacagcccagcaacctgagcaagcacatgaagaagttccatggggacatggttaagactgaggctctagagaggaaggacaccggcaggcagagcagccggcaggtggccaagctggatgccaagaagagtttccactgcgatatatgcgatgcctccttcatgcgggaggactcgctccgcagccacaagagacagcacagtgagtacagtgagagtaagaactcggacgtgaccgttctccagtttcagatcgaccccagcaagcagcccgccacgcccctcactgtgggacacctccaggtgcccctccagcccagccaagtgccccagttcagcgagggaagagtcaaaatcatcgttgggcatcaggtgccccaggcgaacaccatcgtccaggctgccgccgctgcagtgaacatcgtcccgcctgccttggtggcccagaacccagaggaactcccagggaacagccggctgcagatcctgcgccaggtcagtctgatcgccccccctcagtcctcgcggtgtccgagcgaggcgggcgcaatgacccagccggctgtcctgctgaccacccacgagcagacggacggagccactctgcaccagactctcatccccacggcctcaggtggcccccaggaaggctctggcaatcaaactttcattaccagttcgggtattacttgcactgactttgaaggcctaaacgccttgattcaggaggggacagcagaagtgacagtggtgagcgatggaggccagaacatcgcagtggccaccacagcgccaccggtcttctcctcctcttcccagcaagaactacccaagcagacctactccatcattcaaggggcagcccatccagctttgctctgtcccgccgactccattccagat

SEQ ID NO: 4938 - DNA, 2043 bp, Homo sapiens
  source 1..2043: mol_type = genomic DNA
atgaacgcgagcagcgagggcgagagcttcgcgggctcggtgcaaattccaggtggcacaacggtgctggtggagctgactcccgacatccatatctgcggcatctgcaagcagcagtttaacaacctggatgcctttgtagctcacaagcaaagtggctgccagctgacaggcacatccgcagcagcccccagcacggtccagtttgtatcggaggaaacagtgcctgccacccagactcagaccaccaccagaaccatcacctcggagacccagacaatcacagtttcagctccagaatttgtttttgaacatggctatcaaacttacctgcccacggaaagtaatgaaaaccagacagccactgtcatctctctccctgccaagtcacgcaccaaaaagcccacaacaccacctgctcagaaaaggcttaactgttgctatccaggttgccaattcaagactgcttatggcatgaaggacatggagcggcatttaaaaattcacacgggagacaaaccccataagtgtgaagtctgtggcaagtgctttagccggaaagacaagctgaaaactcacatgcggtgccacacgggcgtgaagccctacaagtgtaagacgtgtgactacgccgctgccgacagcagcagcctcaacaagcacctgaggatccactcggacgagcggcccttcaaatgccagatctgcccctacgccagccgcaactccagccagctcactgtccacctgcgatcccacacgggggacgcccccttccagtgctggctctgtagcgccaagttcaaaatcagctcggacttgaaaaggcacatgcgggtgcactcgggggagaagcctttcaagtgcgagttctgcaatgtccgctgcaccatgaaggggaacctcaagtcgcacatccgtatcaagcacagcgggaataacttcaagtgtcctcattgcgacttcctgggtgacagcaaagccaccctccggaagcacagccgcgtgcaccagtcggagcatcctgagaagtgctcggaatgcagctactcctgctccagcaaggccgccctgcgcatccacgagcgtatccactgcaccgaccgccctttcaagtgcaactactgcagcttcgacaccaaacagcccagcaacctgagcaagcacatgaagaagttccatggggacatggttaagactgaggctctagagaggaaggacaccggcaggcagagcagccggcaggtggccaagctggatgccaagaagagtttccactgcgatatatgcgatgcctccttcatgcgggaggactcgctccgcagccacaagagacagcacagtgagtacagtgagagtaagaactcggacgtgaccgttctccagtttcagatcgaccccagcaagcagcccgccacgcccctcactgtgggacacctccaggtgcccctccagcccagccaagtgccccagttcagcgagggaagagtcaaaatcatcgttgggcatcaggtgccccaggcgaacaccatcgtccaggctgccgccgctgcagtgaacatcgtcccgcctgccttggtggcccagaacccagaggaactcccagggaacagccggctgcagatcctgcgccaggtcagtctgatcgccccccctcagtcctcgcggtgtccgagcgaggcgggcgcaatgacccagccggctgtcctgctgaccacccacgagcagacggacggagccactctgcaccagactctcatccccacggcctcaggtggcccccaggaaggctctggcaatcaaactttcattaccagttcgggtattacttgcactgactttgaaggcctaaacgccttgattcaggaggggacagcagaagtgacagtggtgagcgatggaggccagaacatcgcagtggccaccacagcgccaccggtcttctcctcctcttcccagcaagaactacccaagcagacctactccatcattcaaggggcagcccatccagctttgctctgtcccgccgactccattccagat

SEQ ID NO: 4939 - DNA, 1134 bp, Homo sapiens
  source 1..1134: mol_type = genomic DNA
atggctcgagaatggagggccgctcagggaaaggaccctgggccctcagagaagcagaaacctgttttcacaccactgaggaggccaggcatgcttgtaccaaagcagaatgtttcacctccagatatgtcagctttgtctttaaaaggtgatcaagctctccttggaggcattttttattttttgaacatttttagccatggcgagctacctcctcattgtgaacagcgcttcctcccttgtgaaattggctgtgttaagtattctctccaagaaggtattatggcagatttccacagttttataaatcctggtgaaattccacgaggatttcgatttcattgtcaggctgcaagtgattctagtcacaagattcctatttcaaattttgaacgtgggcataaccaagcaactgtgttacaaaacctttatagatttattcatcccaacccagggaactggccacctatctactgcaagtctgatgatagaaccagagtcaactggtgtttgaagcatatggcaaaggcatcagaaatcaggcaagatctacaacttctcactgtagaggaccttgtagtggggatctaccaacaaaaatttctcaaggagccctctaagacttggattcgaagcctcctagatgtggccatgtgggattattctagcaacacaaggtgcaagtggcatgaagaaaatgatattctcttctgtgctttagctgtttgcaagaagattgcgtactgcatcagtaattctctggccactctctttggaatccagctcacagaggctcatgtaccactacaagattatgaggccagcaatagtgtgacacccaaaatggttgtattggatgcagggcgttaccagaagctaagggttgggagttcaggattctctcatttcaactcttctaatgaggaacaaagatcaaacacacccattggtgactacccatctagggcaaaaatttctggccaaaacagcagcgttcggggaagaggaattacccgcttactagagagcatttccaattcttccagcaatatccacaaattctccaactgtgacacttcactctcaccttacatgtcccaaaaagatggatacaaatctttctcttccttatct

SEQ ID NO: 4940 - DNA, 1209 bp, Homo sapiens
  source 1..1209: mol_type = genomic DNA
atgccgaaccgtaaggccagccggaatgcttactatttcttcgtgcaggagaagatccccgaactacggcgacgaggcctgcctgtggctcgcgttgctgatgccatcccttactgctcctcagactgggcgaaacctgttttcacaccactgaggaggccaggcatgcttgtaccaaagcagaatgtttcacctccagatatgtcagctttgtctttaaaaggtgatcaagctctccttggaggcattttttattttttgaacatttttagccatggcgagctacctcctcattgtgaacagcgcttcctcccttgtgaaattggctgtgttaagtattctctccaagaaggtattatggcagatttccacagttttataaatcctggtgaaattccacgaggatttcgatttcattgtcaggctgcaagtgattctagtcacaagattcctatttcaaattttgaacgtgggcataaccaagcaactgtgttacaaaacctttatagatttattcatcccaacccagggaactggccacctatctactgcaagtctgatgatagaaccagagtcaactggtgtttgaagcatatggcaaaggcatcagaaatcaggcaagatctacaacttctcactgtagaggaccttgtagtggggatctaccaacaaaaatttctcaaggagccctctaagacttggattcgaagcctcctagatgtggccatgtgggattattctagcaacacaaggtgcaagtggcatgaagaaaatgatattctcttctgtgctttagctgtttgcaagaagattgcgtactgcatcagtaattctctggccactctctttggaatccagctcacagaggctcatgtaccactacaagattatgaggccagcaatagtgtgacacccaaaatggttgtattggatgcagggcgttaccagaagctaagggttgggagttcaggattctctcatttcaactcttctaatgaggaacaaagatcaaacacacccattggtgactacccatctagggcaaaaatttctggccaaaacagcagcgttcggggaagaggaattacccgcttactagagagcatttccaattcttccagcaatatccacaaattctccaactgtgacacttcactctcaccttacatgtcccaaaaagatggatacaaatctttctcttccttatct

SEQ ID NO: 4941 - DNA, 1041 bp, Homo sapiens
  source 1..1041: mol_type = genomic DNA
atggaaaacttgatgactagctccaccctaccgcccctttttgcagatgaagacggttccaaggagagtaatgatctggctaccactgggttaaatcacccagaggttccatacagtagtggcgccacatcatccaccaacaatccagaatttgtggaggatctctctcaaggtcagttgcttcagagtgagtcttcaaatgcagcagaaggcaatgaacagaggcatgaagatgagcaacgaagtaaacgaggaggttggtccaaaggaagaaagaggaagaaacctcttcgagacagcaatgcacccaaatccccccttacaggatatgttcggttcatgaatgagcgtcgagaacaacttcgagcaaagagaccagaagtcccatttccagaaatcacaaggatgttaggcaatgaatggagtaaactgcctcctgaggaaaaacagcgctaccttgatgaagcagacagagataaggagcgttacatgaaggaactggaacagtatcagaaaacagaggcctacaaggtcttcagtaggaaaacccaggaccgtcagaaaggcaaatctcataggcaagatgcagcccggcaggccactcatgatcatgagaaagaaacagaggtaaaggaacggtctgtttttgacatccctatatttacagaggaattcttgaaccatagcaaagctcgggaagcagagctccgccagcttcgcaaatccaacatggagtttgaggagaggaatgcagccctgcaaaagcacgtggagagcatgcgcacagcagtggagaagctggaggtggatgtgatccaggagcggagccgcaacacagtcttacagcagcacctggagaccctgcggcaggtgctgaccagcagctttgccagcatgcccttgcctggaagtggagagacacctacagtggacaccattgactcatatatgaacagactgcacagtattattttagctaatccccaagacaatgaaaacttcatagctacagttcgagaagttgtgaacagactcgatcgt

SEQ ID NO: 4942 - DNA, 2682 bp, Homo sapiens
  source 1..2682: mol_type = genomic DNA
atgaactccatgaaccccatgaaacctgccctgccccctgcgccacacggtgatggttcattcgcatatgagtctgtgccttggcaacaaagcgccactcagccggctggatcgctgtctgtggtcactactgtgtggggagttggcaacgcgacacagagccaggttttggggaaccccatgggccctgcagggagtccctctggcagctccatgatgcctggtgtggcagggggcagctccgccttgacctccccacagtgcctgggacagcaggcgtttgctgaaggcggcgccaacaagggctacgtgcagcaaggcgtgtacagccgcgggggctaccctggggcccccggcttcaccaccgggtatgcaggcggcccggggggcctgggcctcccctcacatgctgcaagaccctccactgacttcacgcaagcggcagctgctgcagctgtggctgctgcggcagccactgccaccgccacagccacagccaccgtggctgctctccaggagaagcagagccaggagctgagccagtatggagcgatgggggccggacagtcttttaacagccagtttctgcagcatggaggtccccgggggcctagtgtccccgctggcatgaaccctactggcataggaggggtaatgggcccctctggcctctcccccttggctatgaaccccacccgggcagcaggaatgacacccttgtatgcagggcagcgtctgccccaacatgggtatcctgggcctccccaggcccagccactgccccgacagggggtcaagagaacctactctgaggtgtatccagggcagcagtatctgcaaggaggccagtatgcacccagcaccgcccagtttgcgcccagccctgggcagccccctgccccctccccttcctaccctgggcacaggctgcccctgcagcagggcatgacccagtccctgtccgtgcctggccccacgggactgcattataagcctacccgttccatcccgggctatcccagttccccactgccagggaaccccacgccacccatgaccccaagcagcagcgtcccttacatgtcaccaaaccaagaggtcaagtctcccttcttgcctgatctcaagcccaacctcaactccttgcactcatcgccctctggaagcgggccttgtgacgagttgcggctgaccttccctgtgcgcgatggggtggtcctggagcccttccgcctgcagcacaacctggctgtaagcaaccatgtcttccagctgcgagactcagtctacaagaccctgataatgaggcctgacctggagctgcaattcaagtgctaccaccacgaggaccggcagatgaacaccaactggccagcctcggtgcaggtcagcgtcaatgccacgccgctcaccatcgagcgtggcgacaacaagacctcgcacaagccactctacctgaagcatgtgtgccagccaggccgcaacaccatccagatcaccgtcaccgcctgctgctgctcccacctcttcgtgctgcagctagtgcaccgcccatccgtccgctcggtgctgcagggcctcctcaaaaagcgcctcctgcctgctgagcactgcatcaccaagataaagcggaacttcagcagcggcaccatccctggcacccctgggcccaacggagaggacggggtggagcagacagctatcaaggtgtccctgaagtgccccatcaccttccgcaggatccagctccctgcccgaggtcatgactgtcgccacatacagtgctttgacctggagtcgtacctgcagctcaactgtgagcgggggacttggaggtgtcctgtgtgcaacaagacagctttgctggagggcctggaggtggaccagtacatgctgggcatcctgatttacattcagaactctgactatgaggagatcaccatcgaccccacgtgcagctggaagccagtgcccgtgaagcctgacatgcacatcaaggaggagccggatgggccagcactgaagcgctgccgcaccgtgagccccgcccacgtgctcatgcccagcgtgatggagatgatcgccgccctgggccccggcgctgccccctttgcccccctgcagcccccctcagtccctgcccccagcgactaccctggccagggttccagcttcctggggcctggaactttccctgagtccttcccacccaccacgcccagcaccccaacccttgctgagttcaccccgggaccaccccccatctcctaccagtctgacattcccagcagcctcctgacttcagagaagtctaccgcctgcctcccaagccagatggcaccagcaggtcacctggaccccactcacaatcctgggacaccaggactacacacctccaaccttggggcccctccaggtccccagctgcaccattcaaaccctcccccagcgtcccggcagtccttgggccaagcgagcttaggacctacgggtgaactggccttcagtcctgccacaggcgtgatggggccccccagcatgtctggagccggggaggccccagaaccagctctggacctgctcccggaactgaccaaccctgatgagctactgtcctacttgggcccacccgacctccctacgaacaacaatgacgacctgctttctctgtttgagaacaac

SEQ ID NO: 4943 - DNA, 2664 bp, Homo sapiens
  source 1..2664: mol_type = genomic DNA
atgaactccatgaaccccatgaaacctgccctgccccctgcgccacacggtgatggttcattcgcatatgagtctgtgccttggcaacaaagcgccactcagccggctggatcgctgtctgtggtcactactgtgtggggagttggcaacgcgacacagagccagtgcctgggacagcaggcgtttgctgaaggcggcgccaacaagggctacgtgcagcaaggcgtgtacagccgcgggggctaccctggggcccccggcttcaccaccgggtatgcaggcggcccggggggcctgggcctcccctcacatgctgcaagaccctccactgacttcacgcaagcggcagctgctgcagctgtggctgctgcggcagccactgccaccgccacagccacagccaccgtggctgctctccaggagaagcagagccaggagctgagccagtatggagcgatgggggccggacagtcttttaacagccagtttctgcagcatggaggtccccgggggcctagtgtccccgctggcatgaaccctactggcataggaggggtaatgggcccctctggcctctcccccttggctatgaaccccacccgggcagcaggaatgacacccttgtatgcagggcagcgtctgccccaacatgggtatcctgggcctccccaggcccagccactgccccgacagggggtcaagagaacctactctgaggtgtatccagggcagcagtatctgcaaggaggccagtatgcacccagcaccgcccagtttgcgcccagccctgggcagccccctgccccctccccttcctaccctgggcacaggctgcccctgcagcagggcatgacccagtccctgtccgtgcctggccccacgggactgcattataagcccacagagcagttcaacgggcagggcgccagcttcaacgggggcagcgtcagctacagccaacctggcctgagtgggcctacccgttccatcccgggctatcccagttccccactgccagggaaccccacgccacccatgaccccaagcagcagcgtcccttacatgtcaccaaaccaagaggtcaagtctcccttcttgcctgatctcaagcccaacctcaactccttgcactcatcgccctctggaagcgggccttgtgacgagttgcggctgaccttccctgtgcgcgatggggtggtcctggagcccttccgcctgcagcacaacctggctgtaagcaaccatgtcttccagctgcgagactcagtctacaagaccctgataatgaggcctgacctggagctgcaattcaagtgctaccaccacgaggaccggcagatgaacaccaactggccagcctcggtgcaggtcagcgtcaatgccacgccgctcaccatcgagcgtggcgacaacaagacctcgcacaagccactctacctgaagcatgtgtgccagccaggccgcaacaccatccagatcaccgtcaccgcctgctgctgctcccacctcttcgtgctgcagctagtgcaccgcccatccgtccgctcggtgctgcagggcctcctcaaaaagcgcctcctgcctgctgagcactgcatcaccaagataaagcggaacttcagcagcggcaccatccctggcacccctgggcccaacggagaggacggggtggagcagacagctatcaaggtgtccctgaagtgccccatcaccttccgcaggatccagctccctgcccgaggtcatgactgtcgccacatacagtgctttgacctggagtcgtacctgcagctcaactgtgagcgggggacttggaggtgtcctgtgtgcaacaagacagctttgctggagggcctggaggtggaccagtacatgctgggcatcctgatttacattcagaactctgactatgaggagatcaccatcgaccccacgtgcagctggaagccagtgcccgtgaagcctgacatgcacatcaaggaggagccggatgggccagcactgaagcgctgccgcaccgtgagccccgcccacgtgctcatgcccagcgtgatggagatgatcgccgccctgggccccggcgctgccccctttgcccccctgcagcccccctcagtccctgcccccagcgactaccctggccagggttccagcttcctggggcctggaactttccctgagtccttcccacccaccacgcccagcaccccaacccttgctgagttcaccccgggaccaccccccatctcctaccagtctgacattcccagcagcctcctgacttcagagaagtctaccgcctgcctcccaagccagatggcaccagcaggtcacctggaccccactcacaatcctgggacaccaggactacacacctccaaccttggggcccctccaggtccccagctgcaccattcaaaccctcccccagcgtcccggcagtccttgggccaagcgagcttaggacctacgggtgaactggccttcagtcctgccacaggcgtgatggggccccccagcatgtctggagccggggaggccccagaaccagctctggacctgctcccggaactgaccaaccctgatgagctactgtcctacttgggcccacccgacctccctacgaacaacaatgacgacctgctttctctgtttgagaacaac

SEQ ID NO: 4944 - DNA, 2760 bp, Homo sapiens
  source 1..2760: mol_type = genomic DNA
atgaactccatgaaccccatgaaacctgccctgccccctgcgccacacggtgatggttcattcgcatatgagtctgtgccttggcaacaaagcgccactcagccggctggatcgctgtctgtggtcactactgtgtggggagttggcaacgcgacacagagccaggttttggggaaccccatgggccctgcagggagtccctctggcagctccatgatgcctggtgtggcagggggcagctccgccttgacctccccacagtgcctgggacagcaggcgtttgctgaaggcggcgccaacaagggctacgtgcagcaaggcgtgtacagccgcgggggctaccctggggcccccggcttcaccaccgggtatgcaggcggcccggggggcctgggcctcccctcacatgctgcaagaccctccactgacttcacgcaagcggcagctgctgcagctgtggctgctgcggcagccactgccaccgccacagccacagccaccgtggctgctctccaggagaagcagagccaggagctgagccagtatggagcgatgggggccggacagtcttttaacagccagtttctgcagcatggaggtccccgggggcctagtgtccccgctggcatgaaccctactggcataggaggggtaatgggcccctctggcctctcccccttggctatgaaccccacccgggcagcaggaatgacacccttgtatgcagggcagcgtctgccccaacatgggtatcctgggcctccccaggcccagccactgccccgacagggggtcaagagaacctactctgaggtgtatccagggcagcagtatctgcaaggaggccagtatgcacccagcaccgcccagtttgcgcccagccctgggcagccccctgccccctccccttcctaccctgggcacaggctgcccctgcagcagggcatgacccagtccctgtccgtgcctggccccacgggactgcattataagcccacagagcagttcaacgggcagggcgccagcttcaacgggggcagcgtcagctacagccaacctggcctgagtgggcctacccgttccatcccgggctatcccagttccccactgccagggaaccccacgccacccatgaccccaagcagcagcgtcccttacatgtcaccaaaccaagaggtcaagtctcccttcttgcctgatctcaagcccaacctcaactccttgcactcatcgccctctggaagcgggccttgtgacgagttgcggctgaccttccctgtgcgcgatggggtggtcctggagcccttccgcctgcagcacaacctggctgtaagcaaccatgtcttccagctgcgagactcagtctacaagaccctgataatgaggcctgacctggagctgcaattcaagtgctaccaccacgaggaccggcagatgaacaccaactggccagcctcggtgcaggtcagcgtcaatgccacgccgctcaccatcgagcgtggcgacaacaagacctcgcacaagccactctacctgaagcatgtgtgccagccaggccgcaacaccatccagatcaccgtcaccgcctgctgctgctcccacctcttcgtgctgcagctagtgcaccgcccatccgtccgctcggtgctgcagggcctcctcaaaaagcgcctcctgcctgctgagcactgcatcaccaagataaagcggaacttcagcagcggcaccatccctggcacccctgggcccaacggagaggacggggtggagcagacagctatcaaggtgtccctgaagtgccccatcaccttccgcaggatccagctccctgcccgaggtcatgactgtcgccacatacagtgctttgacctggagtcgtacctgcagctcaactgtgagcgggggacttggaggtgtcctgtgtgcaacaagacagctttgctggagggcctggaggtggaccagtacatgctgggcatcctgatttacattcagaactctgactatgaggagatcaccatcgaccccacgtgcagctggaagccagtgcccgtgaagcctgacatgcacatcaaggaggagccggatgggccagcactgaagcgctgccgcaccgtgagccccgcccacgtgctcatgcccagcgtgatggagatgatcgccgccctgggccccggcgctgccccctttgcccccctgcagcccccctcagtccctgcccccagcgactaccctggccagggttccagcttcctggggcctggaactttccctgagtccttcccacccaccacgcccagcaccccaacccttgctgagttcaccccgggaccaccccccatctcctaccagtctgacattcccagcagcctcctgacttcagagaagtctaccgcctgcctcccaagccagatggcaccagcaggtcacctggaccccactcacaatcctgggacaccaggactacacacctccaaccttggggcccctccaggtccccagctgcaccattcaaaccctcccccagcgtcccggcagtccttgggccaagcgagcttaggacctacgggtgaactggccttcagtcctgccacaggcgtgatggggccccccagcatgtctggagccggggaggccccagaaccagctctggacctgctcccggaactgaccaaccctgatgagctactgtcctacttgggcccacccgacctccctacgaacaacaatgacgacctgctttctctgtttgagaacaac

SEQ ID NO: 4945 - DNA, 3201 bp, Homo sapiens
  source 1..3201: mol_type = genomic DNA
atgaattctatggacaggcacatccagcagaccaatgaccgactgcagtgcatcaagcagcacttacagaatcctgccaacttccacaatgccgccacggagctgctggactggtgcggagacccacgggccttccagcggcccttcgagcagagcctgatgggctgtttgacggtggtcagtcgggtggcagcccagcaaggctttgacctggacctcggctacagactgctggctgtgtgtgctgcaaaccgagacaagttcaccccgaagtctgccgccttgttgtcctcctggtgcgaagagctcggccgcctgctgctgctccgacatcagaagagccgccagagcgatccccctgggaaactccccatgcagccccctctcagctccatgagctccatgaaacccactctgtcgcacagtgatgggtcgttcccctatgactctgtcccttggcagcagaacaccaaccagcctcccggctccctttccgtggtcaccacggtttggggagtaaccaacacatcccagagccaggtccttgggaaccctatggccaatgccaacaaccccatgaatccaggcggcaaccccatggcgtcgggcatgaccaccagcaacccaggcctcaactccccacagtttgcggggcagcagcagcagttctcagccaaggctggccccgctcagccctacatccagcagagcatgtatggccggcccaactaccccggcagcgggggctttggggccagttaccctgggggtcctaacgcccccgcaggcatgggcatccctccgcacaccaggccgcctgctgacttcactcagcccgcggcagccgctgcagcagcggcagtggcagcagcagcagccacagctacagccacagccacggccactgtggcagccctgcaggagacacagaacaaggatataaaccagtatggaccgatgggtcccacccaggcgtataacagccaattcatgaaccagcccgggccgcgggggcctgcctccatggggggcagcatgaaccccgcgagcatggcggctggcatgacgccctcggggatgagcggccctcccatgggcatgaaccagccccggccgcccggcatcagcccctttggcacacacgggcagcggatgccccagcagacctacccgggcccccggccccagtcccttcctattcagaacataaagaggccataccctggagagcccaactatggaaaccagcaatatggaccaaacagccagttccccacccagccaggccagtacccagcccccaaccccccgaggccactcacctcccccaactacccaggacagaggatgcccagccagccgagctccgggcagtacccgccccccacggtcaacatggggcagtattacaagccagaacagtttaatggacaaaataacacgttctcgggaagcagctacagtaactacagccaagggaatgtcaacaggcctcccaggccggttcctgtggcaaattacccccactcacctgttccagggaaccccacaccccccatgacccctgggagcagcatccctccatacctgtcccccagccaagacgtcaaaccacccttcccgcctgacatcaagccaaatatgagcgctctgccaccacccccagccaaccacaatgacgagctgcggctcacattccctgtgcgggatggcgtggtgctggagcccttccgcctggagcacaacctggcggtcagcaaccatgtgttccacctgcggcccacggtccaccagacgctgatgtggaggtctgacctggagctgcagttcaagtgctaccaccacgaggaccggcagatgaacaccaactggcccgcctcggtgcaggtcagcgtgaacgccacgcccctcaccattgagcgcggcgacaacaagacctcccacaagcccctgcacctgaagcacgtgtgccagccgggccgcaacaccatccagatcaccgtcacggcctgctgctgctcccacctcttcgtgctgcagctggtacaccggccctccgtccgctctgtgctgcaaggactcctcaagaagcgcctcctgcccgcagagcactgtatcacgaaaatcaagcggaatttcagcagcgtggctgcctcctcgggcaacacgaccctcaacggggaggatggggtggagcagacggccatcaaggtgtctctgaagtgccccatcacattccggcgcatccagctgcctgctcgaggacacgattgcaagcatgtgcagtgctttgatctggagtcatacctgcagctgaattgcgagagagggacctggaggtgtcctgtgtgcaataaaaccgctctgctggagggcctggaggtggatcagtacatgtggggaatcctgaatgccatccaacactccgagtttgaagaggtcaccatcgatcccacgtgcagctggcggccggtgcccatcaagtcggacttacacatcaaggacgaccctgatggcatcccctccaagcggttcaagaccatgagtcccagccagatgatcatgcccaatgtcatggagatgatcgcagccctgggccccggcccgtccccctatcccctcccgcctcccccagggggcaccaactccaacgactacagcagccaaggcaacaactaccaaggccatggcaactttgacttcccccacgggaaccctggagggacatccatgaatgacttcatgcacgggcccccccagctctcccaccccccggacatgcccaacaacatggccgccctcgagaaacccctcagccaccccatgcaggaaactatgccacacgctggcagctctgaccagccccacccctccatacaacaaggtttgcacgtaccacaccccagcagccagtcagggcctccattacatcacagtggggctcctcctcctcctccttcccagcctccccggcagccgccacaggccgctcccagcagccatccacacagcgacctgacctttaacccctcctcagccttagagggtcaggccggagcgcagggagcgtccgacatgccggagccttcgctggatctccttcccgaactcacaaatcctgacgagctcctgtcttatctggacccccccgacctgccgagcaatagtaacgatgacctcctgtctctatttgagaacaac

SEQ ID NO: 4946 - DNA, 1335 bp, Homo sapiens
  source 1..1335: mol_type = genomic DNA
atgaatacaaactcaaaggaggttttatccctgggtgttcaagttcccgaggcatgggaagaacttctgacaatgaaagtggaagcaaaaagtcaccttcaatggcaggaatccagactgaaacgcagtaatccactggcaagggaaatcttccgaaggcactttcgacagctgtgctaccaagagacccctggaccaagggaggctcttactcgactccaggaactttgctaccagtggttgaggccacatgtgagcacaaaggagcagattttggatctgctggtgctggagcagtttctatccattctgcccaaggagctccagggctgggtgagggaacactgtccagagagtggagaagaggctgtgattttgctggaggatctggagagagagctcgatgaaccacaacatgagatggtggcccacagacacagacaagaagtcctctgtaaagagatggtgcctctagcagagcagacaccactgacccttcagtcccagcctaaggagccacagctcacatgtgactctgctcagaagtgccattctattggagagacagatttaatacgaagtttgaggagaagggcagtactgatcccacttggggcccatctgttctctacagacacatttttattttccaaacctgttgtgatcccccagctaaaaggaggaggagaaacatggcctaacaacagaggagtcctaagagatgaagtaaccaagactgaggacagagagttggtgctaaggaaagactgtcctaagatagtggaaccacatgggaaaatgtttaatgagcagacctgggaggtatcacagcaggatccctcacatggagaagttggtgaacataaggataggatagagaggcagtggggaaacctcttaggagaggggcaacacaaatgtgatgaatgtgggaagagctttactcagagctcaggtctcattcgacatcaaagaattcatactggagaaagaccttatgaatgtaatgaatgtgggaaagccttcagtcgaagttctggtctttttaatcaccgaggaatccacaatatacagaaacggtaccactgcaaggagtgtgggaaggtcttcagtcagagtgcgggtcttatccagcatcagagaatccacaaaggagaaaagccgtatcagtgcagccagtgcagtaagagctacagtcggcgttcatttctcattgaacatcagagaagccacacaggggagcgacctcaccagtgcattgaatgtgggaaaagctttaatcgacactgcaacctcattcgccatcagaagatccacacagtggctgagctggtc

SEQ ID NO: 4947 - DNA, 3738 bp, Homo sapiens
  source 1..3738: mol_type = genomic DNA
atgagcaaggaaagacccaagaggaatatcattcagaagaaatacgatgacagtgatgggattccgtggtcagaagaacgggtggtacgtaaagtcctttatttgtctctgaaggagttcaagaattcccagaagaggcagcatgcggaaggcattgctgggagcctgaaaactgtgaatgggctccttggtaatgaccagtctaagggattaggaccagcatcagaacagtcagagaatgaaaaggacgatgcatcccaagtgtcctccactagcaacgatgttagttcttcagattttgaagaagggccgtcgaggaaaaggcccaggctgcaagcacaaaggaagtttgctcagtctcagccgaatagtcccagcacaactccagtaaagatagtggagccattgctaccccctccagctactcagatatcagacctctctaaaaggaagcctaagacagaagattttcttacctttctctgccttcgaggttctcctgcgctgcccaacagcatggtgtattttggaagctctcaggatgaggaggaagtcgaggaggaagatgatgagacagaagacgtcaaaacagccaccaacaatgcttcatcttcatgccagtcgacccccaggaaaggaaaaacccacaaacatgttcacaacgggcatgttttcaatggttccagcaggtcaacacgggagaaggaacctgttcaaaaacacaaaagcaaagaggccactcccgcaaaggagaagcacagcgatcaccgggctgacagccgccgggagcaggcttcagctaaccaccccgcagcggccccctccacgggttcctcggccaaggggcttgctgccacccatcaccacccccctctgcatcggtcggctcaggacttacggaaacaggtttctaaggtaaacggagtcactcgaatgtcatctctgggtgcaggtgtaaccagtgccaaaaagatgcgcgaggtcagaccttcaccatccaaaactgtgaagtacactgccacggtgacgaagggggctgtcacatacaccaaagccaagagagaactggtcaaggacaccaaacccaatcaccacaagcccagttccgctgtcaaccacacaatctcagggaaaactgaaagtagcaatgcaaaaacccgcaaacaggtgctatccctcgggggggcgtccaagtccactgggcccgccgtcaatggcctcaaggtcagtggcaggttgaacccaaagtcatgcactaaggaggtgggggggcggcagctgcgggagggcctgcagctgcgggaggggctgcggaactccaagaggagactggaagaggcacaccaggcggagaagccgcagtcgccccccaagaagatgaaaggggcggctggccccgccgaaggccctggcaagaaggccccggccgagagaggtctgctgaacggacacgtgaagaaggaagtgccggagcgcagtctggagaggaatcggccgaagcgggccacggccgggaagagcacgccaggcagacaagcacatggcaaggcggacagcgcctcctgtgaaaatcgttctacctcgcaaccggagtccgtgcacaagccgcaggactcgggcaaggccgagaagggcggcggcaaggccgggtgggcggccatggacgagatccccgtcctcaggccctccgccaaggagttccacgatccgctcatctacatcgagtcggtccgcgctcaggtggagaagttcgggatgtgcagggtgatcccccctccggactggcggcccgagtgcaagctcaacgatgagatgcggtttgtcacgcagattcagcacatccacaagctgggccggcgctggggccccaacgtgcagcggctggcctgcatcaagaagcacctcaaatctcagggcatcaccatggacgagctcccgctcatagggggctgtgagctcgacctggcctgctttttccggctgattaatgagatgggcggcatgcagcaagtgactgacctcaaaaaatggaacaaactagcagacatgctgcgcatccccagaactgcccaggaccggctggccaagctgcaggaggcctactgccagtacctactctcctacgactccctgtccccagaggagcaccggcggctggagaaggaggtgctgatggagaaggagatcctggagaagcgcaaggggccgctggaaggccacacagagaacgaccaccacaagttccaccctctgccccgcttcgagcccaagaatgggctcatccacggcgtggcccccaggaacggcttccgcagcaagctcaaggaggtgggccaggcccagttgaagactggccggcggcgactcttcgctcaggaaaaagaagtggtcaaggaagaggaggaggacaaaggcgtcctcaatgacttccacaagtgcatctataagggaaggtctgtttctctaacaactttttatcgaacagcgaggaatatcatgagcatgtgtttcagcaaggagcctgccccagccgaaatcgagcaagagtactggaggctagtggaagagaaggactgccacgtggcagtgcactgcggcaaggtggacaccaacactcacggcagtggattcccagtaggaaaatcagaacccttttcgaggcatggatggaacctcaccgtcctccccaataacacagggtccatcctgcgtcacctcggtgctgtgcctggagtgactattccctggctaaatattggcatggtcttttctacctcatgctggtctcgagaccaaaatcaccttccatacattgactacttacacactggtgctgactgcatttggtattgcattcctgctgaggaggagaacaagctggaagatgtggtccacaccctgctgcaagccaatggcaccccagggctgcagatgctggaaagcaacgtcatgatctccccggaggtgctgtgcaaagaggggatcaaggtgcacaggaccgtgcagcagagtggccagtttgtcgtctgcttcccgggatcctttgtgtccaaagtgtgctgtgggtacagcgtgtctgaaaccgtgcactttgctaccacccagtggacaagtatgggctttgagaccgccaaggaaatgaagcgtcgccatatagctaagccattctccatggagaagttactctaccagattgcacaagcagaagcaaaaaaagaaaacggtcccactctcagtaccatctcagccctcctggatgagctcagggatacagagctgcggcagcgcaggcagctgttcgaggctggcctccactcctccgcacgctatggcagccacgatggcagcagcacggtggcggacgggaagaaaaagcctcgaaagtggctgcagttggagacgtcagagaggaggtgtcagatctgccagcacctgtgctacctgtccatggtggtacaagagaacgaaaacgtcgtgttctgtctggagtgtgctctgcgccacgtggagaaacagaagtcctgccgagggctgaagttgatgtaccgctacgatgaggaacagattatcagtctggtcaatcagatctgcggcaaagtgtctggtaaaaacggcagcattgagaactgtctcagtaaacccacaccaaaaagaggtccccgcaagagagcgacagtggacgtgcccccctcccgtctgtcagcctccagttcatccaaaagtgcttcgagctcatca

SEQ ID NO: 4948 - DNA, 3222 bp, Homo sapiens
  source 1..3222: mol_type = genomic DNA
atggtgtattttggaagctctcaggatgaggaggaagtcgaggaggaagatgatgagacagaagacgtcaaaacagccaccaacaatgcttcatcttcatgccagtcgacccccaggaaaggaaaaacccacaaacatgttcacaacgggcatgttttcaatggttccagcaggtcaacacgggagaaggaacctgttcaaaaacacaaaagcaaagaggccactcccgcaaaggagaagcacagcgatcaccgggctgacagccgccgggagcaggcttcagctaaccaccccgcagcggccccctccacgggttcctcggccaaggggcttgctgccacccatcaccacccccctctgcatcggtcggctcaggacttacggaaacaggtttctaaggtaaacggagtcactcgaatgtcatctctgggtgcaggtgtaaccagtgccaaaaagatgcgcgaggtcagaccttcaccatccaaaactgtgaagtacactgccacggtgacgaagggggctgtcacatacaccaaagccaagagagaactggtcaaggacaccaaacccaatcaccacaagcccagttccgctgtcaaccacacaatctcagggaaaactgaaagtagcaatgcaaaaacccgcaaacaggtgctatccctcgggggggcgtccaagtccactgggcccgccgtcaatggcctcaaggtcagtggcaggttgaacccaaagtcatgcactaaggaggtgggggggcggcagctgcgggagggcctgcagctgcgggaggggctgcggaactccaagaggagactggaagaggcacaccaggcggagaagccgcagtcgccccccaagaagatgaaaggggcggctggccccgccgaaggccctggcaagaaggccccggccgagagaggtctgctgaacggacacgtgaagaaggaagtgccggagcgcagtctggagaggaatcggccgaagcgggccacggccgggaagagcacgccaggcagacaagcacatggcaaggcggacagcgcctcctgtgaaaatcgttctacctcgcaaccggagtccgtgcacaagccgcaggactcgggcaaggccgagaagggcggcggcaaggccgggtgggcggccatggacgagatccccgtcctcaggccctccgccaaggagttccacgatccgctcatctacatcgagtcggtccgcgctcaggtggagaagttcgggatgtgcagggtgatcccccctccggactggcggcccgagtgcaagctcaacgatgagatgcggtttgtcacgcagattcagcacatccacaagctgggccggcgctggggccccaacgtgcagcggctggcctgcatcaagaagcacctcaaatctcagggcatcaccatggacgagctcccgctcatagggggctgtgagctcgacctggcctgctttttccggctgattaatgagatgggcggcatgcagcaagtgactgacctcaaaaaatggaacaaactagcagacatgctgcgcatccccagaactgcccaggaccggctggccaagctgcaggaggcctactgccagtacctactctcctacgactccctgtccccagaggagcaccggcggctggagaaggaggtgctgatggagaaggagatcctggagaagcgcaaggggccgctggaaggccacacagagaacgaccaccacaagttccaccctctgccccgcttcgagcccaagaatgggctcatccacggcgtggcccccaggaacggcttccgcagcaagctcaaggaggtgggccaggcccagttgaagactggccggcggcgactcttcgctcaggaaaaagaagtggtcaaggaagaggaggaggacaaaggcgtcctcaatgacttccacaagtgcatctataagggaaggtctgtttctctaacaactttttatcgaacagcgaggaatatcatgagcatgtgtttcagcaaggagcctgccccagccgaaatcgagcaagagtactggaggctagtggaagagaaggactgccacgtggcagtgcactgcggcaaggtggacaccaacactcacggcagtggattcccagtaggaaaatcagaacccttttcgaggcatggatggaacctcaccgtcctccccaataacacagggtccatcctgcgtcacctcggtgctgtgcctggagtgactattccctggctaaatattggcatggtcttttctacctcatgctggtctcgagaccaaaatcaccttccatacattgactacttacacactggtgctgactgcatttggtattgcattcctgctgaggaggagaacaagctggaagatgtggtccacaccctgctgcaagccaatggcaccccagggctgcagatgctggaaagcaacgtcatgatctccccggaggtgctgtgcaaagaggggatcaaggtgcacaggaccgtgcagcagagtggccagtttgtcgtctgcttcccgggatcctttgtgtccaaagtgtgctgtgggtacagcgtgtctgaaaccgtgcactttgctaccacccagtggacaagtatgggctttgagaccgccaaggaaatgaagcgtcgccatatagctaagccattctccatggagaagttactctaccagattgcacaagcagaagcaaaaaaagaaaacggtcccactctcagtaccatctcagccctcctggatgagctcagggatacagagctgcggcagcgcaggcagctgttcgaggctggcctccactcctccgcacgctatggcagccacgatggcagcagcacggtggcggacgggaagaaaaagcctcgaaagtggctgcagttggagacgtcagagaggaggtgtcagatctgccagcacctgtgctacctgtccatggtggtacaagagaacgaaaacgtcgtgttctgtctggagtgtgctctgcgccacgtggagaaacagaagtcctgccgagggctgaagttgatgtaccgctacgatgaggaacagattatcagtctggtcaatcagatctgcggcaaagtgtctggtaaaaacggcagcattgagaactgtctcagtaaacccacaccaaaaagaggtccccgcaagagagcgacagtggacgtgcccccctcccgtctgtcagcctccagttcatccaaaagtgcttcgagctcatca

SEQ ID NO: 4949 - DNA, 2715 bp, Homo sapiens
  source 1..2715: mol_type = genomic DNA
atggaaggagaatcaagcagatttgaaatccacactccagtttctgacaagaaaaagaaaaagtgttctatacataaggaaagacctcagaaacattcccacgaaattttcagagactcctccctggtgaatgaacagtctcaaataactaggaggaaaaagaggaaaaaagatttccagcatctcatttcttctcctttgaaaaaatccagaatctgtgatgagactgcaaatgccacttccacactcaaaaagagaaaaaagagaagatatagtgctttggaggtggacgaggaagcaggtgttacagttgtccttgtggataaagaaaatattaacaacacaccaaagcattttagaaaggatgttgatgttgtttgtgttgatatgagcatagaacagaagttaccaagaaagcctaaaacagacaaatttcaggtacttgctaagtcacatgcacataaatcagaagccctgcacagtaaagttagggagaaaaagaataaaaagcatcagaggaaagctgcatcctgggagagccagcgggcaagggacaccctgcctcagtcagaatcccaccaggaggagtcctggctttctgtgggtccagggggtgaaattacagaactaccagcatctgctcataaaaacaagtctaagaaaaaaaagaaaaagtccagtaaccgggaatatgagacactggccatgcctgaaggatcgcaagcaggcagagaggccgggactgatatgcaggaatcccagcctactgtgggcttggatgatgaaactccacaactactaggacctactcacaaaaaaaagtctaagaaaaaaaagaagaaaaagtccaatcaccaggaatttgaggcattggccatgcctgaaggatcacaagtgggcagtgaggttggggctgatatgcaggaatcccggcctgctgtgggcctgcatggtgaaactgcaggaataccagcacctgcttataaaaacaagtctaagaaaaaaaagaaaaagtccaatcaccaggaatttgaggcagtggccatgcctgagagcctcgagagtgcataccctgaaggatcacaggtgggcagtgaggttgggactgtggaaggcagtacagctcttaaagggttcaaggaatccaacagtacaaagaagaagtctaagaaaaggaagcttacgtctgtcaaaagggcacgagtgtctggtgatgatttttcagtgcccagtaagaactctgagagcacactctttgattcagtagaaggtgatggcgccatgatggaagaaggtgtgaaatctaggccccgacaaaagaaaacccaggcctgtttggcaagcaagcacgtgcaagaggcgccaaggttagaacctgcaaatgaagaacacaatgtggaaacagctgaagattccgaaataagatacttatctgcagattcaggagatgccgatgattcagatgcggatttgggttctgccgtgaaacagcttcaggagttcattcctaacatcaaggacagggccaccagcacaatcaagcggatgtaccgggacgacttggaacggtttaaggaatttaaagcacaaggtgtcgctattaaatttggcaagttttctgtaaaggaaaataagcagttagagaaaaatgtggaagactttctagccctgacaggcattgagagtgcagacaagctgctgtacacggacagatatcctgaggaaaaatctgtgatcaccaacttaaaaaggagatactcgtttagattacacattggtaggaacattgcccggccctggaaacttatatactatcgagcaaagaagatgttcgatgtcaacaattacaaaggcaggtatagcgaaggagatactgagaagttaaagatgtaccattctctccttgggaatgactggaagacgattggtgagatggtggcccgaagtagcctctccgtggccctcaagttctcacagatcagcagtcaaagaaatcgtggtgcttggagtaagtctgaaacccggaaactaatcaaggctgtcgaagaagtgattctgaagaagatgtctccccaggagttaaaagaggtggattccaaactccaagaaaatcctgaaagttgcctatcaattgttcgggaaaaactctacaagggcatatcttgggtagaagtagaagctaaagtgcaaaccagaaattggatgcagtgtaaaagtaagtggacagaaattctaaccaagaggatgactaatggtcggcgtatctactatggcatgaatgccctgcgggccaaggtcagccttattgaaaggttgtatgaaataaatgtggaagatactaatgaaatagactgggaagatcttgctagtgccataggtgatgttcctccatcttacgttcaaactaaattttctaggctgaaagctgtctatgttccattttggcagaaaaagacttttccagagatcatcgactacctttatgagacgactctacctttgctgaaggaaaagttagaaaaaatgatggagaaaaaaggcactaaaatccagactcctgcagcacccaagcaagttttcccatttcgagacatcttttattatgaagacgatagtgaaggagaggacatagaaaaagaaagcgaaggccaggcgccatgcatggctcacgcctgtaattccagtactttgggaggccaaggccggtggatcatc

SEQ ID NO: 4950 - DNA, 1170 bp, Homo sapiens
  source 1..1170: mol_type = genomic DNA
atgtaccgggacgacttggaacggtttaaggaatttaaagcacaaggtgtcgctattaaatttggcaagttttctgtaaaggaaaataagcagttagagaaaaatgtggaagactttctagccctgacaggcattgagagtgcagacaagctgctgtacacggacagatatcctgaggaaaaatctgtgatcaccaacttaaaaaggagatactcgtttagattacacattggtaggaacattgcccggccctggaaacttatatactatcgagcaaagaagatgttcgatgtcaacaattacaaaggcaggtatagcgaaggagatactgagaagttaaagatgtaccattctctccttgggaatgactggaagacgattggtgagatggtggcccgaagtagcctctccgtggccctcaagttctcacagatcagcagtcaaagaaatcgtggtgcttggagtaagtctgaaacccggaaactaatcaaggctgtcgaagaagtgattctgaagaagatgtctccccaggagttaaaagaggtggattccaaactccaagaaaatcctgaaagttgcctatcaattgttcgggaaaaactctacaagggcatatcttgggtagaagtagaagctaaagtgcaaaccagaaattggatgcagtgtaaaagtaagtggacagaaattctaaccaagaggatgactaatggtcggcgtatctactatggcatgaatgccctgcgggccaaggtcagccttattgaaaggttgtatgaaataaatgtggaagatactaatgaaatagactgggaagatcttgctagtgccataggtgatgttcctccatcttacgttcaaactaaattttctaggctgaaagctgtctatgttccattttggcagaaaaagacttttccagagatcatcgactacctttatgagacgactctacctttgctgaaggaaaagttagaaaaaatgatggagaaaaaaggcactaaaatccagactcctgcagcacccaagcaagttttcccatttcgagacatcttttattatgaagacgatagtgaaggagaggacatagaaaaagaaagcgaaggccaggcgccatgcatggctcacgcctgtaattccagtactttgggaggccaaggccggtggatcatc

SEQ ID NO: 4951 - DNA, 1218 bp, Homo sapiens
  source 1..1218: mol_type = genomic DNA
atgggcaaagtgtggaaacagcagatgtaccctcagtacgccacctactattacccccagtatctgcaagccaagcagtctctggtcccagcccaccccatggcccctcccagtcccagcaccaccagcagtaataacaacagtagcagcagtagcaactcaggatgggatcagctcagcaaaacgaacctctatatccgaggactgcctccccacaccaccgaccaggacctggtgaagctctgtcaaccatatgggaaaatagtctccacaaaggcaattttggataagacaacgaacaaatgcaaaggttatggttttgtcgactttgacagccctgcagcagctcaaaaagctgtgtctgccctgaaggccagtggggttcaagctcaaatggcaaagcaacaggaacaagatcctaccaacctctacatttctaatttgccactctccatggatgagcaagaactagaaaatatgctcaaaccatttggacaagttatttctacaaggatactacgtgattccagtggtacaagtcgtggtgttggctttgctaggatggaatcaacagaaaaatgtgaagctgttattggtcattttaatggaaaatttattaagacaccaccaggagtttctgcccccacagaacctttattgtgtaagtttgctgatggaggacagaaaaagagacagaacccaaacaaatacatccctaatggaagaccatggcatagagaaggagaggtgagacttgctggaatgacacttacttacgacccaactacagctgctatacagaacggattttatccttcaccatacagtattgctacaaaccgaatgatcactcaaacttctattacaccctatattgcatctcctgtatctgcctaccaggtgcaaagtccttcgtggatgcaacctcaaccatatattctacagcaccctggtgccgtgttaactccctcaatggagcacaccatgtcactacagcccgcatcaatgatcagccctctggcccagcagatgagtcatctgtcactaggcagcaccggaacatacatgcctgcaacgtcagctatgcaaggagcctacttgccacagtatgcacatatgcagacgacagcggttcctgttgaggaggcaagtggtcaacagcaggtggctgtcgagacgtctaatgaccattctccatatacctttcaacctaataag

SEQ ID NO: 4952 - DNA, 903 bp, Homo sapiens
  source 1..903: mol_type = genomic DNA
atgtacacacgtcggtactcaagcataagcagtactataatggatgtagacagcacaatttccagtgggcgttcaactccagcaatgatgaatggacaaggaagcactacttcttcaagcaaaaatattgcctataattgttgttgggaccagtgccaggcttgcttcaactctagcccagatctggcagatcacatccgttccatacatgtagatggtcagcgaggaggggtatttgtttgcttatggaaaggttgtaaagtatataacactccatctaccagtcaaagttggttacaaaggcatatgctgacacacagtggagacaaacctttcaagtgtgttgttggtggctgcaatgccagctttgcttctcagggagggctagctcgtcatgtacccacacacttcagtcagcagaactcctcaaaagtttctagccagccaaaggccaaagaagaatctccttctaaagctggaatgaacaaaaggaggaaattaaagaacaaaagacgacgctcattaccacggccacatgatttcttcgatgcacaaacactggatgcgataagacatcgagccatatgctttaacctctcagctcatatagaaagtttagggaagggacacagtgttgtttttcatagtactgtaatagctaagagaaaagaagattctgggaagatcaaacttttgcttcattggatgcctgaagacattctgcctgatgtgtgggtgaatgaaagtgaacgacatcagttaaaaactaaagtagttcatttatcaaagctacccaaagatactgccttgcttttggacccaaacatatacagaacaatgccgcagaagaggttgaagagaactctgataagaaaagtgttcaatttgtatttaagcaaacag

SEQ ID NO: 4953 - DNA, 1509 bp, Homo sapiens
  source 1..1509: mol_type = genomic DNA
atggccgccgctatcaccgacatggccgacctggaggagctctcccgcctgagccctctgccccccggcagcccgggttcggcggcgcggggccgggctgagccccccgaggaggaggaggaagaggaggaggaggaagaggaggcggaggccgaggcggtggcggcgctgctgctgaacggcggcagcggtgggggcggcggaggcggcggcggaggagtggggggcggcgaggcagagacgatgtcggagccgagccccgagagcgccagccaggccggggaggacgaagacgaggaggaggacgacgaggaggaggaagatgagagcagcagcagcggcgggggtgaggaggagagtagcgccgagagcctggtgggcagcagcggcgggagcagcagcgacgagacccgctcgttgagccccggcgccgccagcagcagcagcggggatggggacggcaaggagggcctggaggagcccaagggaccgcggggcagccagggcggcggcgggggcggcagcagtagcagcagcgtagtctccagcggcggcgacgagggctacgggactgggggaggcggaagcagcgcgacctccgggggccggcggggcagcttggagatgtcgtcggatggggaacccctgagccgcatggactcggaggacagcataagcagtactataatggatgtagacagcacaatttccagtgggcgttcaactccagcaatgatgaatggacaaggaagcactacttcttcaagcaaaaatattgcctataattgttgttgggaccagtgccaggcttgcttcaactctagcccagatctggcagatcacatccgttccatacatgtagatggtcagcgaggaggggtatttgtttgcttatggaaaggttgtaaagtatataacactccatctaccagtcaaagttggttacaaaggcatatgctgacacacagtggagacaaacctttcaagtgtgttgttggtggctgcaatgccagctttgcttctcagggagggctagctcgtcatgtacccacacacttcagtcagcagaactcctcaaaagtttctagccagccaaaggccaaagaagaatctccttctaaagctggaatgaacaaaaggaggaaattaaagaacaaaagacgacgctcattaccacggccacatgatttcttcgatgcacaaacactggatgcgataagacatcgagccatatgctttaacctctcagctcatatagaaagtttagggaagggacacagtgttgtttttcatagtactgtaatagctaagagaaaagaagattctgggaagatcaaacttttgcttcattggatgcctgaagacattctgcctgatgtgtgggtgaatgaaagtgaacgacatcagttaaaaactaaagtagttcatttatcaaagctacccaaagatactgccttgcttttggacccaaacatatacagaacaatgccgcagaagaggttgaagagg

SEQ ID NO: 4954 - DNA, 1551 bp, Homo sapiens
  source 1..1551: mol_type = genomic DNA
atggccgccgctatcaccgacatggccgacctggaggagctctcccgcctgagccctctgccccccggcagcccgggttcggcggcgcggggccgggctgagccccccgaggaggaggaggaagaggaggaggaggaagaggaggcggaggccgaggcggtggcggcgctgctgctgaacggcggcagcggtgggggcggcggaggcggcggcggaggagtggggggcggcgaggcagagacgatgtcggagccgagccccgagagcgccagccaggccggggaggacgaagacgaggaggaggacgacgaggaggaggaagatgagagcagcagcagcggcgggggtgaggaggagagtagcgccgagagcctggtgggcagcagcggcgggagcagcagcgacgagacccgctcgttgagccccggcgccgccagcagcagcagcggggatggggacggcaaggagggcctggaggagcccaagggaccgcggggcagccagggcggcggcgggggcggcagcagtagcagcagcgtagtctccagcggcggcgacgagggctacgggactgggggaggcggaagcagcgcgacctccgggggccggcggggcagcttggagatgtcgtcggatggggaacccctgagccgcatggactcggaggacagcataagcagtactataatggatgtagacagcacaatttccagtgggcgttcaactccagcaatgatgaatggacaaggaagcactacttcttcaagcaaaaatattgcctataattgttgttgggaccagtgccaggcttgcttcaactctagcccagatctggcagatcacatccgttccatacatgtagatggtcagcgaggaggggtatttgtttgcttatggaaaggttgtaaagtatataacactccatctaccagtcaaagttggttacaaaggcatatgctgacacacagtggagacaaacctttcaagtgtgttgttggtggctgcaatgccagctttgcttctcagggagggctagctcgtcatgtacccacacacttcagtcagcagaactcctcaaaagtttctagccagccaaaggccaaagaagaatctccttctaaagctggaatgaacaaaaggaggaaattaaagaacaaaagacgacgctcattaccacggccacatgatttcttcgatgcacaaacactggatgcgataagacatcgagccatatgctttaacctctcagctcatatagaaagtttagggaagggacacagtgttgtttttcatagtactgtaatagctaagagaaaagaagattctgggaagatcaaacttttgcttcattggatgcctgaagacattctgcctgatgtgtgggtgaatgaaagtgaacgacatcagttaaaaactaaagtagttcatttatcaaagctacccaaagatactgccttgcttttggacccaaacatatacagaacaatgccgcagaagaggttgaagagaactctgataagaaaagtgttcaatttgtatttaagcaaacag

SEQ ID NO: 4955 - DNA, 1851 bp, Homo sapiens
  source 1..1851: mol_type = genomic DNA
atggctcttcctcagggtctattgacattcagggatgtggccatagaattctctcaggaggagtggaaatgcctggaccctgctcagaggactctatacagggacgtgatgctggagaattataggaacctggtctccctggatatctcttccaaatgcatgatgaaggagttctcatcaacagcacaaggcaatagagaagtgatccacacagggacattgcaaagacatgaaagtcatcacactggagactttcgctttcaggaaattgataaagatattcataacttagagtttcagtggcaagaagatgaaagaaatagccatgaagcacccatgacagaaatcaaaaagttgactggtagtgcagaccgatatgatcaaaggcatgctggaaacaagcctattaaagatcagcttggatcaagctttcattcgcatctgcctgaactccacatgtttcagacccaagggaaaattggtaatcaagtggagaagtctatcaacgatgcttcctcaatttcaacatcccaaagaatttcttgtaggcccaaaacccatatttctaataactatgggaataatttccggaattcttcgttactcacacaaaaacaggaggtacacatgagagaaaagtctttccaatgtaatgagagtggcaaagcctttaattatagctcactcttaaggaaacatcaaataatccatttaggagagaaacaatataaatgtgatgtatgtggcaaggtctttaatcggaagcgaaacctagtgtgccatcgtagatgtcacactggggagaaaccttacaggtgtaatgagtgtggcaagactttcagtcagacgtattcccttacatgccatcgtagacttcatactggagagaaaccttacaaatgtgaagaatgtgacaaagctttcagtttcaaatcaaaccttaaaagacataggagaattcatgctggagaaaaaccatacaagtgtaatgaatgtggcaagacctttagtcagacgtcatcccttacatgccatcgtagacttcatactggagagaaacctttcaagtgtaatgagtgtggcaagacctttagtcggaagtcatcccttacatgccatcatagacttcatacgggagagaaaccttataagtgtaatgaatgtggcaagaccttcagtcaggagttaacccttaaatgccatcgtagacttcataccggagagaagccttacaagtgtaatgaatgtggcaaggtttttaataaaaaggcaaaccttgcacgtcatcatagacttcatagtggagagaaaccctacaagtgtactgagtgtgtcaagacgttcagtcgaaattcagcccttgtaattcataaggctattcatattggagagaaacgttacaagtgtaatgagtgtggcaagacgttcagtcgaatttcagccctcgtaattcatacggcaattcatactggagagaaaccttacaagtgtaatgaatgtggcaagggttttaatcggaaaacacaccttgcatgtcatcatagacttcatactggagagaaaccttacaagtgtaatgaatgtggcaaggtttttaatcgaaaaacacaccttgcacatcatcatagacttcatactggagataaaccttacaagtgtaatgaatgtggcaaggtttttaatcaaaaagcacaccttgcacgtcaccatagacttcatactggagagaaaccttacaagtgtaatgaatgtggcaaggtttttaatcaaaaagcaaaccttgcacgtcatcatagacttcatactggagagaaaccttacaagtttaatgagtgtggcaaagcttttaat

SEQ ID NO: 4956 - DNA, 4773 bp, Homo sapiens
  source 1..4773: mol_type = genomic DNA
atgaagttatatgtatttctggttaacactggaactactctaacatttgacactgaacttacagtgcaaactgtggcagaccttaagcatgccattcaaagcaaatacaagattgctattcaacaccaggtgctggtggtcaatggaggagaatgcatggctgcagatcgaagagtgtgtacctacagtgctgggacggatacaaatccaatttttctttttaacaaagaaatgatcttatgtgatcgtccacctgctattcctaaaactaccttttcgacagaaaatgacatggaaataaaagttgaagaatctcttatgatgcctgcagtttttcatactgttgcttcaaggacacagcttgcattggaaatgtatgaagttgccaagaaactttgttctttttgtgaaggtcttgtacatgatgaacatcttcaacaccaaggctgggctgcaatcatggccaacctggaggactgttcaaattcataccaaaagctacttttcaagtttgaaagtatttattcaaattatctgcagtccatagaagacatcaagttaaaacttactcatttaggaactgcagtttcagtaatggccaagattccactgttggagtgcctaaccagacatagttacagagaatgtttgggaagactggattctttacctgaacatgaagactcagaaaaagctgagatgaaaagatccactgaactggtgctctctcctgatatgcctagaacaactaacgaatctttgttaacctcatttcccaagtcagtggaacatgtgtccccagataccgcagatgctgaaagtggcaaagaaattagggaatcttgtcaaagtactgttcatcagcaagatgaaactacgattgacactaaagatggtgatctgcccttttttaatgtctctttgttagactggataaatgttcaagatagacctaatgatgtggaatctttggtcaggaagtgctttgattctatgagcaggcttgatccaaggattattcgaccatttatagcagaatgccgtcaaactattgccaaacttgataatcagaatatgaaagccattaaaggacttgaagatcggctctacgccctggaccagatgattgctagctgtggccgactggtgaatgaacagaaagagcttgctcagggatttttagctaatcagaagagagctgaaaacttaaaggatgcatctgtattacctgatttatgcctgagtcacgcaaatcagttgatgattatgttgcaaaatcatagaaaactgttagatattaagcagaagtgtaccactgccaaacaagaactagcaaataacctacatgtcagactgaagtggtgttgctttgtaatgcttcatgctgatcaagatggagagaagttacaagctttgctccgcctcgtaatagagctgttagaaagagtcaaaattgttgaagctcttagtacagttcctcagatgtactgcttagctgttgttgaggttgtaagaagaaaaatgttcataaaacactacagggagtgggctggtgctttagtcaaagatggaaagagattatatgaagcagaaaaatcaaaaagggaatcctttgggaaattatttaggaagtcttttttaagaaatcgtctgtttaggggactggactcctggcccccttccttttgtactcaaaagcctcgaaagtttgactgtgaacttccagatatttcattaaaagatttacagtttctgcaatcattttgtccttcggaagttcagccattcctcagggttcccttactttgtgactttgaacctctacaccagcatgtacttgctctacataatttggtaaaagcagcacaaagtttggatgaaatgtcacagaccattacagatctactgagtgaacaaaaggcatctgtgagtcagacatccccacagtctgcttcttcaccaaggatggaaagtacagcaggaattacaactactacctcaccgagaactcctccaccactgactgttcaggatcccttatgtcctgcagtttgtcccttagaagaattatctccagatagtattgatgcacatacgtttgattttgaaactattccccatccaaacatagaacagactattcaccaagtttctttagacttggattcattagcagaaagtcctgaatcagattttatgtctgctgtgaatgagtttgtaatagaagaaaatttgtcgtctcctaatcctataagtgatccacaaagcccagaaatgatggtggaatcactttattcatcagttatcaatgcgatagacagtagacgaatgcaggatacaaatgtatgtggtaaggaggattttggagatcatacttctctgaatgtccagttggaaagatgtagagttgttgcccaagactctcacttcagtatacaaaccattaaggaagacctttgccactttagaacatttgtacaaaaagaacagtgtgacttctcaaattcattaaaatgtacagcagtagaaataagaaacattattgaaaaagtaaaatgttctctggaaataacactaaaagaaaaacatcaaaaagaactactgtctttaaaaaatgaatatgaaggtaaacttgacggactaataaaggaaactgaagagaatgaaaacaaaattaaaaaattgaagggagagttagtatgccttgaggaggttttacaaaataaagataatgaatttgctttggttaaacatgaaaaagaagctgtaatctgcctgcagaatgaaaaggatcagaagttgttagagatggaaaatataatgcactctcaaaattgtgaaattaaagaactgaagcagtcacgagaaatagtgttagaagacttaaaaaagctccatgttgaaaatgatgagaagttacagttattgagggcagaacttcagtccttggagcaaagtcatctaaaggaattagaggacacacttcaggttaggcacatacaagagtttgagaaggttatgacagaccacagagtttctttggaggaattaaaaaaggaaaaccaacaaataattaatcaaatacaagaatctcatgctgaaattatccaggaaaaagaaaaacagttacaggaattaaaactcaaggtttctgatttgtcagacacgagatgcaagttagaggttgaacttgcgttgaaggaagcagaaactgatgaaataaaaattttgctggaagaaagcagagcccagcagaaggagaccttgaaatctcttcttgaacaagagacagaaaatttgagaacagaaattagtaaactcaaccaaaagattcaggataataatgaaaattatcaggtgggcttagcagagctaagaactttaatgacaattgaaaaagatcagtgtatttccgagttaattagtagacatgaagaagaatctaatatacttaaagctgaattaaacaaagtaacatctttgcataaccaagcatttgaaatagaaaaaaacctaaaagaacaaataattgaactgcagagtaaattggattcagaattgagtgctcttgaaagacaaaaagatgaaaaaattacccaacaagaagagaaatacgaagctattatccagaaccttgagaaagacagacaaaaattggtcagcagccaggagcaagacagagaacagttaattcagaagcttaattgtgaaaaagatgaagctattcagactgccctaaaagaatttaaattggagagagaagttgttgagaaagagttattagaaaaagttaaacatcttgagaatcaaatagcaaaaagtcctgccattgactctaccagaggagattcttcaagcttagttgctgaacttcaagaaaagcttcaggaagaaaaagctaagtttctagaacaacttgaagagcaagaaaaaagaaagaatgaagaaatgcaaaatgttcgaacatctttgattgcggaacaacagaccaattttaacactgttttaacaagagagaaaatgagaaaagaaaacataataaatgatcttagtgataagttgaaaagtacaatgcagcaacaagaacgggataaagatttgatagagtcactttctgaagatcgagctcgtttgcttgaggaaaagaaaaagcttgaagaagaagtcagtaagttgcgtagtagcagttttgttccttcaccatatgtagctacagccccagaactttatggagcttgtgcacctgaactcccaggtgaatcagatagatccgctgtggaaacagcagatgaaggaagagtggattcagcaatggagacaagcatgatgtctgtacaagaaaatattcatatgttgtctgaagaaaaacagcggataatgctgttagaacgaacattgcaattgaaagaagaagaaaataaacggttaaatcaaagactgatgtctcagagcatgtcttcagtatcttcaaggcattctgaaaagatagctattagagattttcaggtgggagatttggtactcatcatcctagacgaacgccatgacaattatgtgttatttactgttagtcctactttatattttctacattcagagtctctacctgccctggatctcaaaccagcttcaggtgcatctagaagaccctgggtacttggaaaagtaatggaaaaagaatactgtcaagccaaaaaggcacaaaacagatttaaagttcctttggggacaaagttttacagagtgaaagccgtatcatggaataagaaagta

SEQ ID NO: 4957 - DNA, 4782 bp, Homo sapiens
  source 1..4782: mol_type = genomic DNA
atgaagttatatgtatttctggttaacactggaactactctaacatttgacactgaacttacagtgcaaactgtggcagaccttaagcatgccattcaaagcaaatacaagattgctattcaacaccaggtgctggtggtcaatggaggagaatgcatggctgcagatcgaagagtgtgtacctacagtgctgggacggatacaaatccaatttttctttttaacaaagaaatgatcttatgtgatcgtccacctgctattcctaaaactaccttttcgacagaaaatgacatggaaataaaagttgaagaatctcttatgatgcctgcagtttttcatactgttgcttcaaggacacagcttgcattggaaatgtatgaagttgccaagaaactttgttctttttgtgaaggtcttgtacatgatgaacatcttcaacaccaaggctgggctgcaatcatggccaacctggaggactgttcaaattcataccaaaagctacttttcaagtttgaaagtatttattcaaattatctgcagtccatagaagacatcaagttaaaacttactcatttaggaactgcagtttcagtaatggccaagattccactgttggagtgcctaaccagacatagttacagagaatgtttgggaagactggattctttacctgaacatgaagactcagaaaaagctgagatgaaaagatccactgaactggtgctctctcctgatatgcctagaacaactaacgaatctttgttaacctcatttcccaagtcagtggaacatgtgtccccagataccgcagatgctgaaagtggcaaagaaattagggaatcttgtcaaagtactgttcatcagcaagatgaaactacgattgacactaaagatggtgatctgcccttttttaatgtctctttgttagactggataaatgttcaagatagacctaatgatgtggaatctttggtcaggaagtgctttgattctatgagcaggcttgatccaaggattattcgaccatttatagcagaatgccgtcaaactattgccaaacttgataatcagaatatgaaagccattaaaggacttgaagatcggctctacgccctggaccagatgattgctagctgtggccgactggtgaatgaacagaaagagcttgctcagggatttttagctaatcagaagagagctgaaaacttaaaggatgcatctgtattacctgatttatgcctgagtcacgcaaatcagttgatgattatgttgcaaaatcatagaaaactgttagatattaagcagaagtgtaccactgccaaacaagaactagcaaataacctacatgtcagactgaagtggtgttgctttgtaatgcttcatgctgatcaagatggagagaagttacaagctttgctccgcctcgtaatagagctgttagaaagagtcaaaattgttgaagctcttagtacagttcctcagatgtactgcttagctgttgttgaggttgtaagaagaaaaatgttcataaaacactacagggagtgggctggtgctttagtcaaagatggaaagagattatatgaagcagaaaaatcaaaaagggaatcctttgggaaattatttaggaagtcttttttaagaaatcgtctgtttaggggactggactcctggcccccttccttttgtactcaaaagcctcgaaagtttgactgtgaacttccagatatttcattaaaagatttacagtttctgcaatcattttgtccttcggaagttcagccattcctcagggttcccttactttgtgactttgaacctctacaccagcatgtacttgctctacataatttggtaaaagcagcacaaagtttggatgaaatgtcacagaccattacagatctactgagtgaacaaaaggcatctgtgagtcagacatccccacagtctgcttcttcaccaaggatggaaagtacagcaggaattacaactactacctcaccgagaactcctccaccactgactgttcaggatcccttatgtcctgcagtttgtcccttagaagaattatctccagatagtattgatgcacatacgtttgattttgaaactattccccatccaaacatagaacagactattcaccaagtttctttagacttggattcattagcagaaagtcctgaatcagattttatgtctgctgtgaatgagtttgtaatagaagaaaatttgtcgtctcctaatcctataagtgatccacaaagcccagaaatgatggtggaatcactttattcatcagttatcaatgcgatagacagtagacgaatgcaggatacaaatgtatgtggtaaggaggattttggagatcatacttctctgaatgtccagttggaaagatgtagagttgttgcccaagactctcacttcagtatacaaaccattaaggaagacctttgccactttagaacatttgtacaaaaagaacagtgtgacttctcaaattcattaaaatgtacagcagtagaaataagaaacattattgaaaaagtaaaatgttctctggaaataacactaaaagaaaaacatcaaaaagaactactgtctttaaaaaatgaatatgaaggtaaacttgacggactaataaaggaaactgaagagaatgaaaacaaaattaaaaaattgaagggagagttagtatgccttgaggaggttttacaaaataaagataatgaatttgctttggttaaacatgaaaaagaagctgtaatctgcctgcagaatgaaaaggatcagaagttgttagagatggaaaatataatgcactctcaaaattgtgaaattaaagaactgaagcagtcacgagaaatagtgttagaagacttaaaaaagctccatgttgaaaatgatgagaagttacagttattgagggcagaacttcagtccttggagcaaagtcatctaaaggaattagaggacacacttcaggttaggcacatacaagagtttgagaaggttatgacagaccacagagtttctttggaggaattaaaaaaggaaaaccaacaaataattaatcaaatacaagaatctcatgctgaaattatccaggaaaaagaaaaacagttacaggaattaaaactcaaggtttctgatttgtcagacacgagatgcaagttagaggttgaacttgcgttgaaggaagcagaaactgatgaaataaaaattttgctggaagaaagcagagcccagcagaaggagaccttgaaatctcttcttgaacaagagacagaaaatttgagaacagaaattagtaaactcaaccaaaagattcaggataataatgaaaattatcaggtgggcttagcagagctaagaactttaatgacaattgaaaaagatcagtgtatttccgagttaattagtagacatgaagaagaatctaatatacttaaagctgaattaaacaaagtaacatctttgcataaccaagcatttgaaatagaaaaaaacctaaaagaacaaataattgaactgcagagtaaattggattcagaattgagtgctcttgaaagacaaaaagatgaaaaaattacccaacaagaagagaaatacgaagctattatccagaaccttgagaaagacagacaaaaattggtcagcagccaggagcaagacagagaacagttaattcagaagcttaattgtgaaaaagatgaagctattcagactgccctaaaagaatttaaattggagagagaagttgttgagaaagagttattagaaaaagttaaacatcttgagaatcaaatagcaaaaagtcctgccattgactctaccagaggagattcttcaagcttagttgctgaacttcaagaaaagcttcaggaagaaaaagctaagtttctagaacaacttgaagagcaagaaaaaagaaagaatgaagaaatgcaaaatgttcgaacatctttgattgcggaacaacagaccaattttaacactgttttaacaagagagaaaatgagaaaagaaaacataataaatgatcttagtgataagttgaaaagtacaatgcagcaacaagaacgggataaagatttgatagagtcactttctgaagatcgagctcgtttgcttgaggaaaagaaaaagcttgaagaagaagtcagtaagttgcgtagtagcagttttgttccttcaccatatgtagctacagccccagaactttatggagcttgtgcacctgaactcccaggtgaatcagatagatccgctgtggaaacagcagatgaaggaagagtggattcagcaatggagacaagcatgatgtctgtacaagaaaatattcatatgttgtctgaagaaaaacagcggataatgctgttagaacgaacattgcaattgaaagaagaagaaaataaacggttaaatcaaagactgatgtctcagagcatgtcttcagtatcttcaaggcattctgaaaagatagctattagagattttcaggtgggagatttggtactcatcatcctagacgaacgccatgacaattatgtgttatttactgttagtcctactttatattttctacattcagagtctctacctgccctggatctcaaaccaggtgagggtgcttcaggtgcatctagaagaccctgggtacttggaaaagtaatggaaaaagaatactgtcaagccaaaaaggcacaaaacagatttaaagttcctttggggacaaagttttacagagtgaaagccgtatcatggaataagaaagta

SEQ ID NO: 4958 - DNA, 1056 bp, Homo sapiens
  source 1..1056: mol_type = genomic DNA
atgaacaccatcgtcttcaacaagctcagcggtgcggtgctgtttgaggacggaggcgcctcggagcgggagcggggtggccggccctacagcggtgtcctggacagtcctcacgcccgccccgaggtgggcattcccgacggcccgcccctcaaggacaacctcggcctgagacaccggaggaccggcgcccggcagaatggcgggaaggtgaggcacaagcggcaggccctgcaagacatggcgcgacccctcaagcagtggctttacaagcaccgtgacaacccgtaccccaccaagaccgagaagatactcttggccctcggctcgcagatgacgctagtgcaggtgtcaaattggtttgctaatgcaagacgtcggcttaagaataccgttcgacagccagatttaagctgggctttgagaataaagttatacaacaagtatgttcaaggcaatgctgaacggcttagcgtaagcagtgatgactcatgttctgaagatggagaaaatcctccaagaacccacatgaacgaagggggctataataccccagttcaccatcctgtgattaaaagtgagaattcggtcatcaaagcgggagtgaggccagagtcacgggccagtgaggactacgtggcaccccccaaatacaagagcagcttgttgaaccgttaccttaatgactctttgagacatgtcatggccacgaacactaccatgatgggaaaaacaaggcaaagaaaccactcgggatcttttagctccaatgaatttgaggaagaattagtgtctccatcgtcatcagaaactgaaggcaactttgtctatcgcacagacactctggaaaacggatccaataagggtgaaagcgcagctaacagaaaaggaccaagcaaggatgacacgtattggaaggagatcaacgcagctatggccttaacaaatcttgcacagggaaaggacaaactgcagggaactaccagctgcatcatccagaagtcgtcccatatagcagaagtaaagactgtcaaagtgccgctggtgcagcagttt

SEQ ID NO: 4959 - DNA, 864 bp, Homo sapiens
  source 1..864: mol_type = genomic DNA
atggcagccgccgcctatgtggaccacttcgccgccgagtgcctcgtgtccatgtcgagccgcgcggtcgtgcacgggccgcgggaggggccggagtcccggcccgagggcgcggccgtggccgccacccccacgctgccccgcgtcgaggagcgccgcgacggtaaggacagcgcctcgctcttcgtggtggcgcggatcctagcggacctcaaccagcaagcgccggcgcccgccccggcggagcgcagggagggcgccgcggcccggaaggcgaggaccccctgccgcctgccgccgcccgcccccgagcccacctcccccggcgccgaaggcgcggcggccgcgccccccagcccggcgtggagcgagccggagcccgaggcggggctggagcccgagcgggagccggggcccgcggggagcggcgagcccggcctcagacaaagggtccggcggggccgaagtcgcgccgacctcgagtccccgcagaggaagcacaagtgccactacgcgggctgcgagaaagtttacgggaaatcttcgcacctcaaggcgcacctgagaactcacacaggtgagaggcccttcgcctgcagctggcaggactgcaacaagaagttcgcgcgctccgacgagctggcgcggcactaccgcacacacacgggcgagaagaagttcagctgccccatctgcgagaagcgcttcatgcgcagcgaccacctgaccaagcacgcgcgccgccacgccaacttccacccgggaatgctgcagcggcgcggcgggggctcgcggaccggctccctcagcgactacagccgctccgacgccagcagccccaccatcagcccggccagctcgccc

SEQ ID NO: 4960 - DNA, 1485 bp, Homo sapiens
  source 1..1485: mol_type = genomic DNA
atggacatatgtgagtccatcctggagaggaagcggcatgacagcgaaaggtctacttgcagcatcttggagcagacagacatggaagctgtcgaggctcttgtttgtatgagctcctggggtcaaagatcccagaaaggtgacctgttgcggataagacccctcacgcctgtctctgactctggggatgtcaccaccactgtgcatatggatgcagccacacctgaactaccaaaagacttccattctttatcgactctgtgcataactcctcctcagagccctgatctcgtggagccatcgacaaggacacctgtttctccccaagtaacagattccaaagcatgtacagccacggatgttctccagtcctctgccgtagtggccagagctctgagcgggggcgcggagaggggcttgctgggtttggagccagtgcccagctctccctgcagggccaaggggactagcgtgatccgacacactggggagagccctgctgcctgctttcccaccatccagactccagattgccggctttctgacagcagagaaggagaagagcagcttctgggacactttgaaactttgcaggacacacacctcacggacagtttactcagcactaacttggtgtcctgtcagccctgcttgcacaagtctggtggcctgctgctcactgacaaaggccagcaggcagggtggcctggtgcagttcagacttgctcaccaaagaattatgaaaatgacctgcccaggaaaaccacccctctgatttctgtctctgtccctgctccccctgtcctttgccagatgatccctgtgactggacaaagtagcatgttaccagcttttttgaagccccctccccagttgtctgtggggactgtgagacccatcctagctcaggctgctccagcgcctcaacctgtgttcgtgggacctgctgtgcctcagggagctgtgatgttggtcctgccccagggagccctccctccgcctgccccctgtgcagccaatgtcatggctgccgggaataccaagttgttgccccttgcccctgctccagtgttcatcacctctagccaaaactgtgtccctcaggtagacttttcccgaaggaggaactatgtatgcagcttcccaggttgccggaagacctacttcaaaagttcccaccttaaggcccatcttcgcactcacacaggggagaagcctttcaactgcagctgggatggctgtgataaaaagtttgctcgttcggatgagctgtcacgccaccgcagaactcacacaggggagaagaagtttgtgtgcccggtgtgtgaccgacgtttcatgcgcagtgaccacctgacgaagcatgcccggcgccacatgacgaccaagaagatcccaggctggcaggcagaggttggcaagctgaacagaatcgcctctgcagagagcccggggagcccactggtgagcatgccagcctctgcc

SEQ ID NO: 4961 - DNA, 1536 bp, Homo sapiens
  source 1..1536: mol_type = genomic DNA
atgcacacgccggacttcgcaggcccagacgacgcgcgcgcagttgacatcatggacatatgtgagtccatcctggagaggaagcggcatgacagcgaaaggtctacttgcagcatcttggagcagacagacatggaagctgtcgaggctcttgtttgtatgagctcctggggtcaaagatcccagaaaggtgacctgttgcggataagacccctcacgcctgtctctgactctggggatgtcaccaccactgtgcatatggatgcagccacacctgaactaccaaaagacttccattctttatcgactctgtgcataactcctcctcagagccctgatctcgtggagccatcgacaaggacacctgtttctccccaagtaacagattccaaagcatgtacagccacggatgttctccagtcctctgccgtagtggccagagctctgagcgggggcgcggagaggggcttgctgggtttggagccagtgcccagctctccctgcagggccaaggggactagcgtgatccgacacactggggagagccctgctgcctgctttcccaccatccagactccagattgccggctttctgacagcagagaaggagaagagcagcttctgggacactttgaaactttgcaggacacacacctcacggacagtttactcagcactaacttggtgtcctgtcagccctgcttgcacaagtctggtggcctgctgctcactgacaaaggccagcaggcagggtggcctggtgcagttcagacttgctcaccaaagaattatgaaaatgacctgcccaggaaaaccacccctctgatttctgtctctgtccctgctccccctgtcctttgccagatgatccctgtgactggacaaagtagcatgttaccagcttttttgaagccccctccccagttgtctgtggggactgtgagacccatcctagctcaggctgctccagcgcctcaacctgtgttcgtgggacctgctgtgcctcagggagctgtgatgttggtcctgccccagggagccctccctccgcctgccccctgtgcagccaatgtcatggctgccgggaataccaagttgttgccccttgcccctgctccagtgttcatcacctctagccaaaactgtgtccctcaggtagacttttcccgaaggaggaactatgtatgcagcttcccaggttgccggaagacctacttcaaaagttcccaccttaaggcccatcttcgcactcacacaggggagaagcctttcaactgcagctgggatggctgtgataaaaagtttgctcgttcggatgagctgtcacgccaccgcagaactcacacaggggagaagaagtttgtgtgcccggtgtgtgaccgacgtttcatgcgcagtgaccacctgacgaagcatgcccggcgccacatgacgaccaagaagatcccaggctggcaggcagaggttggcaagctgaacagaatcgcctctgcagagagcccggggagcccactggtgagcatgccagcctctgcc

SEQ ID NO: 4962 - DNA, 1440 bp, Homo sapiens
  source 1..1440: mol_type = genomic DNA
atgctcaacttcggtgcctctctccagcagactgcggaggaaagaatggaaatgatttctgaaaggccaaaagagagtatgtattcctggaacaaaactgcagagaaaagtgattttgaagctgtagaagcacttatgtcaatgagctgcagttggaagtctgattttaagaaatacgttgaaaacagacctgttacaccagtatctgatttgtcagaggaagagaatctgcttccgggaacacctgattttcatacaatcccagcattttgtttgactccaccttacagtccttctgactttgaaccctctcaagtgtcaaatctgatggcaccagcgccatctactgtacacttcaagtcactctcagatactgccaaacctcacattgccgcacctttcaaagaggaagaaaagagcccagtatctgcccccaaactccccaaagctcaggcaacaagtgtgattcgtcatacagctgatgcccagctatgtaaccaccagacctgcccaatgaaagcagccagcatcctcaactatcagaacaattcttttagaagaagaacccacctaaatgttgaggctgcaagaaagaacataccatgtgccgctgtgtcaccaaacagatccaaatgtgagagaaacacagtggcagatgttgatgagaaagcaagtgctgcactttatgacttttctgtgccttcctcagagacggtcatctgcaggtctcagccagcccctgtgtccccacaacagaagtcagtgttggtctctccacctgcagtatctgcagggggagtgccacctatgccggtcatctgccagatggttccccttcctgccaacaaccctgttgtgacaacagtcgttcccagcactcctcccagccagccaccagccgtttgcccccctgttgtgttcatgggcacacaagtccccaaaggcgctgtcatgtttgtggtaccccagcccgttgtgcagagttcaaagcctccggtggtgagcccgaatggcaccagactctctcccattgcccctgctcctgggttttccccttcagcagcaaaagtcactcctcagattgattcatcaaggataaggagtcacatctgtagccacccaggatgtggcaagacatactttaaaagttcccatctgaaggcccacacgaggacgcacacaggagaaaagcctttcagctgtagctggaaaggttgtgaaaggaggtttgcccgttctgatgaactgtccagacacaggcgaacccacacgggtgagaagaaatttgcgtgccccatgtgtgaccggcggttcatgaggagtgaccatttgaccaagcatgcccggcgccatctatcagccaagaagctaccaaactggcagatggaagtgagcaagctaaatgacattgctctacctccaacccctgctcccacacag

SEQ ID NO: 4963 - DNA, 1407 bp, Homo sapiens
  source 1..1407: mol_type = genomic DNA
atggaggaaagaatggaaatgatttctgaaaggccaaaagagagtatgtattcctggaacaaaactgcagagaaaagtgattttgaagctgtagaagcacttatgtcaatgagctgcagttggaagtctgattttaagaaatacgttgaaaacagacctgttacaccagtatctgatttgtcagaggaagagaatctgcttccgggaacacctgattttcatacaatcccagcattttgtttgactccaccttacagtccttctgactttgaaccctctcaagtgtcaaatctgatggcaccagcgccatctactgtacacttcaagtcactctcagatactgccaaacctcacattgccgcacctttcaaagaggaagaaaagagcccagtatctgcccccaaactccccaaagctcaggcaacaagtgtgattcgtcatacagctgatgcccagctatgtaaccaccagacctgcccaatgaaagcagccagcatcctcaactatcagaacaattcttttagaagaagaacccacctaaatgttgaggctgcaagaaagaacataccatgtgccgctgtgtcaccaaacagatccaaatgtgagagaaacacagtggcagatgttgatgagaaagcaagtgctgcactttatgacttttctgtgccttcctcagagacggtcatctgcaggtctcagccagcccctgtgtccccacaacagaagtcagtgttggtctctccacctgcagtatctgcagggggagtgccacctatgccggtcatctgccagatggttccccttcctgccaacaaccctgttgtgacaacagtcgttcccagcactcctcccagccagccaccagccgtttgcccccctgttgtgttcatgggcacacaagtccccaaaggcgctgtcatgtttgtggtaccccagcccgttgtgcagagttcaaagcctccggtggtgagcccgaatggcaccagactctctcccattgcccctgctcctgggttttccccttcagcagcaaaagtcactcctcagattgattcatcaaggataaggagtcacatctgtagccacccaggatgtggcaagacatactttaaaagttcccatctgaaggcccacacgaggacgcacacaggagaaaagcctttcagctgtagctggaaaggttgtgaaaggaggtttgcccgttctgatgaactgtccagacacaggcgaacccacacgggtgagaagaaatttgcgtgccccatgtgtgaccggcggttcatgaggagtgaccatttgaccaagcatgcccggcgccatctatcagccaagaagctaccaaactggcagatggaagtgagcaagctaaatgacattgctctacctccaacccctgctcccacacag

SEQ ID NO: 4964 - DNA, 1167 bp, Homo sapiens
  source 1..1167: mol_type = genomic DNA
atgtacggccgaccgcaggctgagatggaacaggaggctggggagctgagccggtggcaggcggcgcaccaggctgcccaggataacgagaactcagcgcccatcttgaacatgtcttcatcttctggaagctctggagtgcacacctcttggaaccaaggcctaccaagcattcagcactttcctcacagcgcagagatgctggggtcccctttggtgtctgttgaggcgccggggcagaatgtgaatgaaggggggccacagttcagtatgccactgcctgagcgtggtatgagctactgcccccaagcgactctcactccttcccggatgatttactgtcagagaatgtctccccctcagcaagagatgacgattttcagtgggccccaactaatgcccgtaggagagcccaatattccaagggtagccaggcccttcggtgggaatctaaggatgccccccaatgggctgccagtctcggcttccactggaatcccaataatgtcccacactgggaaccctccagtgccttaccctggcctctcgacagtaccttctgacgaaacattgttgggcccgactgtgccttccactgaggcccaggcagtgctcccctccatggctcagatgttgcccccgcaagatgcccatgaccttgggatgcccccagctgagtcccagtcattgctggttttaggatctcaggactctcttgtcagtcagccagactctcaagaaggcccatttctaccagagcagcccggacctgctccacagacagtagagaagaactccaggcctcaggaagggactggtagaaggggctcctcagaggcaaggccttactgctgcaactacgagaactgcggaaaagcttataccaaacgctcccacctcgtgagccaccagcgcaagcacacaggtgagaggccatattcttgcaactgggaaagttgttcatggtctttcttccgttctgatgagcttagacgacatatgcgggtacacaccagatatcgaccatataaatgtgatcagtgcagccgggagttcatgaggtctgaccatctcaagcaacaccagaagactcatcggccgggaccctcagacccacaggccaacaacaacaatggagagcaggacagtcctcctgctgctggtcct

SEQ ID NO: 4965 - DNA, 756 bp, Homo sapiens
  source 1..756: mol_type = genomic DNA
atgtcggcggccgtggcgtgcgtggattacttcgccgccgacgtgctcatggccatctcttcgggcgccgtggtgcaccgcgggcggcccggccccgagggcgcgggccccgccgccggcctggatgtgcgcgcggcgcgccgcgaggccgcctcacccgggaccccggggccacccccgccgccccccgccgcttctggcccgggccccggcgccgccgcggcgccccacctgctggccgccagcatcctggccgacctgcgcggcggacccggagccgccccggggggcgcctcgcccgcctcctcctcctcagccgcctcgtccccgtcctcgggccgcgcccccggcgccgcgccctccgccgccgccaagagccaccgctgtcccttcccggactgcgccaaagcctactacaagtcctcgcacctaaagtcgcacctgcggacgcacacaggggaacgcccttttgcttgtgactggcagggctgcgacaagaagttcgcccgctccgacgagctggcccgccaccaccggacgcacacgggcgagaagcgcttctcctgccctctgtgctccaagcgcttcacccgcagtgaccacctggccaagcacgcccgccgccaccccggcttccacccggacctgctccggcgccctggtgcccgcagtacctcccccagcgactcgctgccctgcagcctggccgggagccctgcgcccagccccgcgcccagcccagcccccgcaggcctg

SEQ ID NO: 4966 - DNA, 1248 bp, Homo sapiens
  source 1..1248: mol_type = genomic DNA
atggtggaccacttacttccagtggacgagaacttctcgtcgccaaaatgcccagttgggtatctgggtgataggctggttggccggcgggcatatcacatgctgccctcacccgtctctgaagatgacagcgatgcctccagcccctgctcctgttccagtcccgactctcaagccctctgctcctgctatggtggaggcctgggcaccgagagccaggacagcatcttggacttcctattgtcccaggccacgctgggcagtggcgggggcagcggcagtagcattggggccagcagtggccccgtggcctgggggccctggcgaagggcagcggcccctgtgaagggggagcatttctgcttgcccgagtttcctttgggtgatcctgatgacgtcccacggcccttccagcctaccctggaggagattgaagagtttctggaggagaacatggagcctggagtcaaggaggtccctgagggcaacagcaaggacttggatgcctgcagccagctctcagctgggccacacaagagccacctccatcctgggtccagcgggagagagcgctgttcccctccaccaggtggtgccagtgcaggaggtgcccagggcccaggtgggggccccacgcctgatggccccatcccagtgttgctgcagatccagcccgtgcctgtgaagcaggaatcgggcacagggcctgcctcccctgggcaagccccagagaatgtcaaggttgcccagctcctggtcaacatccaggggcagaccttcgcactcgtgccccaggtggtaccctcctccaacttgaacctgccctccaagtttgtgcgcattgcccctgtgcccattgccgccaagcctgttggatcgggacccctggggcctggccctgccggtctcctcatgggccagaagttccccaagaacccagccgcagaactcatcaaaatgcacaaatgtactttccctggctgcagcaagatgtacaccaaaagcagccacctcaaggcccacctgcgccggcacacgggtgagaagcccttcgcctgcacctggccaggctgcggctggaggttctcgcgctctgacgagctgtcgcggcacaggcgctcgcactcaggtgtgaagccgtaccagtgtcctgtgtgcgagaagaagttcgcgcggagcgaccacctctccaagcacatcaaggtgcaccgcttcccgcggagcagccgctccgtgcgctccgtgaac

SEQ ID NO: 4967 - DNA, 969 bp, Homo sapiens
  source 1..969: mol_type = genomic DNA
atgtcggccgccgtggcgtgcctggactacttcgccgccgagtgcctggtgtccatgtccgcgggcgccgtggttcaccgccgcccgccggaccccgagggcgcgggtggagccgctggctcggaggtgggtgcggcgccgccggagtccgctctgccgggtccggggccaccggggcccgcgtcggtcccccagctcccgcaggtccccgcccccagccccggcgcgggcggcgccgcgccccacctgctggctgcaagcgtctgggcggacttgcgcggcagctctggcgagggctcctgggagaactcgggggaagctccacgcgcctcgtccggcttctccgacccgatcccgtgctccgtccagaccccgtgctccgagctggctcccgcctccggcgccgcggcggtctgcgctcccgagagctcctccgatgcgcccgccgtcccaagcgcgcctgctgccccgggcgcaccagcagcctctggtgggttctctggaggggccctaggggcaggccccgcccccgccgcggatcaggcgccccggaggaggtctgtcacacctgctgccaagcgccaccaatgccccttcccgggctgcaccaaagcctattacaagtcgtcgcacctcaagtcccaccagcgcacccacacgggtgagcgccctttctcctgcgactggctcgactgcgacaagaagtttacgcgttccgacgagctggcccgccactacaggacgcacacgggcgagaagcgcttctcctgccccctctgccccaagcagttctcccggagcgaccacctgaccaagcatgctcgccgccacccaacctatcatccagatatgatcgagtaccggggacgtcgtcgaactccccgcatcgacccgccactcaccagcgaggtggaaagctccgcctccggctccggtcccggcccggcgcccagcttcaccacctgcctg

SEQ ID NO: 4968 - DNA, 1299 bp, Homo sapiens
  source 1..1299: mol_type = genomic DNA
atgtccatacttgccaaaatgggggactggcaggaccgtcacgacggcaccagcaacgggacggcacggttgccccagctgggcactgtaggtcaatctccctacacgagcgccccgccgctgtcccacacccccaatgccgacttccagcccccatacttccccccaccctaccagcctatctacccccagtcgcaagatccttactcccacgtcaacgacccctacagcctgaaccccctgcacgcccagccgcagccgcagcacccaggctggcccggccagaggcagagccaggagtctgggctcctgcacacgcaccgggggctgcctcaccagctgtcgggcctggatcctcgcagggactacaggcggcacgaggacctcctgcacggcccacacgcgctcagctcaggactcggagacctctcgatccactccttacctcacgccatcgaggaggtcccgcatgtagaagacccgggtattaacatcccagatcaaactgtaattaagaaaggccccgtgtccctgtccaagtccaacagcaatgccgtctccgccatccctattaacaaggacaacctcttcggcggcgtggtgaaccccaacgaagtcttctgttcagttccgggtcgcctctcgctcctcagctccacctcgaagtacaaggtcacggtggcggaagtgcagcggcggctctcaccacccgagtgtctcaacgcgtcgctgctgggcggagtgctccggagggcgaagtctaaaaatggaggaagatctttaagagaaaaactggacaaaataggattaaatctgcctgcagggagacgtaaagctgccaacgttaccctgctcacatcactagtagagggagaagctgtccacctagccagggactttgggtacgtgtgcgaaaccgaatttcctgccaaagcagtagctgaatttctcaaccgacaacattccgatcccaatgagcaagtgacaagaaaaaacatgctcctggctacaaaacagatatgcaaagagttcaccgacctgctggctcaggaccgatctcccctggggaactcacggcccaaccccatcctggagcccggcatccagagctgcttgacccacttcaacctcatctcccacggcttcggcagccccgcggtgtgtgccgcggtcacggccctgcagaactatctcaccgaggccctcaaggccatggacaaaatgtacctcagcaacaaccccaacagccacacggacaacaacgccaaaagcagtgacaaagaggagaagcacagaaag

SEQ ID NO: 4969 - DNA, 1311 bp, Homo sapiens
  source 1..1311: mol_type = genomic DNA
atgctttggaaattgacggataatatcaagtacgaggactgcgaggaccgtcacgacggcaccagcaacgggacggcacggttgccccagctgggcactgtaggtcaatctccctacacgagcgccccgccgctgtcccacacccccaatgccgacttccagcccccatacttccccccaccctaccagcctatctacccccagtcgcaagatccttactcccacgtcaacgacccctacagcctgaaccccctgcacgcccagccgcagccgcagcacccaggctggcccggccagaggcagagccaggagtctgggctcctgcacacgcaccgggggctgcctcaccagctgtcgggcctggatcctcgcagggactacaggcggcacgaggacctcctgcacggcccacacgcgctcagctcaggactcggagacctctcgatccactccttacctcacgccatcgaggaggtcccgcatgtagaagacccgggtattaacatcccagatcaaactgtaattaagaaaggccccgtgtccctgtccaagtccaacagcaatgccgtctccgccatccctattaacaaggacaacctcttcggcggcgtggtgaaccccaacgaagtcttctgttcagttccgggtcgcctctcgctcctcagctccacctcgaagtacaaggtcacggtggcggaagtgcagcggcggctctcaccacccgagtgtctcaacgcgtcgctgctgggcggagtgctccggagggcgaagtctaaaaatggaggaagatctttaagagaaaaactggacaaaataggattaaatctgcctgcagggagacgtaaagctgccaacgttaccctgctcacatcactagtagagggagaagctgtccacctagccagggactttgggtacgtgtgcgaaaccgaatttcctgccaaagcagtagctgaatttctcaaccgacaacattccgatcccaatgagcaagtgacaagaaaaaacatgctcctggctacaaaacagatatgcaaagagttcaccgacctgctggctcaggaccgatctcccctggggaactcacggcccaaccccatcctggagcccggcatccagagctgcttgacccacttcaacctcatctcccacggcttcggcagccccgcggtgtgtgccgcggtcacggccctgcagaactatctcaccgaggccctcaaggccatggacaaaatgtacctcagcaacaaccccaacagccacacggacaacaacgccaaaagcagtgacaaagaggagaagcacagaaag

SEQ ID NO: 4970 - DNA, 1350 bp, Homo sapiens
  source 1..1350: mol_type = genomic DNA
atgttgtggaaaataaccgataatgtcaagtacgaagaggactgcgaggatcgccacgacgggagcagcaatgggaatccgcgggtcccccacctctcctccgccgggcagcacctctacagccccgcgccacccctctcccacactggagtcgccgaatatcagccgccaccctactttccccctccctaccagcagctggcctactcccagtcggccgacccctactcgcatctgggggaagcgtacgccgccgccatcaaccccctgcaccagccggcgcccacaggcagccagcagcaggcctggcccggccgccagagccaggagggagcggggctgccctcgcaccacgggcgcccggccggcctactgccccacctctccgggctggaggcgggcgcggtgagcgcccgcagggatgcctaccgccgctccgacctgctgctgccccacgcacacgccctggatgccgcgggcctggccgagaacctggggctccacgacatgcctcaccagatggacgaggtgcagaatgtcgacgaccagcacctgttgctgcacgatcagacagtcattcgcaaaggtcccatttccatgaccaagaaccctctgaacctcccctgtcagaaggagctggtgggggccgtaatgaaccccactgaggtcttctgctcagtccctggaagattgtcgctcctcagctctacgtctaaatacaaagtgacagtggctgaagtacagaggcgactgtccccacctgaatgcttaaatgcctcgttactgggaggtgttctcagaagagccaaatcgaaaaatggaggccggtccttgcgggagaagttggacaagattgggttgaatcttccggccgggaggcggaaagccgctcatgtgactctcctgacatccttagtagaaggtgaagctgttcatttggctagggactttgcctatgtctgtgaagccgaatttcctagtaaaccagtggcagaatatttaaccagacctcatcttggaggacgaaatgagatggcagctaggaagaacatgctattggcggcccagcaactgtgtaaagaattcacagaacttctcagccaagaccggacaccccatgggaccagcaggctcgccccagtcttggagacgaacatacagaactgcttgtctcatttcagcctgattacccacgggtttggcagccaggccatctgtgccgcggtgtctgccctgcagaactacatcaaagaagccctgattgtcatagacaaatcctacatgaaccctggagaccagagtccagctgattctaacaaaaccctggagaaaatggagaaacacaggaaa

SEQ ID NO: 4971 - DNA, 1380 bp, Homo sapiens
  source 1..1380: mol_type = genomic DNA
atgcactcacctcctagagaccaggctgccatcatgctctggaagcttgtggagaatgtcaagtacgaagatatctatgaggaccggcacgatggtgtcccgagccacagctcgcggctctcccagctgggctcggtgtcccaaggaccctactcgagcgccccgccgctgtcccacaccccgtcgtcggacttccagccgccctacttcccacccccctaccagccgctcccctaccaccagagccaggacccctactcccacgtcaacgacccctactccctgaacccactgcaccagccccagcaacatccctgggggcaacggcagcggcaagaagtgggttcggaagccggctctctcctgccccagcctcgggccgccttgccccagctctcgggccttgacccccggagggactaccactcggtccgccggccggacgtgctgctgcattcggcgcaccacggcctggacgcgggcatgggtgacagcctctcgctgcacggcctcggccatcccggaatggaagacgtccagtcagttgaagatgccaataacagcggcatgaatctattggaccagtctgtcattaaaaaagttccagttcctcccaaatcggtgacttctctaatgatgaataaagacggcttcctgggaggcatgtctgtcaacaccggcgaggtgttttgctccgtcccaggccgtttgtctctgctcagttcaacttcgaagtacaaagtaactgtgggagaagttcagagacggctgtcgccccctgaatgcctcaatgcatctctcctcggcggagtcctcagaagagccaaatcgaaaaatggggggagatctttgcgagaaaggctagaaaaaatcggtttgaatttacccgcgggcaggcgcaaagcagcaaatgtcacgttactcacctccctggtggaaggagaagctgttcacttagctagggattttgggtacatttgcgaaacggagtttcccgccaaagccgtctctgagtatttgaaccggcagcacacagacccgagtgacctgcactcccgaaagaatatgctgttggccaccaagcaactttgtaaagaatttacggatctactggcgcaggaccggacaccgatagggaacagccgacccagccccatcctggagccggggatccagagctgcctcacgcacttcagcctcatcacgcacggcttcggcgccccggccatttgcgccgcgctcacggccctgcagaactatctcaccgaggcgctcaaaggcatggacaagatgttcttgaacaacaccaccactaacaggcacacgtctggggaaggcccaggtagtaaaactggcgacaaggaggagaaacacaggaaa

SEQ ID NO: 4972 - DNA, 1326 bp, Homo sapiens
  source 1..1326: mol_type = genomic DNA
atgctggtgcacacctactccgccatggagcgccccgacgggctgggagcagctgccggcggggcccgcctgtcgtctctgccccaggcggcctacgggccggcgcccccgctctgccacacgccggccgccacagctgccgccgaattccagccgccctacttcccgccgccctacccgcagccaccgctgccctacggtcaggcgcccgacgccgccgcagcctttccccacctggcaggggacccatatggcggcctggcgcccctggcgcagccgcagcctcctcaggccgcctgggccgcgccccgcgcagccgcccgcgcccacgaggagcctcccggcctgctggcaccgcccgcccgcgccctgggccttgacccgcgccgtgactatgccactgccgtgccccggctcctgcacggcctggccgacggcgcgcacggcctggcagacgcacctctcggccttccggggctggcggcggcccccggtctggaggacctgcaggcaatggacgagccgggaatgagcctcctagaccagtccgtgatcaagaaagtgcccatcccctccaaagccagcagcctctcagccctctccttggccaaagacagcctggtgggcggcatcacaaatcctggtgaggtcttctgctccgtgcccggccggctttcactgctcagctcaacgtccaagtacaaggtgacggtgggggaggtgcagcggcgactctcgcctcccgagtgcctcaacgcctccctcctggggggtgtcctccgcagggccaagtccaaaaatgggggccggtgtttgcgggaacggttagagaagattgggctcaacctgccagctggccgtcgcaaggccgccaatgtgacgctgctgacttcgctagtggaaggagaggccgtgcacctggcccgagacttcggttacgtctgtgagacggagttcccagccaaggcagctgccgagtacctgtgccgacagcacgctgacccgggggagctgcacagccgcaagagcatgctgctggctgccaagcagatctgcaaggagtttgcagacttgatggctcaggaccgctcaccgctgggcaacagccgcccagcactcatcctggagcccggagtacagagctgcttgacacactttagcctcatcacccatggcttcggtgggcctgccatctgtgctgccctcactgccttccagaactatttgctggagtcactcaaggggctggacaagatgtttctaagcagtgtgggcagtgggcatggtgaaaccaaggcttcggagaaggatgccaagcatcggaaa

SEQ ID NO: 4973 - DNA, 1356 bp, Homo sapiens
  source 1..1356: mol_type = genomic DNA
atgtcaactacctttccgggactagtccacgatgccgagatacgtcacgacggatcaaacagctaccgtttgatgcagcttggctgtctggagtcagtagccaattccactgtcgcctattcctcctcctctcctttaacttactccaccaccggcaccgagtttgcgtccccctacttctccactaaccaccagtacaccccgctccaccaccagtccttccattacgagtttcagcacagccacccggccgtcacccccgacgcctactctctgaactctctccaccactcgcaacagtactaccagcagatccaccacggggagcccaccgactttattaacctgcacaatgcgcgggcgctcaagtcgtcctgcctggacgagcagaggcgggagctgggctgcctcgatgcctaccgccgccatgacctgtccctcatgagccatggctctcagtatggaatgcacccagatcaaagactcctgccagggcccagcctggggctggccgccgcgggagcagacgacttgcagggctctgtggaggcccagtgtgggcttgttctcaatggccaaggtggagtgataagaagaggtggcacctgtgtggtcaaccccacagacttattttgctctgtccctggccgtttgtcccttcttagttctacttccaaatacaaggtgaccattgctgaggtaaagaggcgcctctccccacctgagtgcctcaatgcttcactcttgggaggcattttgagaagagcaaaatcaaagaatgggggccgctgcctgagagagaaattggataggcttggcttaaacttaccagcaggaagacggaaagcagctaatgtcaccctccttacttccttggttgaaggggaggctttgcacttggctcgggattttggctacacttgtgaaacagagtttccagccaaagcagtaggagaacatcttgccagacaacatatggaacagaaagaacagacagcaagaaaaaagatgatcctggcgaccaaacaaatctgtaaagaattccaagacctcttgagccaagatagatcaccactgggatcctccagacccactccaattctagaccttgacatccagagacatttaacacatttcagtttgatcactcatggctttgggactccggcaatatgtgcagctctaagcactttccaaacagttctcagtgaaatgctgaactacttggaaaaacacactactcacaagaacggcggagcggcggattctggccaaggacatgccaactcggagaaagctcccctgcggaaaacttcagaggctgccgtgaaagagggcaaaacagaaaagacagac

SEQ ID NO: 4974 - DNA, 1500 bp, Homo sapiens
  source 1..1500: mol_type = genomic DNA
atggccacggcggcttctaacccctacctgccggggaacagcctgctcgcggccggctctattgtgcactcggacgcggcaggggctggcggcggcgggggtggcggcggcggcggcggcgggggcggcgcagggggcgggggcggcggcatgcagccgggcagcgccgccgtgacctcgggcgcctaccggggggacccgtcctctgtcaagatggtccagagcgacttcatgcagggggccatggccgccagcaacggcggccatatgctgagccacgcgcaccagtgggtcacagccctgccccacgccgccgccgccgccgccgctgccgccgccgccgccgtggaggcgagctcgccgtggtcgggcagcgccgtgggcatggctggcagcccccagcagccaccgcagccgccgccgccaccgccgcagggccccgacgtgaagggcggcgccgggcgcgacgacctgcacgcgggcacagcgctgcaccaccgcgggccgccgcacctcggacccccgccgccgcccccacaccagggccaccctgggggctggggggcggccgccgctgccgcagccgcagccgccgccgccgccgccgccgcgcacctcccgtccatggccgggggccagcagccgccgccgcagagtctgctctactcgcagcccggaggcttcacggtgaacggcatgctgagcgcgccaccggggcccggcggcggcggcggcggcgcgggcggtggagcccagagcttggtgcacccggggctggtgcgcggggacacgccagagctggccgagcaccaccaccaccaccaccaccacgcgcatcctcacccgccgcacccgcaccacgcgcagggacccccgcaccacggcggcggcggcggcggcgcggggcctggactcaacagccacgacccgcactcggacgaggacacgccgacgtcggacgacctggagcagttcgccaagcagttcaagcagcggcgcatcaagctgggcttcacgcaggccgacgtggggttggcgctgggcacactctacggcaacgtgttctcgcagaccaccatctgccgcttcgaggccctgcagctgagcttcaagaacatgtgcaagctcaagccgctgctgaacaagtggctggaggaggcggactcaagcaccggcagccccacaagcatcgacaagatcgcggcgcagggccgcaagcgcaagaagcggacctctatcgaggtgagcgtcaagggcgcgctggagagccacttcctcaagtgccccaagccctccgcgcaggagatcaccaacctggccgacagcctgcagctcgagaaggaggtggtgcgggtctggttctgcaatcggcgccaaaaggagaagcgcatgacgccgcccgggatccaacagcagacgcccgacgacgtctactcgcaggtgggcaccgtgagcgccgacacgccgccgcctcaccacgggctgcagacgagcgttcag

SEQ ID NO: 4975 - DNA, 1329 bp, Homo sapiens
  source 1..1329: mol_type = genomic DNA
atggcgaccgcagcgtctaaccactacagcctgctcacctccagcgcctccatcgtgcacgccgagccgcccggcggcatgcagcagggcgcggggggctaccgcgaagcgcagagcctggtgcagggcgactacggcgctctgcagagcaacggacacccgctcagccacgctcaccagtggatcaccgcgctgtcccacggcggcggcggcgggggcggtggcggcggcggggggggcgggggcggcggcgggggcggcggcgacggctccccgtggtccaccagccccctgggccagccggacatcaagccctcggtggtggtgcagcagggcggccgcggagacgagctgcacgggccaggcgccctgcagcagcagcatcagcagcagcaacagcaacagcagcagcaacagcagcaacagcagcagcagcagcagcaacagcggccgccgcatctggtgcaccacgccgctaaccaccacccgggacccggggcatggcggagcgcggcggctgcagcgcacctcccaccctccatgggagcgtccaacggcggcttgctctactcgcagcccagcttcacggtgaacggcatgctgggcgccggcgggcagccggccggtctgcaccaccacggcctgcgggacgcgcacgacgagccacaccatgccgaccaccacccgcacccgcactcgcacccacaccagcagccgccgcccccgccgcccccgcagggtccgcctggccacccaggcgcgcaccacgacccgcactcggacgaggacacgccgacctcggacgacctggagcagttcgccaagcagttcaagcagcggcggatcaaactgggatttacccaagcggacgtggggctggctctgggcaccctgtatggcaacgtgttctcgcagaccaccatctgcaggtttgaggccctgcagctgagcttcaagaacatgtgcaagctgaagcctttgttgaacaagtggttggaggaggcggactcgtcctcgggcagccccacgagcatagacaagatcgcagcgcaagggcgcaagcggaaaaagcggacctccatcgaggtgagcgtcaagggggctctggagagccatttcctcaaatgccccaagccctcggcccaggagatcacctccctcgcggacagcttacagctggagaaggaggtggtgagagtttggttttgtaacaggagacagaaagagaaaaggatgacccctcccggagggactctgccgggcgccgaggatgtgtacggggggagtagggacactccaccacaccacggggtgcagacgcccgtccag

SEQ ID NO: 4976 - DNA, 1353 bp, Homo sapiens
  source 1..1353: mol_type = genomic DNA
atggccaccaccgcgcagtacctgccgcggggccccggtggcggagccgggggcaccgggccgcttatgcacccggacgccgcggcggcggcggcggcggcggcggccgcggagcgattgcatgcaggggccgcgtaccgcgaagtgcagaagctgatgcaccacgagtggctgggcgcgggcgcgggccaccccgtgggcctagcgcacccccagtggctacccacgggaggaggcggcggcggcgattgggccggcggcccgcacctagaacacggcaaggcaggcggcggcggcaccggccgagccgacgacggcggcggcggcggaggtttccacgcgcgcctggtgcaccagggggcggcccacgcgggcgcggcatgggcgcagggcagcacagcgcaccacttgggcccggccatgtcgccctcgcccggggccagcgggggccaccagccccagccgctcgggctgtacgcgcaggcggcctacccggggggcggcggcggcggcctggccgggatgctggcggcgggcggtggcggcgcggggccgggcctgcaccacgcgctgcacgaggatggccacgaggcgcagctggagccgtcgccgccgccgcatctgggcgcccacggacacgcacacggacatgcacacgcgggcggcctgcacgcggcggcggcgcacctgcacccgggcgcgggcggcggcggctcatcggtgggcgagcactcggacgaggatgcgcccagctcggacgacctggagcagttcgccaagcagttcaagcagcggcgcatcaagctgggctttacgcaggccgacgtggggctggcgctgggcacgctctacggtaacgtgttctcgcagaccaccatctgccgcttcgaggccctgcagctgagcttcaagaacatgtgcaagctcaagccgctgctcaacaagtggctggaggagaccgactcgtccagcggcagccccaccaacctggacaagatcgcggcgcagggccgcaagcgcaagaagcgcacgtccatcgaggtgggggtcaaaggcgcgctcgagagccactttctcaagtgccccaagccctcggcgcacgagatcaccggcttggcagacagcctgcagctggagaaggaggtggtgcgcgtctggttctgcaaccggcggcagaaggagaagcgcatgacccctgcggccggcgcgggccacccgcccatggacgatgtatacgcgcctggggagctagggcctggcgggggcggcgcatcgccaccctccgcgcccccaccgcccccgccggcggcgctgcaccaccaccaccaccacacactgcccggctcagtgcag

SEQ ID NO: 4977 - DNA, 1752 bp, Homo sapiens
  source 1..1752: mol_type = genomic DNA
atggccggcggcgtggacggccccatcgggatcccgttccccgaccacagcagcgacatcctgagtgggctgaacgagcagcggacgcagggcctgctgtgcgacgtggtgatcctggtggagggccgcgagttccccacgcaccgctcggtgctggccgcctgcagccagtacttcaagaagctgttcacgtcgggcgccgtggtggaccagcagaacgtgtacgagatcgacttcgtcagcgccgaggcgctcaccgcgctcatggacttcgcctacacggccacgctcaccgtcagcacagccaacgtgggtgacatcctcagcgccgcccgcctgctggagatccccgccgtgagccacgtgtgcgccgacctcctggaccggcagatcctggcggccgacgcgggcgccgacgccgggcagctggaccttgtagatcaaattgatcagcgcaacctcctccgcgccaaggagtacctcgagttcttccagagcaaccccatgaacagcctgccccccgcggccgccgccgccgctgccagcttcccgtggtccgcctttggggcgtccgatgatgacctggatgccaccaaggaggccgtggccgccgctgtggccgccgtggccgcgggcgactgcaacggcttagacttctatgggccgggccccccggccgagcggcccccgacgggggacggggacgagggcgacagcaacccgggtctgtggccagagcgggatgaggacgcccccaccgggggtctctttccgccgccggtggccccgccggccgccacgcagaacggccactacggccgcggcggagaggaggaggccgcctcgctgtcggaggcggcccccgagccgggcgactctccgggcttcctgtcgggagcggccgagggcgaggacggggacgggcccgacgtggacgggctggcggccagcacgctgctgcagcagatgatgtcatcggtgggccgggcgggggccgcggcgggggacagcgacgaggagtcgcgggccgacgacaagggcgtcatggactactacctgaagtacttcagcggcgcccacgacggcgacgtctacccggcctggtcgcagaaggtggagaagaagatccgagccaaggccttccagaagtgccccatctgcgagaaggtcatccagggcgccggcaagctgccgcgacacatccgcacccacacgggcgagaagccctacgagtgcaacatctgcaaggtccgcttcaccaggcaggacaagctgaaggtgcacatgcggaagcacacgggcgagaagccgtacctgtgccagcagtgcggcgccgcctttgcccacaactacgacctgaagaaccacatgcgcgtgcacacgggcctgcgcccctaccagtgcgacagctgctgcaagaccttcgtccgctccgaccacctgcacagacacctcaagaaagacggctgcaacggcgtcccctcgcgccgcggccgcaagccccgcgtccggggcggggcgcccgaccccagcccgggggccaccgcgacccccggcgcccccgcccagcccagctcccccgacgcccggcgcaacggccaggagaagcactttaaggacgaggacgaggacgaggacgtggccagccccgacggcttgggccggttgaatgtagcgggcgccggtggaggaggtgacagcggaggtggccccggggccgccaccgacggtaacttcacagccggactcgcc

SEQ ID NO: 4978 - DNA, 1857 bp, Homo sapiens
  source 1..1857: mol_type = genomic DNA
atggccaatgacattgatgagctcattggcattcccttccccaaccacagcagtgaggtcctgtgcagcctcaatgagcaacggcacgatggcctgctgtgtgacgtgctcctggtggtgcaggagcaggagtatcggacccaccgctccgtcctggctgcctgcagcaagtacttcaagaagcttttcacagccggcaccctagccagccagccctacgtctatgagatcgactttgtccagcctgaggctctggctgctatcctggagttcgcctacacctccacgctcaccatcaccgctggcaatgtcaagcacatcctcaacgcagccaggatgctggagatccagtgcatcgtgaacgtgtgcctggagatcatggagcctgggggggacgggggggaggaggatgacaaggaggacgatgacgacgacgaagatgatgatgatgaggaggacgaagaggaggaggaggaagaggaggaggatgacgatgatgacacggaggactttgctgaccaagaaaacttgcctgacccccaggacatcagctgccaccaaagcccttccaagacagaccatctcacagagaaggcctattcagacacccccagggacttccctgactccttccaggctggcagtcctggccatctgggggtgatccgggacttctccatcgaatctctgctaagggagaacctgtaccccaaggccaacatccccgacaggagaccctccttgtctccattcgccccggacttctttccacacctctggccaggggacttcggtgcctttgcccagctgcctgagcagcccatggacagtgggccactggatctggtcatcaagaatcggaagatcaaggaggaggagaaggaggagctgcccccacccccaccgccacccttccctaatgacttcttcaaggacatgttccctgacctgccgggggggcctctgggacccatcaaggcggagaacgactacggtgcctatctcaacttcctgagtgccacccacctgggaggcctcttcccaccctggcccctggtagaagagcgcaagctgaagcccaaggcctctcagcagtgccccatctgccacaaagtcatcatgggggccgggaagctgccgcggcacatgaggacccataccggggagaagccatacatgtgcaccatctgcgaggtccgcttcaccaggcaggacaagctgaaaatccacatgcggaagcacacaggggagcggccctacctgtgcatccactgcaacgccaagttcgtgcacaactacgacctcaagaaccacatgcgcatccacacgggcgtgcggccctaccagtgcgagttctgctacaagagcttcacgcgctctgaccacctgcaccgccacatcaagcgccagagctgccgcatggcacggccccgacgcggccgcaagcctgctgcgtggagggccgccagcctgctcttcgggcccggcggcccggcccccgacaaggcggccttcgtgatgccccctgcgctgggcgaggtgggcggccacctgggcggcgcagctgtgtgcctcccgggccccagccccgccaagcacttcctggcagcgcccaagggcgccctgagcctgcaagagctggagcggcagttcgaggagacacagatgaagctgttcgggcgcgcgcagctggaggctgagaggaacgcggggggcctcctggccttcgcgctggccgagaacgtggcggcggcgcggccctacttcccgctgcccgacccttgggccgccggcctggccggcctccctgggctcgccggcctcaaccacgtggcctccatgtccgaagccaacaac

SEQ ID NO: 4979 - DNA, 1083 bp, Homo sapiens
  source 1..1083: mol_type = genomic DNA
atggccacagctgcctcgaatccctacagcattctcagttccacctccctagtccatgcggactctgcgggcatgcagcaggggagtcctttccgcaaccctcagaaacttctccaaagtgattacttgcagggagttcccagcaatgggcatcccctcgggcatcactgggtgaccagtctgagcgacgggggcccatggtcctccacactggccaccagccccctggaccagcaggacgtgaagcccgggcgcgaagacctgcaactgggtgcgatcatccatcaccgctcgccacacgtagcccaccactcaccgcacactaaccaccccaacgcctggggggccagcccggcaccgaacccgtctatcacgtcaagcggccaacccctcaacgtgtactcgcagcctggcttcaccgtgagcggcatgctggaacacgggggactcaccccacctccagctgccgcctctgcacagagcctgcacccggtgctccgagagcccccggatcacggcgaactgggctcgcaccattgccaggatcactccgacgaggagacgccaacctctgatgagttggaacagttcgccaaacaattcaaacaaagaagaatcaagttgggcttcacgcaggccgacgtggggttggcgctgggcacactgtatggtaacgtgttctcgcagaccaccatctgcaggttcgaggccttgcagctgagcttcaaaaatatgtgcaagctgaagcccctgctgaacaagtggctggaggaggcggattcgtccacagggagcccgaccagcattgacaagatcgctgcacagggccgcaagcgcaagaagcggacctccatcgaggtgagtgtcaagggcgtactggagacgcatttcctcaagtgtcccaagcctgccgcgcaggagatctcctcgctggcagacagcctccagttggagaaggaagtggtgcgtgtctggttctgtaatcgaagacaaaaagagaaaagaatgactccgccaggggatcagcagccgcatgaggtttattcgcacaccgtgaaaacagacacatcttgccatgatctc

SEQ ID NO: 4980 - DNA, 492 bp, Homo sapiens
  source 1..492: mol_type = genomic DNA
atgtgtaagctgcggcccttgctgcagaagtgggtggaggaagctgacaacaatgaaaatcttcaggagatatgcaaagcagaaaccctcgtgcaggcccgaaagagaaagcgaaccagtatcgagaaccgagtgagaggcaacctggagaatttgttcctgcagtgcccgaaacccacactgcagcagatcagccacatcgcccagcagcttgggctcgagaaggatgtggtccgagtgtggttctgtaaccggcgccagaagggcaagcgatcaagcagcgactatgcacaacgagaggattttgaggctgctgggtctcctttctcagggggaccagtgtcctttcctctggccccagggccccattttggtaccccaggctatgggagccctcacttcactgcactgtactcctcggtccctttccctgagggggaagcctttccccctgtctccgtcaccactctgggctctcccatgcattcaaac

SEQ ID NO: 4981 - DNA, 570 bp, Homo sapiens
  source 1..570: mol_type = genomic DNA
ctgggggttctatttgggaaggtattcagccaaacgaccatctgccgctttgaggctctgcagcttagcttcaagaacatgtgtaagctgcggcccttgctgcagaagtgggtggaggaagctgacaacaatgaaaatcttcaggagatatgcaaagcagaaaccctcgtgcaggcccgaaagagaaagcgaaccagtatcgagaaccgagtgagaggcaacctggagaatttgttcctgcagtgcccgaaacccacactgcagcagatcagccacatcgcccagcagcttgggctcgagaaggatgtggtccgagtgtggttctgtaaccggcgccagaagggcaagcgatcaagcagcgactatgcacaacgagaggattttgaggctgctgggtctcctttctcagggggaccagtgtcctttcctctggccccagggccccattttggtaccccaggctatgggagccctcacttcactgcactgtactcctcggtccctttccctgagggggaagcctttccccctgtctccgtcaccactctgggctctcccatgcattcaaac

SEQ ID NO: 4982 - DNA, 984 bp, Homo sapiens
  source 1..984: mol_type = genomic DNA
atggccggacacaggccctcaaaccacttctgcccccttccaggcagtggtgggggcggccccagagggccgatgcccctgcgggttgacactctgacctggttgagcacccaggcggcccctggcagggtgatggtctggccggcagtcaggccagggatctgcccaggccctgacgtgtggaggattcccctgggtcccctgccacacgaattccggggctggatagcaccctgcaggccccgtcttggagctagtgaggcaggggactggttgcgacgcccctccgaaggcgccctcccggggccctacattgccctgcggagcattccgaagttgccgccgccagaggacatctcgggcatactgaaagagttgcagcaattggccaaggagttgaggcagaagaggttgagcctagggtactcgcaggccgatgtggggatcgctgtgggagctctgtttgggaaggtgcttagccagacgaccatctgccgcttcgaggcccagcagctaagcgtcgccaacatgtggaagctgcgaccactgctgaaaaagtggctgaaggaagtggaagcagagaaccttctgggcttatgcaaaatggagatgatcctgcaacagtctgggaagtggagacgggcaagcagagagcgacgaatcggaaacagcctggagaaattcttccagcggtgccctaagcccacaccccagcaaatcagccacattgctgggtgcctccagctgcagaaggatgtggttcgagtttggttctataaccgcagcaagatgggcagtcgaccaaccaatgatgcttccccacgggagattgtggggacagccgggcctccttgcccaggagcaccagtgtgctttcacctgggactggggctcccagtggatatcccccactatacacgtctctactctgcaggggtagcccactcctctgccccagccaccactctgggcctcctcagattt

SEQ ID NO: 4983 - DNA, 1275 bp, Homo sapiens
  source 1..1275: mol_type = genomic DNA
atggacagtagctgccacaacgcgactaccaaaatgttagcgactgctccagctcggggcaacatgatgagcacgtccaaacccttggctttctccattgaacgaatcatggcgcgcaccccagagcccaaggccctgccagtcccccacttcctgcagggagccttacccaagggggaacccaagcactctctgcatctcaactcgtcgatcccctgcatgatccccttcgtgcctgtggcctacgacacgagccccaaggcaggagtgacgggctccgagccgcggaaggccagtctggaggccccggcggcgcccgcggcggtgccctcggctcccgcattcagctgcagcgacctgctcaactgcgcactgagtctcaagggcgacctggcccgcgacgcgctgccgctgcagcagtacaagctgccaaaaacgtatttagccgaaaggaataaactggtggtcccggcggtggagaaatacccttctggagtagctttcaaagacctgtcccaggctcagctgcagcattacatgaaagaaagcgcccagcttctgtcggaaaaaatcgcgttcaaaacctcggatttcagccgaggctctcctaatgccaagcccaaagttttcacttgcgaagtgtgtggaaaggtctttaatgcgcactataacttaacccgtcacatgccagtgcacacaggagccagacccttcgtttgcaaagtgtgcggaaaaggtttcaggcaagcaagcaccctgtgcaggcacaagatcattcacacgcaggaaaaacctcacaaatgtaaccagtgtggcaaagcatttaatagaagttccactttaaacactcatacccgaatacacgcgggctacaaaccgtttgtgtgtgaattctgtggcaaagggtttcatcaaaaagggaattacaaaaaccacaagttgacccacagcggggagaagcagttcaagtgcaatatctgcaacaaggctttccaccaggtttacaacctcaccttccacatgcacacccacaacgacaagaagcctttcacctgccccacgtgcggcaagggtttctgcaggaactttgacctcaagaagcatgtccgcaagctgcacgacagcagcctggggctggcccgcacgccagctggcgaaccaggcactgaaccgccgcccccgctaccgcagcagccgccgatgacgctgcctcctctgcagccgccgctgccaaccccggggcccctgcagcccgggctccaccagggccaccag

SEQ ID NO: 4984 - DNA, 1377 bp, Homo sapiens
  source 1..1377: mol_type = genomic DNA
atggcaagctcggcttccctggagaccatggtgcccccggcctgcccgcgcgccggagcgtcgccggccacttccaagacactggccttttccatcgagcgcatcatggccaagacgtcggagccccgtgcgccctttgagccccggcctggagcgctagaggcggacggcagccagggcaagaaactgctcaacctctgctcgccgctgccctgtatgatccccctccagcccctaggctacgaggtgccgtcaaagacactgctcagttactcggagctctggaaaagcagcctccgggcgggcggcggcggaggcggcggcggcggtggcggcggcggcggcgggggggccccagtgtgcggcgccagcggcttgtgcaaaaccaactgtggcgtgtgctgcaaggccgagctgggcctggcgccgtccgcgctgcccgcgggcagggtcatcaagccgcaggtcatcaaccaggctgtggggctgccggccagcggctcgctctactacttcaactacctggactcgaccgcgtacccgccgtctgagctcctcagcggccacctcttcccgtctggcctcctcaatgcgcaggcccccgccgccctggctgctcaccccaagctctttctgctggagaacgccaagctggccggcctggctgcggacaagttcccccacccggctccctatccccataaggagcgcttgccggcgccgctggagcaggtactgaaggaaaactcggccctgactgccgagcgcggaggcgtcaagggccacagcaagctgccaggaggctccgcagatggcaagcccaaaaacttcacctgcgaggtgtgcggcaaggtgtttaacgctcactataatctcacccgccacatgccggtccacaccggagccagaccgttcgtgtgcaaagtctgcggcaaaggctttcgccaggccagcacgctctgcaggcacaaaattatccacacccaggaaaagccacataaatgcaaccagtgcggcaaagcgttcaaccgcagctccacgctcaacacgcatatccgcatccacgcgggctacaagcccttcgtctgcgaattttgcggcaaaggctttcaccaaaaagggaactacaagaaccacaagctgacccacagcggcgagaagcagtacaaatgtaccatctgcaacaaggccttccaccaggtctacaacctaaccttccatatgcacacccacaacgacaagaagcctttcacgtgcgccacttgcggcaaagggttttgcagaaactttgacttaaagaaacatgtgcgcaaactccacgacagcgtgggccctgctgccccctccgcaaaggacctgactaggacagtgcagagc

SEQ ID NO: 4985 - DNA, 1848 bp, Homo sapiens
  source 1..1848: mol_type = genomic DNA
atggtcggccaactgagcgagggggccattgcggccatcatgcagaagggggatacaaacataaagcccatcctccaagtcatcaacatccgtcccattactacggggaatagtccgccgcgttatcgactgctcatgagtgatggattgaacactctatcctctttcatgttggcgacacagttgaaccctctcgtggaggaagaacaattgtccagcaactgtgtatgccagattcacagatttattgtgaacactctgaaagacggaaggagagtagttatcttgatggaattagaagttttgaagtcagctgaagcagttggagtgaagattggcaatccagtgccctataatgaaggactcgggcagccgcaagtagctcctccagcgccagcagccagcccagcagcaagcagcaggccccagccgcagaatggaagctcgggaatgggttctactgtttctaaggcttatggtgcttcaaagacatttggaaaagctgcaggtcccagcctgtcacacacttctgggggaacacagtccaaagtggtgcccattgccagcctcactccttaccagtccaagtggaccatttgtgctcgtgttaccaacaaaagtcagatccgtacctggagcaactcccgaggggaagggaagcttttctccctagaactggttgacgaaagtggtgaaatccgagctacagctttcaatgagcaagtggacaagttctttcctcttattgaagtgaacaaggtgtattatttctcgaaaggcaccctgaagattgctaacaagcagttcacagctgttaaaaatgactacgagatgaccttcaataacgagacttccgtcatgccctgtgaggacgaccatcatttacctacggttcagtttgatttcacggggattgatgacctcgagaacaagtcgaaagactcacttgtagacatcatcgggatctgcaagagctatgaagacgccactaaaatcacagtgaggtctaacaacagagaagttgccaagaggaatatctacttgatggacacatccgggaaggtggtgactgctacactgtggggggaagatgctgataaatttgatggttctagacagcccgtgttggctatcaaaggagcccgagtctctgatttcggtggacggagcctctccgtgctgtcttcaagcactatcattgcgaatcctgacatcccagaggcctataagcttcgtggatggtttgacgcagaaggacaagccttagatggtgtttccatctctgatctaaagagcggcggagtcggagggagtaacaccaactggaaaaccttgtatgaggtcaaatccgagaacctgggccaaggcgacaagccggactactttagttctgtggccacagtggtgtatcttcgcaaagagaactgcatgtaccaagcctgcccgactcaggactgcaataagaaagtgattgatcaacagaatggattgtaccgctgtgagaagtgcgacaccgaatttcccaatttcaagtaccgcatgatcctgtcagtaaatattgcagattttcaagagaatcagtgggtgacttgtttccaggagtctgctgaagctatccttggacaaaatgctgcttatcttggggaattaaaagacaagaatgaacaggcatttgaagaagttttccagaatgccaacttccgatctttcatattcagagtcagggtcaaagtggagacctacaacgacgagtctcgaattaaggccactgtgatggacgtgaagcccgtggactacagagagtatggccgaaggctggtcatgagcatcaggagaagtgcattgatg

SEQ ID NO: 4986 - DNA, 4038 bp, Homo sapiens
  source 1..4038: mol_type = genomic DNA
atggaccagtacagccttggagacgagggtgccctcccatcagaaatgcacctcccttcattttcagagagccaagggctcaactgcagcgacaccctcaaccgggatttgggtcccaacacgcgaggctttctttatgctggcctgagtggtctggacccggaccccagcctcccaacgcctgacatgtccagcgaggtgctggaggacaacttagacaccttgtccctgtactccgggaaggacagtgattctgtgaagctgctggaggagtacgcagattcggagtctcaggcatccttacaagacctggggctaggtgtgcttaaggctaaagaggctgacgaaggaggaagggccacctcggggagtgccaggaaaggaaagcggcagcacagttcccctcaaaacccacttctggactgcagcctgtgcgggaaggtgttcagcagcgccagttctctgagcaagcactacctgacacacagccaggaaaggaagcacgtctgcaaaatctgcagcaaggcctttaagcgccaggaccacctgaccgggcacatgctcacccaccagaagacaaagcccttcgtgtgcatcgagcagggctgcagcaagagctactgcgactaccgctctctgcgccggcactacgaggtccatcacggcctgtgcatcctgaaggaagcccccccggaggaagaggcctgcggggactccccccacgcccacgagtcggccggccagccgccccccagcagcctgcggtccctggtgcccccagaggccaggtcccccggctccctcctgccccaccgggacctcctgcgccgcatcgtgagtagcatcgtccaccagaagaccccttctcctggcccagccccggcgggggcttcagacagcgaagggaggaacactgcctgtccctgccccgcctcatcggggtcctcgtcctgcaccccagccggcccccacgcggccccagcagcgctggacaccgagcttcccgaggagccttgcctcccacagaaagagccggccactgacgtgttcacagcccctaattccagggccgccgagaacggcgcccccgacccgccagagccggagccagataccgcgctgctccaggcccggtccaccgcggagtgctggcccgaaggcggctccgtgcctgcctgcctgcctctcttccgaggccagacggtccctgccagttcccagccatcgagccacagcttccagtggctccggaacctgccgggctgtcccaaaagcaaaggcaacaacgtgtttgttgtccacaagccctcggccgtgccctcgcgggagggctccgagtctggcccgggacccagcagcggaagcccctcggaggagtccccgcccggccccggcggtggcctggaggatgctctgcccttccctgccgcgctcctcagggtccccgcggaggccccgagcgaccccaggtcggccagcggggaagatgacccctgcgcccccaagaaggtcaaggtcgactgcgactccttcctgtgccagaaccccggggagcccggcctccaggaggcccagaaggcaggcgggctccctgcggatgcctcgccgctcttccgccagctcttcctcaagtcgcaggaacctcttgtgagccacgagcagatgcaggtgttccagatgatcaccaagtcccagcggatcttctcccatgcccaggtggcagcagtctcctcccagctccctgcgcccgagggcaaaccagccgccctgaggccgctgcaggggccgtggccgcagcagcccccaccactggctcctgctgtggactctctccacgccggccctggaaaccccgaggcagagggctccccagcccgcaggagaaaaaccacacccggggttcccagagaggcctcccccggcagcacgagacgagacgcaaaggggggactgaaagtggccgcggttccaacgccccttgcagcaccgtctctggacccttccaggaatccagacatctcttctctggccaagcagctgcgatcctctaaagggaccttggacctggaggacatcttcccctccacaggccaacggcagacccagttaggtggggaggagccaccaggagcctcgctgccagggaagcaggccccagccgagaatggcgcggcttcaaggatcacaaaaggtgaaaagggcccagcctgctcccggggtggaggctaccggctcttgggcaaccccagggccccgcgattctccggcttccggaaagagaaggcgaagatggatatgtgctgtgcggcttctccgagccaggtagccatggcctccttctcatcggccgggcccccggcagatccctccaagtccaagctgacaatattcagcagaatccagggtggaaacatctacaggctcccccatccggtgaaggaagagaatgtggcaggcagaggtaaccagcaaaacggcagtcccacagactggacgaagcccaggagcacttttgtctgcaagaactgcagccagatgttttatacggagaaagggctgagcagccacatgtgttttcacagcgaccagtggccgtcacctcgagggaagcaggaaccgcaggtgtttggcacagagttttgcaagccgctaagacaggtgctgaggccagaaggggacaggcatagtcccccaggaaccaagaagcccttggaccccacagctgcagcccctttggtggtcccccaatcgatccccgtggttccagtgacccgacacatagggagcatggccatgggacaagagaaagacggggaggagcgagacagcaaggagagcagccagcagagaaagcggaagaagcggcccccaccctccacggctggggagcctggccctgcaggatgccaccagagccgcctgcggtcacccatgttcctggtggactgcctcctgaagggcttattccagtgctccccctacacaccacccccaatgctcagccccatccgggagggctctggggtgtacttcaacaccctctgttccacgtccactcaggccagccctgaccagctcatcagctccatgctcgatcaagtggatgggtcctttggcatctgtgtggtgaaggatgacaccaaaatcagcattgagccacatatcaatataggaagccggtttcaggcagagatcccggaactccaggagagatccctggctggaactgacgagcatgtagcttctctggtctggaagccatggggagatatgatgatcagctcagagacacaggatagagtgaccgagctctgcaatgtggcatgctccagcgtgatgccaggagggggcaccaacctggagctcgctctgcactgcctgcacgaggctcagggcaacgttcaggtcgccctggagactcttctgctccgagggccccacaagccacggacacacctgctcgctgactatcgctacacaggttcagacgtctggacccctatagagaagaggctttttaagaaggcgttctatgcccacaagaaggacttctacttgatacacaagatgatccagacaaagacggtagctcagtgcgttgagtattattacatctggaaaaaaatgatcaagtttgactgtggccgagccccagggctagaaaagagggtcaagagagagccggaggaagtggaaaggacagaggaaaaggtcccatgcagccctcgggagagacccagccaccatccaactcccaagttaaagaccaagagttataggagggagtccatcctcagctccagcccaaatgcaggctccaagcggacccccgagctgttgggaagtgcagagagccagggcatttttccatgcagagagtgtgaaagggtgtttgacaagatcaagagtcgaaatgcccatatgaagcggcaccgccttcaggaccacgtggagcccatcatcagggtgaagtggccagtgaagcccttccagctaaaggaagaggagctgggagctgacatcggccccctgcagtgg

SEQ ID NO: 4987 - DNA, 363 bp, Homo sapiens
  source 1..363: mol_type = genomic DNA
atggtggacatgatggacttgcccaggtcgcgcatcaacgccggcatgctagctcaattcatcgacaagcctgtctgcttcgtagggaggctggaaaagattcatcccaccggaaaaatgtttattctttcagatggagaaggaaaaaatggaaccatcgagttgatggaaccccttgatgaagaaatctctggaattgtggaagtggttggaagagtaaccgccaaggccaccatcttgtgtacatcttatgtccagtttaaagaagatagccatccttttgatcttggactttacaatgaagctgtgaaaattatccatgacttccctcagttttatcctttagggattgtgcaacatgat

SEQ ID NO: 4988 - DNA, 834 bp, Homo sapiens
  source 1..834: mol_type = genomic DNA
atgggcagaggagacaggaacaagcgtagcatccgtggattcgaaagctatggcagctcctcatacgggggagccggcggctacacgcagtccccggggggctttggatcgcccgcaccttctcaagccgaaaagaaatcaagagcccgagcccagcacattgtgccctgtactatatctcagctgctttctgccactttggttgatgaagtgttcagaattgggaatgttgagatttcacaggtcactattgtggggatcatcagacatgcagagaaggctccaaccaacattgtttacaaaatagatgacatgacagctgcacccatggacgttcgccagtgggttgacacagatgacaccagcagtgaaaacactgtggttcctccagaaacatatgtgaaagtggcaggccacctgagatcttttcagaacaaaaagagcctggtagcctttaagatcatgcccctggaggatatgaatgagttcaccacacatattctggaagtgatcaatgcacacatggtactaagcaaagccaacagccagccctcagcagggagagcacctatcagcaatccaggaatgagtgaagcagggaactttggtgggaatagcttcatgccagcaaatggcctcactgtggcccaaaaccaggtgttgaatttgattaaggcttgtccaagacctgaagggttgaactttcaggatctcaagaaccagctgaaacacatgtctgtatcctcaatcaagcaagctgtggattttctgagcaatgaggggcacatctattctactgtggatgatgaccattttaaatccacagatgcagaa

SEQ ID NO: 4989 - DNA, 4071 bp, Homo sapiens
  source 1..4071: mol_type = genomic DNA
atggcggacaccgacctgttcatggaatgtgaggaggaggagttggagccatggcagaaaatcagtgatgtcattgaggactctgtagttgaagattataattcagtggataaaactaccacagctggcaatcctttggtccagcaaggtggacagccactcatcctgacccagaatccagccccaggtctgggcacaatggttactcaaccagtattgaggcctgttcaggtcatgcagaatgccaatcatgtgactagttcccctgtggcctcacaaccaatatttatcactacgcagggatttcctgtaaggaatgtccggcctgtacaaaatgcaatgaatcaggttgggattgtgctgaacgtacagcaaggccaaacggttagaccaattacactagttccagccccaggtacccagtttgttaagccgacagttggagttccacaagtgttctcccagatgacccctgtgaggccaggctccacaatgcctgtgaggcccaccaccaacaccttcaccaccgtcatcccggccactcttaccattcgaagcaccgtcccacagtcccagtcccagcagaccaagtccactcccagcacttctaccactcccactgccacacagccaacctcactggggcaactagctgttcagtctccaggccagtcaaaccagaccacgaatcccaagctagctccctccttcccctctccacctgcagtgagcattgccagctttgtcactgtgaagcgacctggtgttacaggcgaaaatagcaatgaagtggccaaattggtgaatacccttaacaccatcccttccctgggccagagtcctgggccagtggtggtgtccaacaacagctctgctcatggctctcaaagaaccagcggacctgagtcttcaatgaaagtgacctcttccatcccagtatttgacctccaggatggtggacggaaaatatgtccacgatgtaatgctcaatttcgtgttactgaagctttgagaggtcacatgtgttactgttgcccagaaatggttgaataccagaagaaaggaaagtccctggattcagaacccagtgtcccatcagcagcaaagcccccatcccctgagaaaacagctcctgttgcttccacaccctcttctacacctattcctgctctgtcaccgcctaccaaagtaccagaaccaaatgagaacgtgggcgatgccgtccagaccaaactcattatgcttgtagatgacttctactatggacgggatggtggcaaagtagcccagctcacaaatttccctaaggtcgccacatctttccgatgcccacattgtaccaaaaggctaaaaaacaatattcgattcatgaaccatatgaaacaccacgtagaactcgatcagcagaacggtgaggtagatggtcacactatctgccagcactgttaccgccagttttccactcccttccagcttcagtgccacttggaaaatgttcatagtccctatgaatctactaccaagtgcaagatctgtgaatgggcgtttgaaagtgagccactatttctccagcatatgaaggatactcataagcctggagagatgccttatgtttgccaggtgtgtcaatatcgctcctcactctactctgaggtagatgtccattttcggatgatccatgaggatacccggcatctgctctgcccttattgcctgaaggtcttcaaaaatggcaatgcattccaacagcattacatgaggcaccagaagagaaatgtttatcactgcaacaaatgccggctgcagtttctctttgccaaggacaaaattgaacacaagcttcaacaccataaaaccttccgtaaacccaagcagctggagggcttgaaaccaggcaccaaggtgacaatccgggcttcccgagggcagccacgaactgttcctgtatcctctaatgatacacctcccagcgccttgcaggaggcagcaccgctgacctcctcaatggaccctctgcctgtcttcctttatccccctgtccagcgcagcatccagaagagagctgttaggaaaatgagtgtcatgggccggcagacatgcctggagtgcagcttcgagatcccagacttccctaatcatttccctacttacgtacactgctctctgtgtcgctatagcacctgctgttctcgagcttatgccaaccacatgatcaacaatcatgttccacggaagagccccaagtatttggctttgtttaaaaattctgtgagtggaatcaagctggcctgcacttcatgtacctttgttacctctgtgggcgatgctatggccaagcatttggtattcaacccctctcacagatccagcagcatcctgccacggggactcacttggatagctcactcaaggcatggccagactcgtgaccgagtgcatgaccggaacgtgaagaatatgtaccctcctccttccttccccactaacaaagctgccactgtgaaatctgcgggggccaccccagctgagcctgaagagctactaactcccttagccccagcactcccatcaccagcctcaactgcaaccccaccaccaacccccactcacccgcaggctttagcccttccaccgctggctacagagggagccgaatgtctgaatgttgatgatcaggatgaagggagcccagtcacccaagaacctgagctagcatcaggtggtggtggtagtggtggagttggcaaaaaggagcagctgtctgtgaagaagcttcgagtagtactgtttgctctatgctgcaatacagaacaggcagctgaacacttccgaaatccccagcgacgtattcgccgttggcttcgacgtttccaggcctcccagggggagaatctagagggcaaatatctgagctttgaggcagaagagaaactggctgagtgggtgctaacccagcgcgaacaacagctacctgtaaatgaggagaccttgttccagaaggccaccaaaataggacgttctttggaaggggggtttaagatctcctatgagtgggctgtgcgtttcatgctgcggcaccacctgactccccatgcccggcgagctgtggcccacaccctacctaaggatgtagcagagaatgcaggactcttcattgattttgtacaacggcagattcacaaccaggacttacccttgtctatgattgtggctattgatgagatctctttgttcctggatacagaggtgctgagcagtgatgatcgaaaggagaatgccctgcagacagtgggcacaggggaaccttggtgtgatgtagtcctagccattctggcagatggcactgtccttcccaccctggttttctacagagggcagatggatcagcctgctaacatgccagactccatattgctagaggcaaaggagagtggctacagtgatgacgagatcatggagctgtggtcaactcgagtgtggcagaagcacacagcttgccagcgcagcaaaggcatgcttgtgatggactgtcatcgcactcacttgtcagaagaggtactggctatgcttagtgcctctagcactttgcctgcagtggtcccagcaggctgtagctccaaaattcagccattagatgtatgcatcaaaagaactgtcaagaacttcctgcataaaaaatggaaggaacaggctcgggaaatggcagatactgcatgtgattctgatgtcctgcttcagctggtgcttgtctggctgggtgaagtgctaggtgtcattggggactgtccagagctagttcagcgctccttcctggtggctagtgttctgcctggccccgatggcaacattaactcacctacaagaaatgctgacatgcaggaggagctaattgcctccctagaggagcaactgaagctgagtggggaacattctgagtcttccactccacgacccagatcatctcctgaagagacaattgagcctgaaagtcttcaccagctctttgagggtgaaagtgagaccgagtctttctatggctttgaagaagctgacctagatctgatggagatt

SEQ ID NO: 4990 - DNA, 4203 bp, Homo sapiens
  source 1..4203: mol_type = genomic DNA
atggcggacaccgacctgttcatggaatgtgaggaggaggagttggagccatggcagaaaatcagtgatgtcattgaggactctgtagttgaagattataattcagtggataaaactaccacagtttctgtgagccagcagccagtctcggctccagtgcccatcgctgcccatgcttctgttgctgggcacctctctacatccaccaccgttagtagcagcggggcacagaacagcgacagtacaaagaagactcttgtcacactaattgccaacaacaatgctggcaatcctttggtccagcaaggtggacagccactcatcctgacccagaatccagccccaggtctgggcacaatggttactcaaccagtattgaggcctgttcaggtcatgcagaatgccaatcatgtgactagttcccctgtggcctcacaaccaatatttatcactacgcagggatttcctgtaaggaatgtccggcctgtacaaaatgcaatgaatcaggttgggattgtgctgaacgtacagcaaggccaaacggttagaccaattacactagttccagccccaggtacccagtttgttaagccgacagttggagttccacaagtgttctcccagatgacccctgtgaggccaggctccacaatgcctgtgaggcccaccaccaacaccttcaccaccgtcatcccggccactcttaccattcgaagcaccgtcccacagtcccagtcccagcagaccaagtccactcccagcacttctaccactcccactgccacacagccaacctcactggggcaactagctgttcagtctccaggccagtcaaaccagaccacgaatcccaagctagtgagcattgccagctttgtcactgtgaagcgacctggtgttacaggcgaaaatagcaatgaagtggccaaattggtgaatacccttaacaccatcccttccctgggccagagtcctgggccagtggtggtgtccaacaacagctctgctcatggctctcaaagaaccagcggacctgagtcttcaatgaaagtgacctcttccatcccagtatttgacctccaggatggtggacggaaaatatgtccacgatgtaatgctcaatttcgtgttactgaagctttgagaggtcacatgtgttactgttgcccagaaatggttgaataccagaagaaaggaaagtccctggattcagaacccagtgtcccatcagcagcaaagcccccatcccctgagaaaacagctcctgttgcttccacaccctcttctacacctattcctgctctgtcaccgcctaccaaagtaccagaaccaaatgagaacgtgggcgatgccgtccagaccaaactcattatgcttgtagatgacttctactatggacgggatggtggcaaagtagcccagctcacaaatttccctaaggtcgccacatctttccgatgcccacattgtaccaaaaggctaaaaaacaatattcgattcatgaaccatatgaaacaccacgtagaactcgatcagcagaacggtgaggtagatggtcacactatctgccagcactgttaccgccagttttccactcccttccagcttcagtgccacttggaaaatgttcatagtccctatgaatctactaccaagtgcaagatctgtgaatgggcgtttgaaagtgagccactatttctccagcatatgaaggatactcataagcctggagagatgccttatgtttgccaggtgtgtcaatatcgctcctcactctactctgaggtagatgtccattttcggatgatccatgaggatacccggcatctgctctgcccttattgcctgaaggtcttcaaaaatggcaatgcattccaacagcattacatgaggcaccagaagagaaatgtttatcactgcaacaaatgccggctgcagtttctctttgccaaggacaaaattgaacacaagcttcaacaccataaaaccttccgtaaacccaagcagctggagggcttgaaaccaggcaccaaggtgacaatccgggcttcccgagggcagccacgaactgttcctgtatcctctaatgatacacctcccagcgccttgcaggaggcagcaccgctgacctcctcaatggaccctctgcctgtcttcctttatccccctgtccagcgcagcatccagaagagagctgttaggaaaatgagtgtcatgggccggcagacatgcctggagtgcagcttcgagatcccagacttccctaatcatttccctacttacgtacactgctctctgtgtcgctatagcacctgctgttctcgagcttatgccaaccacatgatcaacaatcatgttccacggaagagccccaagtatttggctttgtttaaaaattctgtgagtggaatcaagctggcctgcacttcatgtacctttgttacctctgtgggcgatgctatggccaagcatttggtattcaacccctctcacagatccagcagcatcctgccacggggactcacttggatagctcactcaaggcatggccagactcgtgaccgagtgcatgaccggaacgtgaagaatatgtaccctcctccttccttccccactaacaaagctgccactgtgaaatctgcgggggccaccccagctgagcctgaagagctactaactcccttagccccagcactcccatcaccagcctcaactgcaaccccaccaccaacccccactcacccgcaggctttagcccttccaccgctggctacagagggagccgaatgtctgaatgttgatgatcaggatgaagggagcccagtcacccaagaacctgagctagcatcaggtggtggtggtagtggtggagttggcaaaaaggagcagctgtctgtgaagaagcttcgagtagtactgtttgctctatgctgcaatacagaacaggcagctgaacacttccgaaatccccagcgacgtattcgccgttggcttcgacgtttccaggcctcccagggggagaatctagagggcaaatatctgagctttgaggcagaagagaaactggctgagtgggtgctaacccagcgcgaacaacagctacctgtaaatgaggagaccttgttccagaaggccaccaaaataggacgttctttggaaggggggtttaagatctcctatgagtgggctgtgcgtttcatgctgcggcaccacctgactccccatgcccggcgagctgtggcccacaccctacctaaggatgtagcagagaatgcaggactcttcattgattttgtacaacggcagattcacaaccaggacttacccttgtctatgattgtggctattgatgagatctctttgttcctggatacagaggtgctgagcagtgatgatcgaaaggagaatgccctgcagacagtgggcacaggggaaccttggtgtgatgtagtcctagccattctggcagatggcactgtccttcccaccctggttttctacagagggcagatggatcagcctgctaacatgccagactccatattgctagaggcaaaggagagtggctacagtgatgacgagatcatggagctgtggtcaactcgagtgtggcagaagcacacagcttgccagcgcagcaaaggcatgcttgtgatggactgtcatcgcactcacttgtcagaagaggtactggctatgcttagtgcctctagcactttgcctgcagtggtcccagcaggctgtagctccaaaattcagccattagatgtatgcatcaaaagaactgtcaagaacttcctgcataaaaaatggaaggaacaggctcgggaaatggcagatactgcatgtgattctgatgtcctgcttcagctggtgcttgtctggctgggtgaagtgctaggtgtcattggggactgtccagagctagttcagcgctccttcctggtggctagtgttctgcctggccccgatggcaacattaactcacctacaagaaatgctgacatgcaggaggagctaattgcctccctagaggagcaactgaagctgagtggggaacattctgagtcttccactccacgacccagatcatctcctgaagagacaattgagcctgaaagtcttcaccagctctttgagggtgaaagtgagaccgagtctttctatggctttgaagaagctgacctagatctgatggagatt

SEQ ID NO: 4991 - DNA, 3945 bp, Homo sapiens
  source 1..3945: mol_type = genomic DNA
atggcggacaccgacctgttcatggaatgtgaggaggaggagttggagccatggcagaaaatcagtgatgtcattgaggactctgtagttgaagattataattcagtggataaaactaccacagtttctgtgagccagcagccagtctcggctccagtgcccatcgctgcccatgcttctgttgctgggcacctctctacatccaccaccgttagtagcagcggggcacagaacagcgacagtacaaagaagactcttgtcacactaattgccaacaacaatgccccaggtacccagtttgttaagccgacagttggagttccacaagtgttctcccagatgacccctgtgaggccaggctccacaatgcctgtgaggcccaccaccaacaccttcaccaccgtcatcccggccactcttaccattcgaagcaccgtcccacagtcccagtcccagcagaccaagtccactcccagcacttctaccactcccactgccacacagccaacctcactggggcaactagctgttcagtctccaggccagtcaaaccagaccacgaatcccaagctagctccctccttcccctctccacctgcagtgagcattgccagctttgtcactgtgaagcgacctggtgttacaggcgaaaatagcaatgaagtggccaaattggtgaatacccttaacaccatcccttccctgggccagagtcctgggccagtggtggtgtccaacaacagctctgctcatggctctcaaagaaccagcggacctgagtcttcaatgaaagtgacctcttccatcccagtatttgacctccaggatggtggacggaaaatatgtccacgatgtaatgctcaatttcgtgttactgaagctttgagaggtcacatgtgttactgttgcccagaaatggttgaataccagaagaaaggaaagtccctggattcagaacccagtgtcccatcagcagcaaagcccccatcccctgagaaaacagctcctgttgcttccacaccctcttctacacctattcctgctctgtcaccgcctaccaaagtaccagaaccaaatgagaacgtgggcgatgccgtccagaccaaactcattatgcttgtagatgacttctactatggacgggatggtggcaaagtagcccagctcacaaatttccctaaggtcgccacatctttccgatgcccacattgtaccaaaaggctaaaaaacaatattcgattcatgaaccatatgaaacaccacgtagaactcgatcagcagaacggtgaggtagatggtcacactatctgccagcactgttaccgccagttttccactcccttccagcttcagtgccacttggaaaatgttcatagtccctatgaatctactaccaagtgcaagatctgtgaatgggcgtttgaaagtgagccactatttctccagcatatgaaggatactcataagcctggagagatgccttatgtttgccaggtgtgtcaatatcgctcctcactctactctgaggtagatgtccattttcggatgatccatgaggatacccggcatctgctctgcccttattgcctgaaggtcttcaaaaatggcaatgcattccaacagcattacatgaggcaccagaagagaaatgtttatcactgcaacaaatgccggctgcagtttctctttgccaaggacaaaattgaacacaagcttcaacaccataaaaccttccgtaaacccaagcagctggagggcttgaaaccaggcaccaaggtgacaatccgggcttcccgagggcagccacgaactgttcctgtatcctctaatgatacacctcccagcgccttgcaggaggcagcaccgctgacctcctcaatggaccctctgcctgtcttcctttatccccctgtccagcgcagcatccagaagagagctgttaggaaaatgagtgtcatgggccggcagacatgcctggagtgcagcttcgagatcccagacttccctaatcatttccctacttacgtacactgctctctgtgtcgctatagcacctgctgttctcgagcttatgccaaccacatgatcaacaatcatgttccacggaagagccccaagtatttggctttgtttaaaaattctgtgagtggaatcaagctggcctgcacttcatgtacctttgttacctctgtgggcgatgctatggccaagcatttggtattcaacccctctcacagatccagcagcatcctgccacggggactcacttggatagctcactcaaggcatggccagactcgtgaccgagtgcatgaccggaacgtgaagaatatgtaccctcctccttccttccccactaacaaagctgccactgtgaaatctgcgggggccaccccagctgagcctgaagagctactaactcccttagccccagcactcccatcaccagcctcaactgcaaccccaccaccaacccccactcacccgcaggctttagcccttccaccgctggctacagagggagccgaatgtctgaatgttgatgatcaggatgaagggagcccagtcacccaagaacctgagctagcatcaggtggtggtggtagtggtggagttggcaaaaaggagcagctgtctgtgaagaagcttcgagtagtactgtttgctctatgctgcaatacagaacaggcagctgaacacttccgaaatccccagcgacgtattcgccgttggcttcgacgtttccaggcctcccagggggagaatctagagggcaaatatctgagctttgaggcagaagagaaactggctgagtgggtgctaacccagcgcgaacaacagctacctgtaaatgaggagaccttgttccagaaggccaccaaaataggacgttctttggaaggggggtttaagatctcctatgagtgggctgtgcgtttcatgctgcggcaccacctgactccccatgcccggcgagctgtggcccacaccctacctaaggatgtagcagagaatgcaggactcttcattgattttgtacaacggcagattcacaaccaggacttacccttgtctatgattgtggctattgatgagatctctttgttcctggatacagaggtgctgagcagtgatgatcgaaaggagaatgccctgcagacagtgggcacaggggaaccttggtgtgatgtagtcctagccattctggcagatggcactgtccttcccaccctggttttctacagagggcagatggatcagcctgctaacatgccagactccatattgctagaggcaaaggagagtggctacagtgatgacgagatcatggagctgtggtcaactcgagtgtggcagaagcacacagcttgccagcgcagcaaaggcatgcttgtgatggactgtcatcgcactcacttgtcagaagaggtactggctatgcttagtgcctctagcactttgcctgcagtggtcccagcaggctgtagctccaaaattcagccattagatgtatgcatcaaaagaactgtcaagaacttcctgcataaaaaatggaaggaacaggctcgggaaatggcagatactgcatgtgattctgatgtcctgcttcagctggtgcttgtctggctgggtgaagtgctaggtgtcattggggactgtccagagctagttcagcgctccttcctggtggctagtgttctgcctggccccgatggcaacattaactcacctacaagaaatgctgacatgcaggaggagctaattgcctccctagaggagcaactgaagctgagtggggaacattctgagtcttccactccacgacccagatcatctcctgaagagacaattgagcctgaaagtcttcaccagctctttgagggtgaaagtgagaccgagtctttctatggctttgaagaagctgacctagatctgatggagatt

SEQ ID NO: 4992 - DNA, 4230 bp, Homo sapiens
  source 1..4230: mol_type = genomic DNA
atggcggacaccgacctgttcatggaatgtgaggaggaggagttggagccatggcagaaaatcagtgatgtcattgaggactctgtagttgaagattataattcagtggataaaactaccacagtttctgtgagccagcagccagtctcggctccagtgcccatcgctgcccatgcttctgttgctgggcacctctctacatccaccaccgttagtagcagcggggcacagaacagcgacagtacaaagaagactcttgtcacactaattgccaacaacaatgctggcaatcctttggtccagcaaggtggacagccactcatcctgacccagaatccagccccaggtctgggcacaatggttactcaaccagtattgaggcctgttcaggtcatgcagaatgccaatcatgtgactagttcccctgtggcctcacaaccaatatttatcactacgcagggatttcctgtaaggaatgtccggcctgtacaaaatgcaatgaatcaggttgggattgtgctgaacgtacagcaaggccaaacggttagaccaattacactagttccagccccaggtacccagtttgttaagccgacagttggagttccacaagtgttctcccagatgacccctgtgaggccaggctccacaatgcctgtgaggcccaccaccaacaccttcaccaccgtcatcccggccactcttaccattcgaagcaccgtcccacagtcccagtcccagcagaccaagtccactcccagcacttctaccactcccactgccacacagccaacctcactggggcaactagctgttcagtctccaggccagtcaaaccagaccacgaatcccaagctagctccctccttcccctctccacctgcagtgagcattgccagctttgtcactgtgaagcgacctggtgttacaggcgaaaatagcaatgaagtggccaaattggtgaatacccttaacaccatcccttccctgggccagagtcctgggccagtggtggtgtccaacaacagctctgctcatggctctcaaagaaccagcggacctgagtcttcaatgaaagtgacctcttccatcccagtatttgacctccaggatggtggacggaaaatatgtccacgatgtaatgctcaatttcgtgttactgaagctttgagaggtcacatgtgttactgttgcccagaaatggttgaataccagaagaaaggaaagtccctggattcagaacccagtgtcccatcagcagcaaagcccccatcccctgagaaaacagctcctgttgcttccacaccctcttctacacctattcctgctctgtcaccgcctaccaaagtaccagaaccaaatgagaacgtgggcgatgccgtccagaccaaactcattatgcttgtagatgacttctactatggacgggatggtggcaaagtagcccagctcacaaatttccctaaggtcgccacatctttccgatgcccacattgtaccaaaaggctaaaaaacaatattcgattcatgaaccatatgaaacaccacgtagaactcgatcagcagaacggtgaggtagatggtcacactatctgccagcactgttaccgccagttttccactcccttccagcttcagtgccacttggaaaatgttcatagtccctatgaatctactaccaagtgcaagatctgtgaatgggcgtttgaaagtgagccactatttctccagcatatgaaggatactcataagcctggagagatgccttatgtttgccaggtgtgtcaatatcgctcctcactctactctgaggtagatgtccattttcggatgatccatgaggatacccggcatctgctctgcccttattgcctgaaggtcttcaaaaatggcaatgcattccaacagcattacatgaggcaccagaagagaaatgtttatcactgcaacaaatgccggctgcagtttctctttgccaaggacaaaattgaacacaagcttcaacaccataaaaccttccgtaaacccaagcagctggagggcttgaaaccaggcaccaaggtgacaatccgggcttcccgagggcagccacgaactgttcctgtatcctctaatgatacacctcccagcgccttgcaggaggcagcaccgctgacctcctcaatggaccctctgcctgtcttcctttatccccctgtccagcgcagcatccagaagagagctgttaggaaaatgagtgtcatgggccggcagacatgcctggagtgcagcttcgagatcccagacttccctaatcatttccctacttacgtacactgctctctgtgtcgctatagcacctgctgttctcgagcttatgccaaccacatgatcaacaatcatgttccacggaagagccccaagtatttggctttgtttaaaaattctgtgagtggaatcaagctggcctgcacttcatgtacctttgttacctctgtgggcgatgctatggccaagcatttggtattcaacccctctcacagatccagcagcatcctgccacggggactcacttggatagctcactcaaggcatggccagactcgtgaccgagtgcatgaccggaacgtgaagaatatgtaccctcctccttccttccccactaacaaagctgccactgtgaaatctgcgggggccaccccagctgagcctgaagagctactaactcccttagccccagcactcccatcaccagcctcaactgcaaccccaccaccaacccccactcacccgcaggctttagcccttccaccgctggctacagagggagccgaatgtctgaatgttgatgatcaggatgaagggagcccagtcacccaagaacctgagctagcatcaggtggtggtggtagtggtggagttggcaaaaaggagcagctgtctgtgaagaagcttcgagtagtactgtttgctctatgctgcaatacagaacaggcagctgaacacttccgaaatccccagcgacgtattcgccgttggcttcgacgtttccaggcctcccagggggagaatctagagggcaaatatctgagctttgaggcagaagagaaactggctgagtgggtgctaacccagcgcgaacaacagctacctgtaaatgaggagaccttgttccagaaggccaccaaaataggacgttctttggaaggggggtttaagatctcctatgagtgggctgtgcgtttcatgctgcggcaccacctgactccccatgcccggcgagctgtggcccacaccctacctaaggatgtagcagagaatgcaggactcttcattgattttgtacaacggcagattcacaaccaggacttacccttgtctatgattgtggctattgatgagatctctttgttcctggatacagaggtgctgagcagtgatgatcgaaaggagaatgccctgcagacagtgggcacaggggaaccttggtgtgatgtagtcctagccattctggcagatggcactgtccttcccaccctggttttctacagagggcagatggatcagcctgctaacatgccagactccatattgctagaggcaaaggagagtggctacagtgatgacgagatcatggagctgtggtcaactcgagtgtggcagaagcacacagcttgccagcgcagcaaaggcatgcttgtgatggactgtcatcgcactcacttgtcagaagaggtactggctatgcttagtgcctctagcactttgcctgcagtggtcccagcaggctgtagctccaaaattcagccattagatgtatgcatcaaaagaactgtcaagaacttcctgcataaaaaatggaaggaacaggctcgggaaatggcagatactgcatgtgattctgatgtcctgcttcagctggtgcttgtctggctgggtgaagtgctaggtgtcattggggactgtccagagctagttcagcgctccttcctggtggctagtgttctgcctggccccgatggcaacattaactcacctacaagaaatgctgacatgcaggaggagctaattgcctccctagaggagcaactgaagctgagtggggaacattctgagtcttccactccacgacccagatcatctcctgaagagacaattgagcctgaaagtcttcaccagctctttgagggtgaaagtgagaccgagtctttctatggctttgaagaagctgacctagatctgatggagatt

SEQ ID NO: 4993 - DNA, 4044 bp, Homo sapiens
  source 1..4044: mol_type = genomic DNA
atggcggacaccgacctgttcatggaatgtgaggaggaggagttggagccatggcagaaaatcagtgatgtcattgaggactctgtagttgaagattataattcagtggataaaactaccacagctggcaatcctttggtccagcaaggtggacagccactcatcctgacccagaatccagccccaggtctgggcacaatggttactcaaccagtattgaggcctgttcaggtcatgcagaatgccaatcatgtgactagttcccctgtggcctcacaaccaatatttatcactacgcagggatttcctgtaaggaatgtccggcctgtacaaaatgcaatgaatcaggttgggattgtgctgaacgtacagcaaggccaaacggttagaccaattacactagttccagccccaggtacccagtttgttaagccgacagttggagttccacaagtgttctcccagatgacccctgtgaggccaggctccacaatgcctgtgaggcccaccaccaacaccttcaccaccgtcatcccggccactcttaccattcgaagcaccgtcccacagtcccagtcccagcagaccaagtccactcccagcacttctaccactcccactgccacacagccaacctcactggggcaactagctgttcagtctccaggccagtcaaaccagaccacgaatcccaagctagtgagcattgccagctttgtcactgtgaagcgacctggtgttacaggcgaaaatagcaatgaagtggccaaattggtgaatacccttaacaccatcccttccctgggccagagtcctgggccagtggtggtgtccaacaacagctctgctcatggctctcaaagaaccagcggacctgagtcttcaatgaaagtgacctcttccatcccagtatttgacctccaggatggtggacggaaaatatgtccacgatgtaatgctcaatttcgtgttactgaagctttgagaggtcacatgtgttactgttgcccagaaatggttgaataccagaagaaaggaaagtccctggattcagaacccagtgtcccatcagcagcaaagcccccatcccctgagaaaacagctcctgttgcttccacaccctcttctacacctattcctgctctgtcaccgcctaccaaagtaccagaaccaaatgagaacgtgggcgatgccgtccagaccaaactcattatgcttgtagatgacttctactatggacgggatggtggcaaagtagcccagctcacaaatttccctaaggtcgccacatctttccgatgcccacattgtaccaaaaggctaaaaaacaatattcgattcatgaaccatatgaaacaccacgtagaactcgatcagcagaacggtgaggtagatggtcacactatctgccagcactgttaccgccagttttccactcccttccagcttcagtgccacttggaaaatgttcatagtccctatgaatctactaccaagtgcaagatctgtgaatgggcgtttgaaagtgagccactatttctccagcatatgaaggatactcataagcctggagagatgccttatgtttgccaggtgtgtcaatatcgctcctcactctactctgaggtagatgtccattttcggatgatccatgaggatacccggcatctgctctgcccttattgcctgaaggtcttcaaaaatggcaatgcattccaacagcattacatgaggcaccagaagagaaatgtttatcactgcaacaaatgccggctgcagtttctctttgccaaggacaaaattgaacacaagcttcaacaccataaaaccttccgtaaacccaagcagctggagggcttgaaaccaggcaccaaggtgacaatccgggcttcccgagggcagccacgaactgttcctgtatcctctaatgatacacctcccagcgccttgcaggaggcagcaccgctgacctcctcaatggaccctctgcctgtcttcctttatccccctgtccagcgcagcatccagaagagagctgttaggaaaatgagtgtcatgggccggcagacatgcctggagtgcagcttcgagatcccagacttccctaatcatttccctacttacgtacactgctctctgtgtcgctatagcacctgctgttctcgagcttatgccaaccacatgatcaacaatcatgttccacggaagagccccaagtatttggctttgtttaaaaattctgtgagtggaatcaagctggcctgcacttcatgtacctttgttacctctgtgggcgatgctatggccaagcatttggtattcaacccctctcacagatccagcagcatcctgccacggggactcacttggatagctcactcaaggcatggccagactcgtgaccgagtgcatgaccggaacgtgaagaatatgtaccctcctccttccttccccactaacaaagctgccactgtgaaatctgcgggggccaccccagctgagcctgaagagctactaactcccttagccccagcactcccatcaccagcctcaactgcaaccccaccaccaacccccactcacccgcaggctttagcccttccaccgctggctacagagggagccgaatgtctgaatgttgatgatcaggatgaagggagcccagtcacccaagaacctgagctagcatcaggtggtggtggtagtggtggagttggcaaaaaggagcagctgtctgtgaagaagcttcgagtagtactgtttgctctatgctgcaatacagaacaggcagctgaacacttccgaaatccccagcgacgtattcgccgttggcttcgacgtttccaggcctcccagggggagaatctagagggcaaatatctgagctttgaggcagaagagaaactggctgagtgggtgctaacccagcgcgaacaacagctacctgtaaatgaggagaccttgttccagaaggccaccaaaataggacgttctttggaaggggggtttaagatctcctatgagtgggctgtgcgtttcatgctgcggcaccacctgactccccatgcccggcgagctgtggcccacaccctacctaaggatgtagcagagaatgcaggactcttcattgattttgtacaacggcagattcacaaccaggacttacccttgtctatgattgtggctattgatgagatctctttgttcctggatacagaggtgctgagcagtgatgatcgaaaggagaatgccctgcagacagtgggcacaggggaaccttggtgtgatgtagtcctagccattctggcagatggcactgtccttcccaccctggttttctacagagggcagatggatcagcctgctaacatgccagactccatattgctagaggcaaaggagagtggctacagtgatgacgagatcatggagctgtggtcaactcgagtgtggcagaagcacacagcttgccagcgcagcaaaggcatgcttgtgatggactgtcatcgcactcacttgtcagaagaggtactggctatgcttagtgcctctagcactttgcctgcagtggtcccagcaggctgtagctccaaaattcagccattagatgtatgcatcaaaagaactgtcaagaacttcctgcataaaaaatggaaggaacaggctcgggaaatggcagatactgcatgtgattctgatgtcctgcttcagctggtgcttgtctggctgggtgaagtgctaggtgtcattggggactgtccagagctagttcagcgctccttcctggtggctagtgttctgcctggccccgatggcaacattaactcacctacaagaaatgctgacatgcaggaggagctaattgcctccctagaggagcaactgaagctgagtggggaacattctgagtcttccactccacgacccagatcatctcctgaagagacaattgagcctgaaagtcttcaccagctctttgagggtgaaagtgagaccgagtctttctatggctttgaagaagctgacctagatctgatggagatt

SEQ ID NO: 4994 - DNA, 2694 bp, Homo sapiens
  source 1..2694: mol_type = genomic DNA
atgcgtccaatgcgaatttttgtgaatgatgaccgccatgtgatggcaaagcattcttccgtttatccaacacaagaggagctggaggcagtccagaacatggtgtcccacacggagcgggcgctcaaagctgtgtccgactggatagacgagcaggaaaagggtagcagcgagcaggcagagtccgataacatggatgtgcccccagaggacgacagtaaagaaggggctggggaacagaagacggagcacatgaccagaaccctgcggggagtgatgcgggtgggcctggtggcaaagggcctcctactcaagggggacttggatctggagctggtgctgctgtgtaaggagaagcccacaaccgccctcctggacaaggtggccgacaacctggccatccagcttgctgctgtaacagaagacaagtacgaaatactgcaatctgtcgacgatgctgcgattgtgataaaaaacacaaaagagcctccattgtccctgaccatccacctgacatcccctgttgtcagagaagaaatggagaaagtattagctggagaaacgctatcagtcaacgaccccccggacgttctggacaggcagaaatgccttgctgccttggcgtccctccgacacgccaagtggttccaggccagagccaacgggctgaagtcttgtgtcattgtgatccgggtcttgagggacctgtgcactcgcgtgcccacctggggtcccctccgaggctggcctctcgagctcctgtgtgagaaatccattggcacggccaacagaccgatgggtgctggcgaggccctgcggagagtgctggagtgcctggcgtcgggcatcgtgatgccagatggttctggcatttatgacccttgtgaaaaagaagccactgatgctattgggcatctagacagacagcaacgggaagatatcacacagagtgcgcagcacgcactgcggctcgctgccttcggccagctccataaagtcctaggcatggaccctctgccttccaagatgcccaagaaaccaaagaatgaaaacccagtggactacaccgttcagatcccaccaagcaccacctatgccattacgcccatgaaacgcccaatggaggaggacggggaggagaagtcgcccagcaaaaagaagaagaagattcagaagaaagaggagaaggcagagcccccccaggctatgaatgccctgatgcggttgaaccagctgaagccagggctgcagtacaagctggtgtcccagactgggcccgtccatgcccccatctttaccatgtctgtggaggttgatggcaattcattcgaggcctctgggccctccaaaaagacggccaagctgcacgtggccgttaaggtgttacaggacatgggcttgccgacgggtgctgaaggcagggactcgagcaagggggaggactcggctgaggagaccgaggcgaagccagcagtggtggcccctgccccagtggtagaagctgtctccacccctagtgcggcctttccctcagatgccactgccgagaacgtaaaacagcaggggccgatcctgacaaagcacggcaagaacccagtcatggagctgaacgagaagaggcgtgggctcaagtacgagctcatctccgagaccgggggcagccacgacaagcgcttcgtcatggaggtcgaagtggatggacagaagttccaaggtgctggttccaacaaaaaggtggcgaaggcctacgctgctcttgctgccctagaaaagcttttccctgacacccctctcgcccttgatgccaacaaaaagaagagagccccagtacccgtcagagggggaccgaaatttgctgctaagccacataaccctggcttcggcatgggaggccccatgcacaacgaagtgcccccaccccccaaccttcgagggcggggaagaggcgggagcatccggggacgagggcgcgggcgaggatttggtggcgccaaccatggaggctacatgaatgccggtgctgggtatggaagctatgggtacggaggcaactcggcgacagcaggctacagtcagttctacagcaacggagggcattctgggaatgccagtggcggtggcggcgggggcggtggtggctcctccggctatggctcctactaccaaggtgacaactacaactcaccggtgcccccaaaacacgctgggaagaagcagccgcacgggggccagcagaagccctcctacggctcgggctaccagtcccaccagggccagcagcagtcctacaaccagagcccctacagcaactatggccctccacagggcaagcagaaaggctataaccatggacaaggcagctactcctactcgaactcctacaactctcccgggggcgggggcggatccgactacaactacgagagcaaattcaactacagtggtagtggaggccgaagcggcgggaacagctacggctcaggcggggcatcctacaacccagggtcacacgggggctacggcggaggttctgggggcggctcctcataccaaggcaaacaaggaggctactcacagtcgaactacaactccccggggtccggccagaactacagtggccctcccagctcctaccagtcctcacaaggcggctatggcagaaacgcagaccacagcatgaactaccagtacaga

SEQ ID NO: 4995 - DNA, 2682 bp, Homo sapiens
  source 1..2682: mol_type = genomic DNA
atgcgtccaatgcgaatttttgtgaatgatgaccgccatgtgatggcaaagcattcttccgtttatccaacacaagaggagctggaggcagtccagaacatggtgtcccacacggagcgggcgctcaaagctgtgtccgactggatagacgagcaggaaaagggtagcagcgagcaggcagagtccgataacatggatgtgcccccagaggacgacagtaaagaaggggctggggaacagaagacggagcacatgaccagaaccctgcggggagtgatgcgggtgggcctggtggcaaagggcctcctactcaagggggacttggatctggagctggtgctgctgtgtaaggagaagcccacaaccgccctcctggacaaggtggccgacaacctggccatccagcttgctgctgtaacagaagacaagtacgaaatactgcaatctgtcgacgatgctgcgattgtgataaaaaacacaaaagagcctccattgtccctgaccatccacctgacatcccctgttgtcagagaagaaatggagaaagtattagctggagaaacgctatcagtcaacgaccccccggacgttctggacaggcagaaatgccttgctgccttggcgtccctccgacacgccaagtggttccaggccagagccaacgggctgaagtcttgtgtcattgtgatccgggtcttgagggacctgtgcactcgcgtgcccacctggggtcccctccgaggctggcctctcgagctcctgtgtgagaaatccattggcacggccaacagaccgatgggtgctggcgaggccctgcggagagtgctggagtgcctggcgtcgggcatcgtgatgccagatggttctggcatttatgacccttgtgaaaaagaagccactgatgctattgggcatctagacagacagcaacgggaagatatcacacagagtgcgcagcacgcactgcggctcgctgccttcggccagctccataaagtcctaggcatggaccctctgccttccaagatgcccaagaaaccaaagaatgaaaacccagtggactacaccgttcagatcccaccaagcaccacctatgccattacgcccatgaaacgcccaatggaggaggacggggaggagaagtcgcccagcaaaaagaagaagaagattcagaagaaagaggagaaggcagagcccccccaggctatgaatgccctgatgcggttgaaccagctgaagccagggctgcagtacaagctggtgtcccagactgggcccgtccatgcccccatctttaccatgtctgtggaggttgatggcaattcattcgaggcctctgggccctccaaaaagacggccaagctgcacgtggccgttaaggtgttacaggacatgggcttgccgacgggtgctgaaggcagggactcgagcaagggggaggactcggctgaggagaccgaggcgaagccagcagtggtggcccctgccccagtggtagaagctgtctccacccctagtgcggcctttccctcagatgccactgccgagcaggggccgatcctgacaaagcacggcaagaacccagtcatggagctgaacgagaagaggcgtgggctcaagtacgagctcatctccgagaccgggggcagccacgacaagcgcttcgtcatggaggtcgaagtggatggacagaagttccaaggtgctggttccaacaaaaaggtggcgaaggcctacgctgctcttgctgccctagaaaagcttttccctgacacccctctcgcccttgatgccaacaaaaagaagagagccccagtacccgtcagagggggaccgaaatttgctgctaagccacataaccctggcttcggcatgggaggccccatgcacaacgaagtgcccccaccccccaaccttcgagggcggggaagaggcgggagcatccggggacgagggcgcgggcgaggatttggtggcgccaaccatggaggctacatgaatgccggtgctgggtatggaagctatgggtacggaggcaactcggcgacagcaggctacagtcagttctacagcaacggagggcattctgggaatgccagtggcggtggcggcgggggcggtggtggctcctccggctatggctcctactaccaaggtgacaactacaactcaccggtgcccccaaaacacgctgggaagaagcagccgcacgggggccagcagaagccctcctacggctcgggctaccagtcccaccagggccagcagcagtcctacaaccagagcccctacagcaactatggccctccacagggcaagcagaaaggctataaccatggacaaggcagctactcctactcgaactcctacaactctcccgggggcgggggcggatccgactacaactacgagagcaaattcaactacagtggtagtggaggccgaagcggcgggaacagctacggctcaggcggggcatcctacaacccagggtcacacgggggctacggcggaggttctgggggcggctcctcataccaaggcaaacaaggaggctactcacagtcgaactacaactccccggggtccggccagaactacagtggccctcccagctcctaccagtcctcacaaggcggctatggcagaaacgcagaccacagcatgaactaccagtacaga

SEQ ID NO: 4996 - DNA, 2106 bp, Homo sapiens
  source 1..2106: mol_type = genomic DNA
atgcgtccaatgcgaatttttgtgaatgatgaccgccatgtgatggcaaagcattcttccgtttatccaacacaagaggagctggaggcagtccagaacatggtgtcccacacggagcgggcgctcaaagctgtgtccgactggatagacgagcaggaaaagggtagcagcgagcaggcagagtccgataacatggatgtgcccccagaggacgacagtaaagaaggggctggggaacagaagacggagcacatgaccagaaccctgcggggagtgatgcgggtgggcctggtggcaaagggcctcctactcaagggggacttggatctggagctggtgctgctgtgtaaggagaagcccacaaccgccctcctggacaaggtggccgacaacctggccatccagcttgctgctgtaacagaagacaagtacgaaatactgcaatctgtcgacgatgctgcgattgtgataaaaaacacaaaagagcctccattgtccctgaccatccacctgacatcccctgttgtcagagaagaaatggagaaagtattagctggagaaacgctatcagtcaacgaccccccggacgttctggacaggcagaaatgccttgctgccttggcgtccctccgacacgccaagtggttccaggccagagccaacgggctgaagtcttgtgtcattgtgatccgggtcttgagggacctgtgcactcgcgtgcccacctggggtcccctccgaggctggcctctcgagctcctgtgtgagaaatccattggcacggccaacagaccgatgggtgctggcgaggccctgcggagagtgctggagtgcctggcgtcgggcatcgtgatgccagatggttctggcatttatgacccttgtgaaaaagaagccactgatgctattgggcatctagacagacagcaacgggaagatatcacacagagtgcgcagcacgcactgcggctcgctgccttcggccagctccataaagtcctaggcatggaccctctgccttccaagatgcccaagaaaccaaagaatgaaaacccagtggactacaccgttcagatcccaccaagcaccacctatgccattacgcccatgaaacgcccaatggaggaggacggggaggagaagtcgcccagcaaaaagaagaagaagattcagaagaaagaggagaaggcagagcccccccaggctatgaatgccctgatgcggttgaaccagctgaagccagggctgcagtacaagctggtgtcccagactgggcccgtccatgcccccatctttaccatgtctgtggaggttgatggcaattcattcgaggcctctgggccctccaaaaagacggccaagctgcacgtggccgttaaggtgttacaggacatgggcttgccgacgggtgctgaaggcagggactcgagcaagggggaggactcggctgaggagaccgaggcgaagccagcagtggtggcccctgccccagtggtagaagctgtctccacccctagtgcggcctttccctcagatgccactgccgagcaggggccgatcctgacaaagcacggcaagaacccagtcatggagctgaacgagaagaggcgtgggctcaagtacgagctcatctccgagaccgggggcagccacgacaagcgcttcgtcatggaggtcgaagtggatggacagaagttccaaggtgctggttccaacaaaaaggtggcgaaggcctacgctgctcttgctgccctagaaaagcttttccctgacacccctctcgcccttgatgccaacaaaaagaagagagccccagtacccgtcagagggggaccgaaatttgctgctaagccacataaccctggcttcggcatgggaggccccatgcacaacgaagtgcccccaccccccaaccttcgagggcggggaagaggcgggagcatccggggacgagggcgcgggcgaggatttggtggcgccaaccatggaggctacatgaatgccggtgctgggtatggaagctatgggtacggaggcaactcggcgacagcaggctacagtgactttttcacagactgctacggctatcatgattttgggtcttcc

SEQ ID NO: 4997 - DNA, 2070 bp, Homo sapiens
  source 1..2070: mol_type = genomic DNA
atgcgtccaatgcgaatttttgtgaatgatgaccgccatgtgatggcaaagcattcttccgtttatccaacacaagaggagctggaggcagtccagaacatggtgtcccacacggagcgggcgctcaaagctgtgtccgactggatagacgagcaggaaaagggtagcagcgagcaggcagagtccgataacatggatgtgcccccagaggacgacagtaaagaaggggctggggaacagaagacggagcacatgaccagaaccctgcggggagtgatgcgggtgggcctggtggcaaagggcctcctactcaagggggacttggatctggagctggtgctgctgtgtaaggagaagcccacaaccgccctcctggacaaggtggccgacaacctggccatccagcttgctgctgtaacagaagacaagtacgaaatactgcaatctgtcgacgatgctgcgattgtgataaaaaacacaaaagagcctccattgtccctgaccatccacctgacatcccctgttgtcagagaagaaatggagaaagtattagctggagaaacgctatcagtcaacgaccccccggacgttctggacaggcagaaatgccttgctgccttggcgtccctccgacacgccaagtggttccaggccagagccaacgggctgaagtcttgtgtcattgtgatccgggtcttgagggacctgtgcactcgcgtgcccacctggggtcccctccgaggctggcctctcgagctcctgtgtgagaaatccattggcacggccaacagaccgatgggtgctggcgaggccctgcggagagtgctggagtgcctggcgtcgggcatcgtgatgccagatggttctggcatttatgacccttgtgaaaaagaagccactgatgctattgggcatctagacagacagcaacgggaagatatcacacagagtgcgcagcacgcactgcggctcgctgccttcggccagctccataaagtcctaggcatggaccctctgccttccaagatgcccaagaaaccaaagaatgaaaacccagtggactacaccgttcagatcccaccaagcaccacctatgccattacgcccatgaaacgcccaatggaggaggacggggaggagaagtcgcccagcaaaaagaagaagaagattcagaagaaagaggagaaggcagagcccccccaggctatgaatgccctgatgcggttgaaccagctgaagccagggctgcagtacaagctggtgtcccagactgggcccgtccatgcccccatctttaccatgtctgtggaggttgatggcaattcattcgaggcctctgggccctccaaaaagacggccaagctgcacgtggccgttaaggtgttacaggacatgggcttgccgacgggtgctgaaggcagggactcgagcaagggggaggactcggctgaggagaccgaggcgaagccagcagtggtggcccctgccccagtggtagaagctgtctccacccctagtgcggcctttccctcagatgccactgccgagcaggggccgatcctgacaaagcacggcaagaacccagtcatggagctgaacgagaagaggcgtgggctcaagtacgagctcatctccgagaccgggggcagccacgacaagcgcttcgtcatggaggtcgaagtggatggacagaagttccaaggtgctggttccaacaaaaaggtggcgaaggcctacgctgctcttgctgccctagaaaagcttttccctgacacccctctcgcccttgatgccaacaaaaagaagagagccccagtacccgtcagagggggaccgaaatttgctgctaagccacataaccctggcttcggcatgggaggccccatgcacaacgaagtgcccccaccccccaaccttcgagggcggggaagaggcgggagcatccggggacgagggcgcgggcgaggatttggtggcgccaaccatggaggctacatgaatgccggtgctgggtatggaagctatgggtacggaggcaactcggcgacagcaggctacacaggttttgta

SEQ ID NO: 4998 - DNA, 2637 bp, Homo sapiens
  source 1..2637: mol_type = genomic DNA
atggcaggtgggggcggcgacctgagcaccaggaggctgaatgaatgtatttcaccagtagcaaatgagatgaaccatcttcctgcacacagccacgatttgcaaaggatgttcacggaagaccagggtgtagatgacaggctgctctatgacattgtattcaagcacttcaaaagaaataaggtggagatttcaaatgcaataaaaaagacatttccattcctcgagggcctccgtgatcgtgatctcatcacaaataaaatgtttgaagattctcaagattcttgtagaaacctggtccctgtacagagagtggtgtacaatgttcttagtgaactggagaagacatttaacctgccagttctggaagcactgttcagcgatgtcaacatgcaggaataccccgatttaattcacatttataaaggctttgaaaatgtaatccatgacaaattgcctctccaagaaagtgaagaagaagagagggaggagaggtctggcctccaactaagtcttgaacaaggaactggtgaaaactcttttcgaagcctgacttggccaccttcgggttccccatctcatgctggtacaaccccacctgaaaatggactctcagagcacccctgtgaaacagaacagataaatgcaaagagaaaagatacaaccagtgacaaagatgattcgctaggaagccaacaaacaaatgaacaatgtgctcaaaaggctgagccaacagagtcctgcgaacaaattgctgtccaagtgaataatggggatgctggaagggagatgccctgcccgttgccctgtgatgaagaaagcccagaggcagagctacacaaccatggaatccaaattaattcctgttctgtgcgactggtggatataaaaaaggaaaagccattttctaattcaaaagttgagtgccaagcccaagcaagaactcatcataaccaggcatctgacataatagtcatcagcagtgaggactctgaaggatccactgacgttgatgagcccttagaagtcttcatctcagcaccgagaagtgagcctgtgatcaataatgacaaccctttagaatcaaatgatgaaaaggagggccaagaagccacttgctcacgaccccagattgtaccagagcccatggatttcagaaaattatctacattcagagaaagttttaagaaaagagtgataggacaagaccacgacttttcagaatccagtgaggaggaggcgcccgcagaagcctcgagcggggcactgagaagcaagcatggtgagaaggctcctatgacttctagaagtacatctacttggagaatacccagcaggaagagacgtttcagcagtagtgacttttcagacctgagtaatggagaagagcttcaggaaacctgcagctcatccctaagaagagggtcaggatcacagccacaagaacctgaaaataagaagtgctcctgtgtcatgtgttttccaaaaggtgtgccaagaagccaagaagcaaggactgaaagtagtcaagcatctgacatgatggataccatggatgttgaaaacaattctactttggaaaaacacagtgggaaaagaagaaaaaagagaaggcatagatctaaagtaaatggtctccaaagagggagaaagaaagacagacctagaaaacatttaactctgaataacaaagtccaaaagaaaagatggcaacaaagaggaagaaaagccaacactagacctttgaaaagaagaagaaaaagaggtccaagaattcccaaagatgaaaatattaattttaaacaatctgaacttcctgtgacctgtggtgaggtgaagggcactctatataaggagcgattcaaacaaggaacctcaaagaagtgtatacagagtgaggataaaaagtggttcactcccagggaatttgaaattgaaggagaccgcggagcatccaagaactggaagctaagtatacgctgcggtggatataccctgaaagtcctgatggagaacaaatttctgccagaaccaccaagcacaagaaaaaagagaatactggaatctcacaacaataccttagttgacccttgtgaggagcataagaagaagaacccagatgcttcagtcaagttctcagagtttttaaagaagtgctcagagacatggaagaccatttttgctaaagagaaaggaaaatttgaagatatggcaaaggcggacaaggcccattatgaaagagaaatgaaaacctatatccctcctaaaggggagaaaaaaaagaagttcaaggatcccaatgcacccaagaggcctcctttggcctttttcctgttctgctctgagtatcgcccaaaaatcaaaggagaacatcctggcctgtccattgatgatgttgtgaagaaactggcagggatgtggaataacaccgctgcagctgacaagcagttttatgaaaagaaggctgcaaagctgaaggaaaaatacaaaaaggatattgctgcatatcgagctaaaggaaagcctaattcagcaaaaaagagagttgtcaaggctgaaaaaagcaagaaaaagaaggaagaggaagaagatgaagaggatgaacaagaggaggaaaatgaagaagatgatgataaa

SEQ ID NO: 4999 - DNA, 2064 bp, Homo sapiens
  source 1..2064: mol_type = genomic DNA
atggcaggtgggggcggcgacctgagcaccaggaggctgaatgaatgtatttcaccagtagcaaatgagatgaaccatcttcctgcacacagccacgatttgcaaaggatgttcacggaagaccagggtgtagatgacaggctgctctatgacattgtattcaagcacttcaaaagaaataaggtggagatttcaaatgcaataaaaaagacatttccattcctcgagggcctccgtgatcgtgatctcatcacaaataaaatgtttgaagattctcaagattcttgtagaaacctggtccctgtacagagagtggtgtacaatgttcttagtgaactggagaagacatttaacctgccagttctggaagcactgttcagcgatgtcaacatgcaggaataccccgatttaattcacatttataaaggctttgaaaatgtaatccatgacaaattgcctctccaagaaagtgaagaagaagagagggaggagaggtctggcctccaactaagtcttgaacaaggaactggtgaaaactcttttcgaagcctgacttggccaccttcgggttccccatctcatgctggtacaaccccacctgaaaatggactctcagagcacccctgtgaaacagaacagataaatgcaaagagaaaagatacaaccagtgacaaagatgattcgctaggaagccaacaaacaaatgaacaatgtgctcaaaaggctgagccaacagagtcctgcgaacaaattgctgtccaagtgaataatggggatgctggaagggagatgccctgcccgttgccctgtgatgaagaaagcccagaggcagagctacacaaccatggaatccaaattaattcctgttctgtgcgactggtggatataaaaaaggaaaagccattttctaattcaaaagttgagtgccaagcccaagcaagaactcatcataaccaggcatctgacataatagtcatcagcagtgaggactctgaaggatccactgacgttgatgagcccttagaagtcttcatctcagcaccgagaagtgagcctgtgatcaataatgacaaccctttagaatcaaatgatgaaaaggagggccaagaagccacttgctcacgaccccagattgtaccagagcccatggatttcagaaaattatctacattcagagaaagttttaagaaaagagtgataggacaagaccacgacttttcagaatccagtgaggaggaggcgcccgcagaagcctcgagcggggcactgagaagcaagcatggtgagaaggctcctatgacttctagaagtacatctacttggagaatacccagcaggaagagacgtttcagcagtagtgacttttcagacctgagtaatggagaagagcttcaggaaacctgcagctcatccctaagaagagggtcaggatcacagccacaagaacctgaaaataagaagtgctcctgtgtcatgtgttttccaaaaggtgtgccaagaagccaagaagcaaggactgaaagtagtcaagcatctgacatgatggataccatggatgttgaaaacaattctactttggaaaaacacagtgggaaaagaagaaaaaagagaaggcatagatctaaagtaaatggtctccaaagagggagaaagaaagacagacctagaaaacatttaactctgaataacaaagtccaaaagaaaagatggcaacaaagaggaagaaaagccaacactagacctttgaaaagaagaagaaaaagaggtccaagaattcccaaagatgaaaatattaattttaaacaatctgaacttcctgtgacctgtggtgaggtgaagggcactctatataaggagcgattcaaacaaggaacctcaaagaagtgtatacagagtgaggataaaaagtggttcactcccagggaatttgaaattgaaggagaccgcggagcatccaagaactggaagctaagtatacgctgcggtggatataccctgaaagtcctgatggagaacaaatttctgccagaaccaccaagcacaagaaaaaaggtgatgatcaag

SEQ ID NO: 5000 - DNA, 1356 bp, Homo sapiens
  source 1..1356: mol_type = genomic DNA
atggcaggtgggggcggcgacctgagcaccaggatgttcacggaagaccagggtgtagatgacaggctgctctatgacattgtattcaagcacttcaaaagaaataaggtggagatttcaaatgcaataaaaaagacatttccattcctcgagggcctccgtgatcgtgatctcatcacaaataaaatgtttgaagattctcaagattcttgtagaaacctggtccctgtacagagagtggtgtacaatgttcttagtgaactggagaagacatttaacctgccagttctggaagcactgttcagcgatgtcaacatgcaggaataccccgatttaattcacatttataaaggctttgaaaatgtaatccatgacaaattgcctctccaagaaagtgaagaagaagagagggaggagaggtctggcctccaactaagtcttgaacaaggaactggtgaaaactcttttcgaagcctgacttggccaccttcgggttccccatctcatgctggtacaaccccacctgaaaatggactctcagagcacccctgtgaaacagaacagataaatgcaaagagaaaagatacaaccagtgacaaagatgattcgctaggaagccaacaaacaaatgaacaatgtgctcaaaaggctgagccaacagagtcctgcgaacaaattgctgtccaagtgaataatggggatgctggaagggagatgccctgcccgttgccctgtgatgaagaaagcccagaggcagagctacacaaccatggaatccaaattaattcctgttctgtgcgactggtggatataaaaaaggaaaagccattttctaattcaaaagttgagtgccaagcccaagcaagaactcatcataaccaggcatctgacataatagtcatcagcagtgaggactctgaaggatccactgacgttgatgagcccttagaagtcttcatctcagcaccgagaagtgagcctgtgatcaataatgacaaccctttagaatcaaatgatgaaaaggagggccaagaagccacttgctcacgaccccagattgtaccagagcccatggatttcagaaaattatctacattcagagaaagttttaagaaaagagtgataggacaagaccacgacttttcagaatccagtgaggaggaggcgcccgcagaagcctcgagcggggcactgagaagcaagcatgctcctatgacttctagaagtacatctacttggagaatacccagcaggaagagacgtttcagcagtagtgacttttcagacctgagtaatggagaagagcttcaggaaacctgcagctcatccctaagaagagggtcaggtaaagaagat

SEQ ID NO: 5001 - DNA, 2655 bp, Homo sapiens
  source 1..2655: mol_type = genomic DNA
atggcaggtgggggcggcgacctgagcaccaggaggctgaatgaatgtatttcaccagtagcaaatgagatgaaccatcttcctgcacacagccacgatttgcaaaggatgttcacggaagaccagggtgtagatgacaggctgctctatgacattgtattcaagcacttcaaaagaaataaggtggagatttcaaatgcaataaaaaagacatttccattcctcgagggcctccgtgatcgtgatctcatcacaaataaaatgtttgaagattctcaagattcttgtagaaacctggtccctgtacagagagtggtgtacaatgttcttagtgaactggagaagacatttaacctgccagttctggaagcactgttcagcgatgtcaacatgcaggaataccccgatttaattcacatttataaaggctttgaaaatgtaatccatgacaaattgcctctccaagaaagtgaagaagaagagagggaggagaggtctggcctccaactaagtcttgaacaaggaactggtgaaaactcttttcgaagcctgacttggccaccttcgggttccccatctcatgctggtacaaccccacctgaaaatggactctcagagcacccctgtgaaacagaacagataaatgcaaagagaaaagatacaaccagtgacaaagatgattcgctaggaagccaacaaacaaatgaacaatgtgctcaaaaggctgagccaacagagtcctgcgaacaaattgctgtccaagtgaataatggggatgctggaagggagatgccctgcccgttgccctgtgatgaagaaagcccagaggcagagctacacaaccatggaatccaaattaattcctgttctgtgcgactggtggatataaaaaaggaaaagccattttctaattcaaaagttgagtgccaagcccaagcaagaactcatcataaccaggcatctgacataatagtcatcagcagtgaggactctgaaggatccactgacgttgatgagcccttagaagtcttcatctcagcaccgagaagtgagcctgtgatcaataatgacaaccctttagaatcaaatgatgaaaaggagggccaagaagccacttgctcacgaccccagattgtaccagagcccatggatttcagaaaattatctacattcagagaaagttttaagaaaagagtgataggacaagaccacgacttttcagaatccagtgaggaggaggcgcccgcagaagcctcgagcggggcactgagaagcaagcatggtgagaaggctcctatgacttctagaagtacatctacttggagaatacccagcaggaagagacgtttcagcagtagtgacttttcagacctgagtaatggagaagagcttcaggaaacctgcagctcatccctaagaagagggtcaggatcacagccacaagaacctgaaaataagaagtgctcctgtgtcatgtgttttccaaaaggtgtgccaagaagccaagaagcaaggactgaaagtagtcaagcatctgacatgatggataccatggatgttgaaaacaattctactttggaaaaacacagtgggaaaagaagaaaaaagagaaggcatagatctaaagtaaatggtctccaaagagggagaaagaaagacagacctagaaaacatttaactctgaataacaaagtccaaaagaaaagatggcaacaaagaggaagaaaagccaacactagacctttgaaaagaagaagaaaaagaggtccaagaattcccaaagatgaaaatattaattttaaacaatctgaacttcctgtgacctgtggtgaggtgaagggcactctatataaggagcgattcaaacaaggaacctcaaagaagtgtatacagagtgaggataaaaagtggttcactcccagggaatttgaaattgaaggagaccgcggagcatccaagaactggaagctaagtatacgctgcggtggatataccctgaaagtcctgatggagaacaaatttctgccagaaccaccaagcacaagaaaaaagagaatactggaatctcacaacaataccttagttgacccttgtccggaaaactcaaatatatgtgaggtgtgcaacaaatggggacggctgttctgctgcgacacttgtccaagatcctttcatgagcactgccacatcccatccgtggaagctaacaagaacccgtggagttgcatcttctgcaggataaagactattcaggaaagatgcccagaaagccaatcaggtcatcaggaatctgaagtcctgatgaggcagatgctgcctgaggagcagttgaaatgtgaattcctcctcttgaaggtctactgtgattcgaaaagctgctttttcgcctcagaaccgtattataacagagaggggtctcagggcccacagaagcccatgtggttaaacaaagtcaagacaagtttgaatgagcagatgtacacccgagtagaagggtttgtgcaggacatgcgtctcatctttcataaccacaaggaattttacagggaagataaattcaccagactgggaattcaagtacaggacatctttgagaagaatttcagaaacatttttgcaattcaggaaacaagcaagaacattataatgtttatt

SEQ ID NO: 5002 - DNA, 1335 bp, Homo sapiens
  source 1..1335: mol_type = genomic DNA
atgatgttcacggaagaccagggtgtagatgacaggctgctctatgacattgtattcaagcacttcaaaagaaataaggtggagatttcaaatgcaataaaaaagacatttccattcctcgagggcctccgtgatcgtgatctcatcacaaataaaatgtttgaagattctcaagattcttgtagaaacctggtccctgtacagagagtggtgtacaatgttcttagtgaactggagaagacatttaacctgccagttctggaagcactgttcagcgatgtcaacatgcaggaataccccgatttaattcacatttataaaggctttgaaaatgtaatccatgacaaattgcctctccaagaaagtgaagaagaagagagggaggagaggtctggcctccaactaagtcttgaacaaggaactggtgaaaactcttttcgaagcctgacttggccaccttcgggttccccatctcatgctggtacaaccccacctgaaaatggactctcagagcacccctgtgaaacagaacagataaatgcaaagagaaaagatacaaccagtgacaaagatgattcgctaggaagccaacaaacaaatgaacaatgtgctcaaaaggctgagccaacagagtcctgcgaacaaattgctgtccaagtgaataatggggatgctggaagggagatgccctgcccgttgccctgtgatgaagaaagcccagaggcagagctacacaaccatggaatccaaattaattcctgttctgtgcgactggtggatataaaaaaggaaaagccattttctaattcaaaagttgagtgccaagcccaagcaagaactcatcataaccaggcatctgacataatagtcatcagcagtgaggactctgaaggatccactgacgttgatgagcccttagaagtcttcatctcagcaccgagaagtgagcctgtgatcaataatgacaaccctttagaatcaaatgatgaaaaggagggccaagaagccacttgctcacgaccccagattgtaccagagcccatggatttcagaaaattatctacattcagagaaagttttaagaaaagagtgataggacaagaccacgacttttcagaatccagtgaggaggaggcgcccgcagaagcctcgagcggggcactgagaagcaagcatggtgagaaggctcctatgacttctagaagtacatctacttggagaatacccagcaggaagagacgtttcagcagtagtgacttttcagacctgagtaatggagaagagcttcaggaaacctgcagctcatccctaagaagagggtcaggtaaagaagat

SEQ ID NO: 5003 - DNA, 312 bp, Homo sapiens
  source 1..312: mol_type = genomic DNA
atggtgcgatctcggctcactgcagtctccgcctcttgggttcaggctcatccacctgcagacatggggcgcagaaagtcaaaacgaaagccgcctcccaagaagaagatgacaggcaccctcgagacccagttcacctgccccttctgcaaccacgagaaatcctgtgatgtgaaaatggaccgtgcccgcaacaccggagtcatctcttgtaccgtgtgcctagaggaattccagacgcccataacgtatctgtcagaacccgtggatgtgtacagtgattggatagacgcctgcgaggcggccaatcag

SEQ ID NO: 5004 - DNA, 270 bp, Homo sapiens
  source 1..270: mol_type = genomic DNA
atggctcatccacctgcagacatggggcgcagaaagtcaaaacgaaagccgcctcccaagaagaagatgacaggcaccctcgagacccagttcacctgccccttctgcaaccacgagaaatcctgtgatgtgaaaatggaccgtgcccgcaacaccggagtcatctcttgtaccgtgtgcctagaggaattccagacgcccataacgtatctgtcagaacccgtggatgtgtacagtgattggatagacgcctgcgaggcggccaatcag

SEQ ID NO: 5005 - DNA, 1047 bp, Homo sapiens
  source 1..1047: mol_type = genomic DNA
atgggagacatgggagatccaccaaaaaaaaaacgtctgatttccctatgtgttggttgcggcaatcagattcacgatcagtatattctgagggtttctccggatttggaatggcatgcggcatgtttgaaatgtgcggagtgtaatcagtatttggacgagagctgtacatgctttgttagggatgggaaaacctactgtaaaagagattatatcaggttgtacgggatcaaatgcgccaagtgcagcatcggcttcagcaagaacgacttcgtgatgcgtgcccgctccaaggtgtatcacatcgagtgtttccgctgtgtggcctgcagccgccagctcatccctggggacgaatttgcgcttcgggaggacggtctcttctgccgagcagaccacgatgtggtggagagggccagtctaggcgctggcgacccgctcagtcccctgcatccagcgcggccactgcaaatggcagcggagcccatctccgccaggcagccagccctgcggccccacgtccacaagcagccggagaagaccacccgcgtgcggactgtgctgaacgagaagcagctgcacaccttgcggacctgctacgccgcaaacccgcggccagatgcgctcatgaaggagcaactggtagagatgacgggcctcagtccccgtgtgatccgggtctggtttcaaaacaagcggtgcaaggacaagaagcgaagcatcatgatgaagcaactccagcagcagcagcccaatgacaaaactaatatccaggggatgacaggaactcccatggtggctgccagtccagagagacacgacggtggcttacaggctaacccagtggaagtacaaagttaccagccaccttggaaagtactgagcgacttcgccttgcagagtgacatagatcagcctgcttttcagcaactggtcaatttttcagaaggaggaccgggctctaattccactggcagtgaagtagcatcaatgtcctctcaacttccagatacacctaacagcatggtagccagtcctattgaggca

SEQ ID NO: 5006 - DNA, 1077 bp, Homo sapiens
  source 1..1077: mol_type = genomic DNA
atggtggatattatttttcattatccttttctgggtgctatgggtgatcattccaagaagaagcccgggacggccatgtgcgtgggctgcgggagtcagatccacgaccagtttatcctgcgggtgtcgcccgacctcgagtggcacgcggcctgcctcaagtgtgccgagtgcagccagtacctggacgagacgtgcacgtgcttcgtgagagacgggaagacctactgcaagcgggactatgtcaggctgttcggcatcaagtgcgccaagtgccaggtgggcttcagcagcagcgacctggtgatgagggcgcgggacagcgtgtaccacatcgagtgcttccgctgctccgtgtgcagccgccagctgctgcctggggacgagttctcgctgcgggagcacgagctgctctgccgcgccgaccacggcctcctgctcgagcgcgccgcggccggcagcccgcgcagccccggcccgcttcccggcgcccgcggcctgcatctgcccgacgctgggtcgggccggcagcccgcgttgcgcccgcacgtgcacaagcagacggagaagacgacccgcgtgcggactgtgctgaacgagaagcagctgcacactctgcggacctgctacgccgccaacccgcggcccgacgctctcatgaaggagcagctggtggagatgaccggcctgagcccgcgggtcatccgcgtctggttccagaacaagcgctgcaaggacaagaagaaatccattctcatgaagcagctgcagcagcagcagcacagcgacaagacgagccttcagggactgactgggacgcccctggtggcgggcagtcccatccgccatgagaacgccgtgcagggcagcgcagtggaggtgcagacgtaccagccgccgtggaaggcgctcagcgagtttgccctccagagcgacctggaccaacccgccttccaacagctggtctccttctccgagtccggctccctaggcaactcctccggcagcgacgtgacctccctgtcctcgcagctcccggacacccccaacagtatggtgccgagtcccgtggagacg

SEQ ID NO: 5007 - DNA, 5226 bp, Homo sapiens
  source 1..5226: mol_type = genomic DNA
atgacgtcaagttcgcccgctggcttggaaggttcagacctatcttccatcaacaccatgatgtcggcggtcatgagtgtagggaaggtcacagagaatggcgggagcccccaggggatcaagtccccctcgaagcctccaggaccaaatcggattggcagaaggaaccaggaaacgaaagaggagaagtcttcctataactgccccctgtgtgagaagatttgcactacccagcaccagctgaccatgcacattcgccagcacaacacagacactggaggagccgaccactcatgcagcatctgcggaaagtcactgagctcggccagctccctcgatcgccacatgctggtgcactctggcgagaggccttacaagtgcactgtgtgtggccagtcatttaccaccaatgggaacatgcacagacatatgaagatccatgagaaggaccctaacagtgccacagccacagcccctccatctcctctgaaacgtaggcgattgtcctccaagaggaaactgagtcacgatgccgagtcagagagagaagacccagcaccagctaaaaagatggtagaagacgggcagtcaggtgacttggagaagaaagctgatgaagtctttcactgcccagtatgtttcaaggagtttgtttgcaagtatggactggagacccacatggagacccattcagataacccactaagatgtgacatttgttgtgtcacctttcgaacacatcgaggactgctgcgtcacaacgcgcttgtccacaaacaacttcccagggatgcaatgggcagacctttcatacagaacaacccttcaattcctgctggcttccacgacttaggattcacggacttctcctgtaggaagtttcctcgcatttctcaggcctggtgcgaaacaaacctgcggaggtgcatcagcgagcaacaccgttttgtctgcgacacctgtgacaaggcgttccccatgctctgctcactggctctgcacaagcagacccatgtggcggcagaccagggtcaagaaaagccgcaggccacgcccctgcctggtgacgccctggaccagaagggcttcctggccttgcttggcctgcagcacaccaaagacgtcaggcctgcccccgccgaggagcccctgccggatgacaaccaggcaattcagctccagacactcaagtgtcagctacctcaggaccccggctgcaccaacctgctgagcctgtcacctttcgaagctgcttccctaggcggttctctcacagttctccccgcgaccaaggacagcataaagcacctgtccctgcagcccttccagaagggcttcatcatccagcctgacagcagcattgtggtcaagcccatctctggcgagtcggccatcgagctggcagacatccagcaaattctgaagatggcagcctcggctccccctcagatcagtcttccgcccttctccaaggcccctgccgccccactgcaggcgatcttcaagcacatgccccctctgaagccaaagcccctggtcacaccacggacggtggtggccacctccacgcccccgcctctcatcaacgcccagcaggcttccccgggctgtatcagccccagcctgccgccaccgcccctgaagctcctcaaaggctcagtggaggcggcctccaacgcccacctgctgcagtccaagtccgggacccagccccacgcggccacgcggctctccctgcagcagccgcgggcggagctgccgggccagcctgagatgaagacgcagctggagcaggacagcatcatcgaggccctgctgccgctgagcatggaggccaagatcaagcaggagatcacagagggggaactcaaggccttcatgacagcgcccggcggcaagaagacgcccgccatgcgcaaggtgctctacccctgccgcttctgcaaccaggtgtttgccttctcgggggtcttgcgtgcccacgtgcgctcccacctgggcatctcgccataccagtgcaacatctgcgactacatcgccgccgacaaggccgcgctcatccgccacctgcgcacgcacagtggggagcggccctacatttgcaagatctgccactaccccttcactgtcaaagccaactgcgagcggcacctgcgcaagaagcacctcaaggccacccgcaaggatatcgagaagaacatcgagtatgtgagtagcagcgcggccgagctggtggacgccttctgcgccccggacaccgtgtgccggctgtgcggcgaggacctcaagcactatcgtgccctgcgcatccacatgcgcacgcactgcggccgcggcctgggcgggggccacaagggccgcaagcccttcgagtgcaaggagtgcagcgccgcgttcgcggccaagcgcaactgcatccaccacatcctcaagcagcacctgcacgtgcccgagcaggacatcgagagctacgtgctggccgccgacggcctgggccccgcagaggcgccggccgctgaggcgtcggggcgcggggaggacagtggctgcgctgcccttggtgactgcaagcccctcactgccttcctggaaccccagaacggctttcttcacaggggccccacccagcctccacctccccatgtctcgatcaagttggagcccgccagtagctttgcggtggacttcaatgagcccctggacttctcgcagaagggcctggccctggtccaagtgaagcaggaaaacatctcctttctgagcccttcttccctggtcccctatgactgctccatggagcccatcgacctgtccatccccaagaacttcaggaaaggggacaaggatttggccactcccagcgaagccaagaagcctgaggaggaggcggggagcagcgagcagccctctccctgcccagcacccggcccttctcttcctgtaactttggggcccagcggaatcctggaaagccccatggcccctgctccggcggccaccccggaacccccagcacagcccctgcagggccctgttcagctggcggtcccaatctactcctcagccctggtcagcagccctccactcgtgggcagctcagccctcctgagtggcacagccttgctgcgtccactgcggcccaagcccccgctgcttttgccaaagccccccgtgacagaagagctgcccccgctggcctccattgcccagatcatctcatctgtatcctcggcccccaccctgctgaaaaccaaggtggcggacccagggcccgcaagcactggcagtaacaccacggcttcagacagcttaggaggttctgtccccaaagccgccaccaccgccacccccgctgccaccaccagcccaaaagagtctagtgagcctcccgctccagccagcagcccagaggctgcctctcccaccgagcagggcccagcgggcacgtcgaagaagaggggccggaaaagggggatgaggagccgaccccgcgccaacagcggcggggtggacctggactccagcggggagtttgccagcatcgagaagatgctggccaccacagacaccaacaagttcagtccgtttctgcagacagcggaggacaacactcaggatgaggtggccggagcccctgccgaccaccatgggcccagtgatgaagagcagggcagtcccccagaagacaagctgctgagggccaagcggaactcgtacaccaactgcctgcagaagatcacctgtccccactgtccccgggttttcccttgggccagctccctacagaggcacatgctcacacacactggtcagaaacccttcccttgtcaaaaatgcgatgccttcttttctaccaaatctaactgtgaacgccaccagttgcgcaaacacggagttaccacctgttccctgagaagaaacgggcttatcccccagtcaaaagagagtgatgttggatcccatgatagcacagacagtcagtcggatgcggagactgcagccgccgcgggcgaagtgctagacctcacctcacgggacagagagcagccgtcggagggcgccactgagctccgccaggtcgcaggggatgcgcctgtggagcaggccacggcggaaacggcctcgccggtgcaccgggaagagcacgggcgtggggagagccatgagccggaggaggagcatggcactgaggagagcactggggacgccgacggcgcggaagaggacgcgtcgagcaaccagagcctggacctggacttcgccaccaagctcatggacttcaagctggcggagggcgacggcgaggcaggcgccgggggcgcggcctcgcaggagcagaagctcgcctgcgacacctgtgggaagagcttcaagttcctgggcaccctgagccgccaccggaaggcgcacggccgccaggagcccaaggacgagaagggagatggcgccagcactgcagaggaggggccccagcccgcccctgaacaggaggagaagccccccgagaccccggcagaggtggtggagtcggccccgggtgccggggaggccccggcggaaaagctcgcggaggagacggagggcccctccgacggggagagcgcggccgagaaaaggtcctcagagaagagcgacgatgacaagaaaccaaagacagactcccccaaaagcgtggccagcaaggcagacaagaggaagaaggtctgcagcgtgtgcaacaagcggttctggtcgctgcaggacctgacccggcacatgcgctcccacacaggggaaaggccatacaaatgtcagacctgcgagcgaaccttcaccttgaagcacagcctggttcgccaccagcggatccaccagaaagccaggcatgccaaacaccacgggaaggacagcgacaaggaagagcggggtgaggaggacagcgagaatgagtccacccacagcggcaacaacgccgtctcagagaacgaggctgagctggctcccaatgccagcaaccacatggctgtcacccggagccggaaggagggcttggccagtgccaccaaggactgcagccacagggaggagaaggtcacggcagggtggccgtctgagcctggccagggtgaccttaacccagagagcccggcggccctggggcaggacctgctggagccgcgcagcaagaggcctgcccacccaatcctggccacagctgatggcgcctcccagctcgtggggatggag

SEQ ID NO: 5008 - DNA, 4428 bp, Homo sapiens
  source 1..4428: mol_type = genomic DNA
atgacgtcaagttcgcccgctggcttggaaggttcagacctatcttccatcaacaccatgatgtcggcggtcatgagtgtagggaaggtcacagagaatggcgggagcccccaggggatcaagtccccctcgaagcctccaggaccaaatcggattggcagaaggaaccaggaaacgaaagaggagaagtcttcctataactgccccctgtgtgagaagatttgcactacccagcaccagctgaccatgcacattcgccagcacaacacagacactggaggagccgaccactcatgcagcatctgcggaaagtcactgagctcggccagctccctcgatcgccacatgctggtgcactctggcgagaggccttacaagtgcactgtgtgtggccagtcatttaccaccaatgggaacatgcacagacatatgaagatccatgagaaggaccctaacagtgccacagccacagcccctccatctcctctgaaacgtaggcgattgtcctccaagaggaaactgagtcacgatgccgagtcagagagagaagacccagcaccagctaaaaagatggtagaagacgggcagtcaggtgacttggagaagaaagctgatgaagtctttcactgcccagtatgtttcaaggagtttgtttgcaagtatggactggagacccacatggagacccattcagataacccactaagatgtgacatttgttgtgtcacctttcgaacacatcgaggactgctgcgtcacaacgcgcttgtccacaaacaacttcccagggatgcaatgggcagacctttcatacagaacaacccttcaattcctgctggcttccacgacttaggattcacggacttctcctgtaggaagtttcctcgcatttctcaggcctggtgcgaaacaaacctgcggaggtgcatcagcgagcaacaccgttttgtctgcgacacctgtgacaaggcgttccccatgctctgctcactggctctgcacaagcagacccatgtggcggcagaccagggtcaagaaaagccgcaggccacgcccctgcctggtgacgccctggaccagaagggcttcctggccttgcttggcctgcagcacaccaaagacgtcaggcctgcccccgccgaggagcccctgccggatgacaaccaggcaattcagctccagacactcaagtgtcagctacctcaggaccccggctgcaccaacctgctgagcctgtcacctttcgaagctgcttccctaggcggttctctcacagttctccccgcgaccaaggacagcataaagcacctgtccctgcagcccttccagaagggcttcatcatccagcctgacagcagcattgtggtcaagcccatctctggcgagtcggccatcgagctggcagacatccagcaaattctgaagatggcagcctcggctccccctcagatcagtcttccgcccttctccaaggcccctgccgccccactgcaggcgatcttcaagcacatgccccctctgaagccaaagcccctggtcacaccacggacggtggtggccacctccacgcccccgcctctcatcaacgcccagcaggcttccccgggctgtatcagccccagcctgccgccaccgcccctgaagctcctcaaaggctcagtggaggcggcctccaacgcccacctgctgcagtccaagtccgggacccagccccacgcggccacgcggctctccctgcagcagccgcgggcggagctgccgggccagcctgagatgaagacgcagctggagcaggacagcatcatcgaggccctgctgccgctgagcatggaggccaagatcaagcaggagatcacagagggggaactcaaggccttcatgacagcgcccggcggcaagaagacgcccgccatgcgcaaggtgctctacccctgccgcttctgcaaccaggtgtttgccttctcgggggtcttgcgtgcccacgtgcgctcccacctgggcatctcgccataccagtgcaacatctgcgactacatcgccgccgacaaggccgcgctcatccgccacctgcgcacgcacagtggggagcggccctacatttgcaagatctgccactaccccttcactgtcaaagccaactgcgagcggcacctgcgcaagaagcacctcaaggccacccgcaaggatatcgagaagaacatcgagtatgtgagtagcagcgcggccgagctggtggacgccttctgcgccccggacaccgtgtgccggctgtgcggcgaggacctcaagcactatcgtgccctgcgcatccacatgcgcacgcactgcggccgcggcctgggcgggggccacaagggccgcaagcccttcgagtgcaaggagtgcagcgccgcgttcgcggccaagcgcaactgcatccaccacatcctcaagcagcacctgcacgtgcccgagcaggacatcgagagctacgtgctggccgccgacggcctgggccccgcagaggcgccggccgctgaggcgtcggggcgcggggaggacagtggctgcgctgcccttggtgactgcaagcccctcactgccttcctggaaccccagaacggctttcttcacaggggccccacccagcctccacctccccatgtctcgatcaagttggagcccgccagtagctttgcggtggacttcaatgagcccctggacttctcgcagaagggcctggccctggtccaagtgaagcaggaaaacatctcctttctgagcccttcttccctggtcccctatgactgctccatggagcccatcgacctgtccatccccaagaacttcaggaaaggggacaaggatttggccactcccagcgaagccaagaagcctgaggaggaggcggggagcagcgagcagccctctccctgcccagcacccggcccttctcttcctgtaactttggggcccagcggaatcctggaaagccccatggcccctgctccggcggccaccccggaacccccagcacagcccctgcagggccctgttcagctggcggtcccaatctactcctcagccctggtcagcagccctccactcgtgggcagctcagccctcctgagtggcacagccttgctgcgtccactgcggcccaagcccccgctgcttttgccaaagccccccgtgacagaagagctgcccccgctggcctccattgcccagatcatctcatctgtatcctcggcccccaccctgctgaaaaccaaggtggcggacccagggcccgcaagcactggcagtaacaccacggcttcagacagcttaggaggttctgtccccaaagccgccaccaccgccacccccgctgccaccaccagcccaaaagagtctagtgagcctcccgctccagccagcagcccagaggctgcctctcccaccgagcagggcccagcgggcacgtcgaagaagaggggccggaaaagggggatgaggagccgaccccgcgccaacagcggcggggtggacctggactccagcggggagtttgccagcatcgagaagatgctggccaccacagacaccaacaagttcagtccgtttctgcagacagcggaggacaacactcaggatgaggtggccggagcccctgccgaccaccatgggcccagtgatgaagagcagggcagtcccccagaagacaagctgctgagggccaagcggaactcgtacaccaactgcctgcagaagatcacctgtccccactgtccccgggttttcccttgggccagctccctacagaggcacatgctcacacacactggtcagaaacccttcccttgtcaaaaatgcgatgccttcttttctaccaaatctaactgtgaacgccaccagttgcgcaaacacggagttaccacctgttccctgagaagaaacgggcttatcccccagtcaaaagagagtgatgttggatcccatgatagcacaggggaaaggccatacaaatgtcagacctgcgagcgaaccttcaccttgaagcacagcctggttcgccaccagcggatccaccagaaagccaggcatgccaaacaccacgggaaggacagcgacaaggaagagcggggtgaggaggacagcgagaatgagtccacccacagcggcaacaacgccgtctcagagaacgaggctgagctggctcccaatgccagcaaccacatggctgtcacccggagccggaaggagggcttggccagtgccaccaaggactgcagccacagggaggagaaggtcacggcagggtggccgtctgagcctggccagggtgaccttaacccagagagcccggcggccctggggcaggacctgctggagccgcgcagcaagaggcctgcccacccaatcctggccacagctgatggcgcctcccagctcgtggggatggag

SEQ ID NO: 5009 - DNA, 5061 bp, Homo sapiens
  source 1..5061: mol_type = genomic DNA
atgacgtcaagttcgcccgctggcttggaaggttcagacctatcttccatcaacaccatgatgtcggcggtcatgagtgtagggaaggtcacagagaatggcgggagcccccaggggatcaagtccccctcgaagcctccaggaccaaatcggattggcagaaggaaccaggaaacgaaagaggagaagtcttcctataactgccccctgtgtgagaagatttgcactacccagcaccagctgaccatgcacattcgccagcacaacacagacactggaggagccgaccactcatgcagcatctgcggaaagtcactgagctcggccagctccctcgatcgccacatgctggtgcactctggcgagaggccttacaagtgcactgtgtgtggccagtcatttaccaccaatgggaacatgcacagacatatgaagatccatgagaaggaccctaacagtgccacagccacagcccctccatctcctctgaaacgtaggcgattgtcctccaagaggaaactgagtcacgatgccgagtcagagagagaagacccagcaccagctaaaaagatggtagaagacgggcagtcaggtgacttggagaagaaagctgatgaagtctttcactgcccagtatgtttcaaggagtttgtttgcaagtatggactggagacccacatggagacccattcagataacccactaagatgtgacatttgttgtgtcacctttcgaacacatcgaggactgctgcgtcacaacgcgcttgtccacaaacaacttcccagggatgcaatgggcagacctttcatacagaacaacccttcaattcctgctggcttccacgacttaggattcacggacttctcctgtaggaagtttcctcgcatttctcaggcctggtgcgaaacaaacctgcggaggtgcatcagcgagcaacaccgttttgtctgcgacacctgtgacaaggcgttccccatgctctgctcactggctctgcacaagcagacccatgtggcggcagaccagggtcaagaaaagccgcaggccacgcccctgcctggtgacgccctggaccagaagggcttcctggccttgcttggcctgcagcacaccaaagacgtcaggcctgcccccgccgaggagcccctgccggatgacaaccaggcaattcagctccagacactcaagtgtcagctacctcaggaccccggctgcaccaacctgctgagcctgtcacctttcgaagctgcttccctaggcggttctctcacagttctccccgcgaccaaggacagcataaagcacctgtccctgcagcccttccagaagggcttcatcatccagcctgacagcagcattgtggtcaagcccatctctggcgagtcggccatcgagctggcagacatccagcaaattctgaagatggcagcctcggctccccctcagatcagtcttccgcccttctccaaggcccctgccgccccactgcaggcgatcttcaagcacatgccccctctgaagccaaagcccctggtcacaccacggacggtggtggccacctccacgcccccgcctctcatcaacgcccagcaggcttccccgggctgtatcagccccagcctgccgccaccgcccctgaagctcctcaaaggctcagtggaggcggcctccaacgcccacctgctgcagtccaagtccgggacccagccccacgcggccacgcggctctccctgcagcagccgcgggcggagctgccgggccagcctgagatgaagacgcagctggagcaggacagcatcatcgaggccctgctgccgctgagcatggaggccaagatcaagcaggagatcacagagggggaactcaaggccttcatgacagcgcccggcggcaagaagacgcccgccatgcgcaaggtgctctacccctgccgcttctgcaaccaggtgtttgccttctcgggggtcttgcgtgcccacgtgcgctcccacctgggcatctcgccataccagtgcaacatctgcgactacatcgccgccgacaaggccgcgctcatccgccacctgcgcacgcacagtggggagcggccctacatttgcaagatctgccactaccccttcactgtcaaagccaactgcgagcggcacctgcgcaagaagcacctcaaggccacccgcaaggatatcgagaagaacatcgagtatgtgagtagcagcgcggccgagctggtggacgccttctgcgccccggacaccgtgtgccggctgtgcggcgaggacctcaagcactatcgtgccctgcgcatccacatgcgcacgcactgcggccgcggcctgggcgggggccacaagggccgcaagcccttcgagtgcaaggagtgcagcgccgcgttcgcggccaagcgcaactgcatccaccacatcctcaagcagcacctgcacgtgcccgagcaggacatcgagagctacgtgctggccgccgacggcctgggccccgcagaggcgccggccgctgaggcgtcggggcgcggggaggacagtggctgcgctgcccttggtgactgcaagcccctcactgccttcctggaaccccagaacggctttcttcacaggggccccacccagcctccacctccccatgtctcgatcaagttggagcccgccagtagctttgcggtggacttcaatgagcccctggacttctcgcagaagggcctggccctggtccaagtgaagcaggaaaacatctcctttctgagcccttcttccctggtcccctatgactgctccatggagcccatcgacctgtccatccccaagaacttcaggaaaggggacaaggatttggccactcccagcgaagccaagaagcctgaggaggaggcggggagcagcgagcagccctctccctgcccagcacccggcccttctcttcctgtaactttggggcccagcggaatcctggaaagccccatggcccctgctccggcggccaccccggaacccccagcacagcccctgcagggccctgttcagctggcggtcccaatctactcctcagccctggtcagcagccctccactcgtgggcagctcagccctcctgagtggcacagccttgctgcgtccactgcggcccaagcccccgctgcttttgccaaagccccccgtgacagaagagctgcccccgctggcctccattgcccagatcatctcatctgtatcctcggcccccaccctgctgaaaaccaaggtggcggacccagggcccgcaagcactggcagtaacaccacggcttcagacagcttaggaggttctgtccccaaagccgccaccaccgccacccccgctgccaccaccagcccaaaagagtctagtgagcctcccgctccagccagcagcccagaggctgcctctcccaccgagcagggcccagcgggcacgtcgaagaagaggggccggaaaagggggatgaggagccgaccccgcgccaacagcggcggggtggacctggactccagcggggagtttgccagcatcgagaagatgctggccaccacagacaccaacaagttcagtccgtttctgcagacagcggaggacaacactcaggatgaggtggccggagcccctgccgaccaccatgggcccagtgatgaagagcagggcagtcccccagaagacaagctgctgagggccaagcggaactcgtacaccaactgcctgcagaagatcacctgtccccactgtccccgggttttcccttgggccagctccctacagaggcacatgctcacacacactgacagtcagtcggatgcggagactgcagccgccgcgggcgaagtgctagacctcacctcacgggacagagagcagccgtcggagggcgccactgagctccgccaggtcgcaggggatgcgcctgtggagcaggccacggcggaaacggcctcgccggtgcaccgggaagagcacgggcgtggggagagccatgagccggaggaggagcatggcactgaggagagcactggggacgccgacggcgcggaagaggacgcgtcgagcaaccagagcctggacctggacttcgccaccaagctcatggacttcaagctggcggagggcgacggcgaggcaggcgccgggggcgcggcctcgcaggagcagaagctcgcctgcgacacctgtgggaagagcttcaagttcctgggcaccctgagccgccaccggaaggcgcacggccgccaggagcccaaggacgagaagggagatggcgccagcactgcagaggaggggccccagcccgcccctgaacaggaggagaagccccccgagaccccggcagaggtggtggagtcggccccgggtgccggggaggccccggcggaaaagctcgcggaggagacggagggcccctccgacggggagagcgcggccgagaaaaggtcctcagagaagagcgacgatgacaagaaaccaaagacagactcccccaaaagcgtggccagcaaggcagacaagaggaagaaggtctgcagcgtgtgcaacaagcggttctggtcgctgcaggacctgacccggcacatgcgctcccacacaggggaaaggccatacaaatgtcagacctgcgagcgaaccttcaccttgaagcacagcctggttcgccaccagcggatccaccagaaagccaggcatgccaaacaccacgggaaggacagcgacaaggaagagcggggtgaggaggacagcgagaatgagtccacccacagcggcaacaacgccgtctcagagaacgaggctgagctggctcccaatgccagcaaccacatggctgtcacccggagccggaaggagggcttggccagtgccaccaaggactgcagccacagggaggagaaggtcacggcagggtggccgtctgagcctggccagggtgaccttaacccagagagcccggcggccctggggcaggacctgctggagccgcgcagcaagaggcctgcccacccaatcctggccacagctgatggcgcctcccagctcgtggggatggag

SEQ ID NO: 5010 - DNA, 1422 bp, Homo sapiens
  source 1..1422: mol_type = genomic DNA
atggaactcttaacattcagggatgtggccatagaattctctccagaagagtggaaatgcctggaccctgaccagcagaatttgtatagagatgtgatgttggagaactacaggaacctggtctccctgggtgttgctatctctaacccagacctggtcacctgtctggagcaaagaaaagagccctacaatgtgaagatacataagatcgtagccagacccccagctatgtgttctcatttcacccaagaccattggccagtgcagggcatagaagattcattccacaaacttatactgagaagatatgagaaatgtggacatgataatttacaattaagaaaaggctgtaaaagtttgaatgagtgtaagttgcagaaaggaggttataatgaatttaatgaatgcttgtcaactacccagagcaaaatacttcagtgtaaagcaagtgtcaaagttgttagtaaattttcaaattcaaacaaacgtaagacaagacatactggagagaaacactttaaagaatgtggcaaatcatttcagaagttttcacacctaactcaacataaggtaattcatgctggagagaaaccctacacttgtgaagaatgtggcaaagcctttaaatggtctttaatatttaatgaacataagagaattcatactggagagaaaccttttacttgtgaagaatgtggcagcatctttaccacatcctcacactttgctaagcataaaataattcatactggagaaaaaccctataaatgtgaagaatgtggcaaagcctttaataggttcacaacccttactaaacataagagaattcatgctggagagaaacccatcacatgtgaagaatgtaggaaaatctttacctcatcctcaaactttgccaaacataagcgaattcatactggagagaaaccctacaaatgtgaagaatgtggcaaagcctttaataggtccacaacccttactaaacataagagaattcatactggagagaaaccctacacatgtgaagaatgtggcaaagcttttagacagtcctcaaaactgaatgaacataagaaagttcatactggagagcggccctacaaatgtgatgaatgtggcaaagcctttggacggtccagggtcctgaatgaacataaaaaaattcatactggagagaaaccctacaaatgtgaagaatgtggcaaagcctttagacggtccacagatcggagtcaacataagaaaattcatagtgcagataaaccctacaaatgtaaagaatgtgacaaagcctttaaacaattttcgctcctgagtcaacataagaaaattcatactgtagataaaccctacaaatgtaaagattgtgacaaagcctttaaacggttctcacacctgaataaacataagaaaattcatact

SEQ ID NO: 5011 - DNA, 1062 bp, Homo sapiens
  source 1..1062: mol_type = genomic DNA
atggaaagaattctaagtcaaggccctgtgtattccagttttaaaggaggctggaaatgcaaggatcatactgagatgctgcaagaaaatcagggatgtattaggaaagtaacagtctctcatcaagaagccctggctcaacatatgaatatcagtactgtggagaggccctatggatgccatgaatgtggaaaaacttttggtcgacgcttttccctggtgttacaccagaggactcatactggagagaaaccatatgcatgtaaggaatgtggcaaaacctttagccagatttcaaaccttgtgaaacaccaaatgatacatactggaaagaaaccccatgagtgtaaggactgtaataaaacattcagttacctttcatttcttattgaacaccagagaacgcacactggggagaaaccttatgaatgtactgagtgtggaaaggcctttagccgtgcctccaacctcactcgacatcaaagaattcacataggaaagaaacaatatatatgtaggaaatgtggtaaagcatttagcagtggctcagaactcattcgccaccagattacacatactggagagaaaccttatgaatgcattgaatgtgggaaggcatttcgccgtttctcacaccttactcgacatcagagcatccatacaaccaaaaccccgtatgaatgtaatgaatgtaggaaagctttccgttgtcactcattccttattaaacatcagagaattcatgctggagaaaagctctatgaatgtgatgaatgtggtaaagttttcacttggcatgcatcccttattcaacatacgaagagtcacactggagagaaaccctatgcgtgtgctgaatgtgataaagccttcagccggagcttttccctcattctacatcagagaactcatactggagagaaaccctatgtatgtaaggtatgcaacaaatccttcagctggagctcaaaccttgctaaacatcagaggacacacactcttgacaacccctatgaatatgaaaattcatttaattaccactcattccttactgaacaccag

SEQ ID NO: 5012 - DNA, 1821 bp, Homo sapiens
  source 1..1821: mol_type = genomic DNA
atgttgttagcccaaataaatcgagattctcagggaatgacagagtttcctggaggagggatggaggcgcaacatgttacgctgtgcttgacagaggcagtcaccgtggcagatgcaaaactcatagatggccaggtcattcagttggaagatggttctgcggcctatgttcaacatgtacccatacctaaaagtacaggggacagtttgcgtctagaggatggtcaagcagtacagttagaagatggtaccacagcatttattcaccacacctccaaagatagttatgaccagagtgcattacaggcggttcagctggaagatggtaccacagcttatatccaccatgcagtgcaagtcccgcagtctgacaccatcttggcaattcaggctgatgggacagtggcaggtctgcacactggggatgctacaattgaccctgacaccatcagtgctttggaacagtatgcagcaaaggtgtccattgatggaagtgaaagtgtagcaggtactggaatgattggagaaaatgagcaagagaaaaaaatgcagattgttttacaaggacatgctacaagagtaactgctaaatctcaacagagtggagagaaggcatttcgatgtgaatatgatggatgtggaaaattatatacaacagctcatcatctcaaggtccatgagaggtcacacacaggagatcggccttatcagtgtgagcatgcaggctgtgggaaggcatttgcaacaggttatggattaaaaagtcacgtcagaactcatacaggagaaaagccatatcggtgttcggaagataattgtactaaatctttcaaaacttcaggagatctacagaaacacatcagaactcatacaggagaaaggccctttaagtgtcccttcgaaggctgcggtcggtcctttacaacatcaaatatcagaaaagtgcacgttaggacacacacaggagaaagaccttattactgcacagagccaggatgtgggagggcatttgccagtgcaacaaattataaaaaccatgtgaggatacacacaggagaaaagccatatgtttgtacagttcctgggtgtgacaaaaggtttacagaatattccagtttgtacaaacatcatgttgtccacactcattccaaaccttacaactgtaaccactgtgggaagacatacaagcagatctccacgctggccatgcacaaacggacagcccacaacgacactgagcccatcgaggaggagcaggaagccttctttgagccgcccccaggtcaaggtgaagatgttcttaaagggtcccagattacgtatgttacaggtgtagaaggggacgacgttgtttctacacaagtagccacagtaacccaatctggactgagtcaacaagttacactcatatcccaggatgggactcagcatgtcaacatatctcaagctgacatgcaggccattggcaacaccatcacaatggtaacgcaggatggcacgcccatcacagtccccgcccatgatgcagtcatctcctcagcaggaacgcactctgttgctatggttactgctgagggtacagaaggggaacaggttgcaattgtagctcaagacttggcagcattccatactgcctcatcagaaatggggcaccagcagcatagccatcacttagtaaccacagaaaccagacctctgaccttagtagcaacatccaatggcacccagattgcagttcagcttggagaacagccatctctggaagaagccatcagaatagcgtctagaatccaacaaggagaaacgccagggttggatgat

SEQ ID NO: 5013 - DNA, 1911 bp, Homo sapiens
  source 1..1911: mol_type = genomic DNA
atgttgttagcccaaataaatcgagattctcagggaatgacagagtttcctggaggagggatggaggcgcaacatgttacgctgtgcttgacagaggcagtcaccgtggcagatggtgacaacttagaaaatatggaaggcgtaagcttgcaagcagtaacacttgcagatggttctactgcttacatacaacacaattctaaagatgcaaaactcatagatggccaggtcattcagttggaagatggttctgcggcctatgttcaacatgtacccatacctaaaagtagggacagtttgcgtctagaggatggtcaagcagtacagttagaagatggtaccacagcatttattcaccacacctccaaagatagttatgaccagagtgcattacaggcggttcagctggaagatggtaccacagcttatatccaccatgcagtgcaagtcccgcagtctgacaccatcttggcaattcaggctgatgggacagtggcaggtctgcacactggggatgctacaattgaccctgacaccatcagtgctttggaacagtatgcagcaaaggtgtccattgatggaagtgaaagtgtagcaggtactggaatgattggagaaaatgagcaagagaaaaaaatgcagattgttttacaaggacatgctacaagagtaactgctaaatctcaacagagtggagagaaggcatttcgatgtgaatatgatggatgtggaaaattatatacaacagctcatcatctcaaggtccatgagaggtcacacacaggagatcggccttatcagtgtgagcatgcaggctgtgggaaggcatttgcaacaggttatggattaaaaagtcacgtcagaactcatacaggagaaaagccatatcggtgttcggaagataattgtactaaatctttcaaaacttcaggagatctacagaaacacatcagaactcatacaggagaaaggccctttaagtgtcccttcgaaggctgcggtcggtcctttacaacatcaaatatcagaaaagtgcacgttaggacacacacaggagaaagaccttattactgcacagagccaggatgtgggagggcatttgccagtgcaacaaattataaaaaccatgtgaggatacacacaggagaaaagccatatgtttgtacagttcctgggtgtgacaaaaggtttacagaatattccagtttgtacaaacatcatgttgtccacactcattccaaaccttacaactgtaaccactgtgggaagacatacaagcagatctccacgctggccatgcacaaacggacagcccacaacgacactgagcccatcgaggaggagcaggaagccttctttgagccgcccccaggtcaaggtgaagatgttcttaaagggtcccagattacgtatgttacaggtgtagaaggggacgacgttgtttctacacaagtagccacagtaacccaatctggactgagtcaacaagttacactcatatcccaggatgggactcagcatgtcaacatatctcaagctgacatgcaggccattggcaacaccatcacaatggtaacgcaggatggcacgcccatcacagtccccgcccatgatgcagtcatctcctcagcaggaacgcactctgttgctatggttactgctgagggtacagaaggggaacaggttgcaattgtagctcaagacttggcagcattccatactgcctcatcagaaatggggcaccagcagcatagccatcacttagtaaccacagaaaccagacctctgaccttagtagcaacatccaatggcacccagattgcagttcagcttggagaacagccatctctggaagaagccatcagaatagcgtctagaatccaacaaggagaaacgccagggttggatgat

SEQ ID NO: 5014 - DNA, 1914 bp, Homo sapiens
  source 1..1914: mol_type = genomic DNA
atgttgttagcccaaataaatcgagattctcagggaatgacagagtttcctggaggagggatggaggcgcaacatgttacgctgtgcttgacagaggcagtcaccgtggcagatggtgacaacttagaaaatatggaaggcgtaagcttgcaagcagtaacacttgcagatggttctactgcttacatacaacacaattctaaagatgcaaaactcatagatggccaggtcattcagttggaagatggttctgcggcctatgttcaacatgtacccatacctaaaagtacaggggacagtttgcgtctagaggatggtcaagcagtacagttagaagatggtaccacagcatttattcaccacacctccaaagatagttatgaccagagtgcattacaggcggttcagctggaagatggtaccacagcttatatccaccatgcagtgcaagtcccgcagtctgacaccatcttggcaattcaggctgatgggacagtggcaggtctgcacactggggatgctacaattgaccctgacaccatcagtgctttggaacagtatgcagcaaaggtgtccattgatggaagtgaaagtgtagcaggtactggaatgattggagaaaatgagcaagagaaaaaaatgcagattgttttacaaggacatgctacaagagtaactgctaaatctcaacagagtggagagaaggcatttcgatgtgaatatgatggatgtggaaaattatatacaacagctcatcatctcaaggtccatgagaggtcacacacaggagatcggccttatcagtgtgagcatgcaggctgtgggaaggcatttgcaacaggttatggattaaaaagtcacgtcagaactcatacaggagaaaagccatatcggtgttcggaagataattgtactaaatctttcaaaacttcaggagatctacagaaacacatcagaactcatacaggagaaaggccctttaagtgtcccttcgaaggctgcggtcggtcctttacaacatcaaatatcagaaaagtgcacgttaggacacacacaggagaaagaccttattactgcacagagccaggatgtgggagggcatttgccagtgcaacaaattataaaaaccatgtgaggatacacacaggagaaaagccatatgtttgtacagttcctgggtgtgacaaaaggtttacagaatattccagtttgtacaaacatcatgttgtccacactcattccaaaccttacaactgtaaccactgtgggaagacatacaagcagatctccacgctggccatgcacaaacggacagcccacaacgacactgagcccatcgaggaggagcaggaagccttctttgagccgcccccaggtcaaggtgaagatgttcttaaagggtcccagattacgtatgttacaggtgtagaaggggacgacgttgtttctacacaagtagccacagtaacccaatctggactgagtcaacaagttacactcatatcccaggatgggactcagcatgtcaacatatctcaagctgacatgcaggccattggcaacaccatcacaatggtaacgcaggatggcacgcccatcacagtccccgcccatgatgcagtcatctcctcagcaggaacgcactctgttgctatggttactgctgagggtacagaaggggaacaggttgcaattgtagctcaagacttggcagcattccatactgcctcatcagaaatggggcaccagcagcatagccatcacttagtaaccacagaaaccagacctctgaccttagtagcaacatccaatggcacccagattgcagttcagcttggagaacagccatctctggaagaagccatcagaatagcgtctagaatccaacaaggagaaacgccagggttggatgat

SEQ ID NO: 5015 - DNA, 5061 bp, Homo sapiens
  source 1..5061: mol_type = genomic DNA
atgacagacccccttttggactcacagccagccagtagcaccggggagatggatggactgtgccctgagctattgctgatccccccgcctctctctaaccgtggaatcctggggcctgtccagagcccctgtccttcccgggaccctgcacctatacctactgagccaggctgcctgctggtagaggccacagcaactgaagagggaccagggaacatggagatcattgtggagacagtagctggaaccctgaccccaggtgctcctggagagaccccagctcccaaactgcctccaggagagagagaaccttcacaggaagcaggtacacccttgcctgggcaggagacagctgaagaggagaatgtagagaaagaagagaagagtgacacccagaaggactcccaaaaggctgtggataaaggccaaggggctcagcggctggaaggggatgtggtctctggcaccgagtccctcttcaagacccatatgtgtccagagtgtaagcgctgctttaagaagcggactcatctggtggagcacctgcatctccacttcccagaccccagcctccagtgccctaactgccagaagttcttcaccagtaagagcaagctcaagacccatctgctgcgggagctgggtgaaaaggcccaccactgcccactgtgccactacagtgcggtggagaggaatgcactcaaccgccacatggccagcatgcatgaagatatttccaacttctactcagacacctatgcctgtcctgtctgccgtgaggaattccgcctcagccaggccctaaaggagcacctcaagagccacacggcagcagccgcagcagagccattaccccttcgctgctttcaggagggctgcagctatgcagcacccgaccgcaaggccttcattaagcacctgaaggagacccatggggtgcgggctgtggagtgccgccatcactcatgtcccatgctctttgccacagccgaagccatggaggcccaccacaagagtcactacgccttccactgcccccactgtgattttgcttgttccaataagcacctattccgtaaacacaagaagcagggccaccctggcagtgaagagctgcgctgcaccttctgcccctttgccaccttcaacccagtggcttaccaggatcatgtaggcaagatgcatgctcatgaaaagatccaccagtgtcctgagtgcaactttgccactgcccacaagagggtgctcatccgacacatgcttctacatacgggtgagaagccccacaagtgtgagctgtgtgacttcacatgccgagacgtgagctacctatccaagcacatgctgacccactccaacaccaaggattacatgtgcactgaatgtggctatgtcaccaagtggaagcactacctccgtgtgcacatgcgaaaacatgcaggggacctcaggtatcagtgcaaccagtgctcctatcgctgtcaccgggctgatcagctgagcagccacaagctgcggcatcagggcaagtctctgatgtgtgaggtgtgtgccttcgcctgcaagcggaagtatgagctgcagaagcacatggcttcccagcaccaccctggcacaccggccccactctacccttgccactactgcagttaccagagccgccacaagcaggctgtgctgagccatgagaactgcaagcatacccgcctccgtgagttccactgtgccctctgtgactaccgcaccttcagcaacaccacactcttgttccataaacgcaaggcccatggctatgtacctggagaccaggcctggcagctccgctatgcaagccaggagccagaaggggccatgcagggcccaacacccccaccagattcagagccctcaaaccagctgtcagcccgacctgaggggccaggtcacgaacctgggactgtggtggaccccagcttggaccaggccctgccagagatgagtgaggaggtcaacactggaagacaggagggcagtgaggctccccatgggggtgacctgggtggcagtcccagcccagcagaggtggaggagggcagctgcacactacacctagaggccctgggagtagagctggagtctgtgactgagccaccccttgaggaggtcactgaaacagcccctatggagttcaggcccctgggactggaagggccagatggactggaaggaccagagctatctagctttgaaggtattgggacttctgacttgagtgctgaagaaaatccccttctggaaaagccagtgtctgagccctccacaaatcctccatccttagaggaggctcctaacaactgggtaggaaccttcaagacaactccacctgctgagacagcacccttgcccccattacctgagtcagagtcattactcaaggccctaaggagacaggacaaagaacaagcagaggcattggtgctagaggggcgggtgcagatggtagtgatccagggagaggggcgagccttccgctgcccacactgcccttttatcactcgccgggagaaggccctgaatctgcactccaggactgggtgccaaggccgccgagagcccctgctgtgccccgagtgtggggctagcttcaagcaacaacgcggcctcagcacccacctgctgaagaagtgccctgttctactcagaaagaacaagggcttgcccagaccagattcacccatccctctgcaacctgtgctcccaggtacccaggcctcagaggacacagaaagtgggaagcccccacctgcatcacaagaagcagagctactgcttccaaaagatgctcctttggagcttcccagggagccagaagaaacagaagagcctcttgccacagtctctggttccccagtccctcctgcaggaaactccttgcccacagaggcccctaagaagcactgctttgacccagtccctcctgcaggaaactcctcacccacggaggcccctaagaagcaccaccttgacccagtccctcctgcaggaaactcctcacccacagaggccctgaagaagcaccgctttgagcagggcaagtttcactgcaactcctgcccattcctttgttcccggctctcctctattacctctcacgtggctgaaggctgcagggggggacgtggcgggggaggaaaacgagggaccccccagacccagcctgatgtgtccccgttgagcaatggggactctgctcccccgaagaatgggagtacagagtccagctctggtgatggggatacagttctggttcaaaagcagaagggggctcgcttctcctgccctacatgtccctttagctgccagcaggaacgggctctgaggactcaccagatccggggctgccccctcgaggagtctggagagctgcactgcagcctctgcccattcactgctcctgctgccactgccttaaggctccaccagaagcggaggcaccccactgcagccccagcccgtgggccccggccccatctacagtgtggggactgtggcttcacctgtaaacagagccgttgcatgcagcagcaccggcggctcaagcacgagggggtgaagccccatcagtgccccttctgtgacttttcgaccaccagacggtaccggttagaggctcaccagtcccgacacacaggcattggccgcatcccctgcagctcttgcccccagacgtttggtaccaactcgaaactgcgcttgcaccggttaagggtacatgacaaaacacctacccacttctgtccactttgtgactatagtggctaccttcgccatgacatcactcgtcatgtcaacagctgccaccaaggcaccccagcctttgcctgctcccagtgtgaagcccagttcagctcagagacagcacttaagcagcatgctctgcgccgacaccccgagcctgcacagcctgcccctggctctcctgcagagaccactgagggccccctgcactgttcccgctgtgggttgctgtgccccagccctgccagcttacgaggacacacccgtaaacagcacccacggcttgagtgtggggcctgccaggaggccttccctagccgactggctctggatgagcaccggaggcagcagcatttcagccaccgctgtcagctctgtgactttgctgcccgggagcgggtgggcctggtaaagcactacctggaacagcatgaggagacttcagcagccgtggcagcctcagatggggatggggatgctggccagcccccgctacactgccccttttgtgacttcacatgccgccatcagctggtactagatcaccatgtgaaagggcatgggggcactcgtctctacaagtgcaccgattgtgcttacagcaccaagaaccgacagaagatcacctggcacagccgcatccacactggggaaaagccttaccactgtcacctctgcccctatgcctgtgctgatccctctcgtctcaagtaccacatgcggatccacaaggaggaacggaagtacctgtgccctgagtgtggctacaagtgcaagtgggtcaaccagctgaaataccacatgaccaagcatacaggactgaagccataccagtgtcccgagtgtgagtactgcaccaaccgggctgatgcactgcgtgtgcaccaggagacccggcatcgagaagcacgggctttcatgtgtgagcagtgtggcaaggccttcaagacgcgcttcctgctgcgcacccaccttcgcaagcacagtgaggccaaaccctatgtgtgcaatgtgtgccaccgtgctttccgctgggctgctggcctgcgccatcatgccctcacccacaccgaccgccaccccttcttttgccgcctctgcaactacaaggccaagcaaaagttccaggtggtcaagcacgtacgcaggcaccaccctgaccaagccgacccaaaccagggtgtgggcaaagaccccaccacccccacagtgcacctgcatgatgtgcagctggaggatcccagccctcctgctcctgccgctccccacactggacctgagggc

SEQ ID NO: 5016 - DNA, 876 bp, Homo sapiens
  source 1..876: mol_type = genomic DNA
atgtcacacctcagccagcagagaatttacagtggggaaaacccctttgcctgtaaggtatgtggaaaagtcttcagccacaaatcaaacctcactgagcatgagcattttcacacgagagagaaaccttttgaatgtaacgagtgtggaaaagcctttagccaaaagcagtatgtcattaaacatcagaacacccatactggcgagaagcttttcgaatgtaatgaatgtggaaaatcatttagccagaaggaaaacctccttacgcaccagaaaattcacactggagaaaaaccttttgagtgtaaagattgcgggaaagctttcattcagaagtcaaacctcatcagacaccagagaactcacacaggagagaagccctttgtatgtaaggagtgtggaaaaaccttcagtggcaaatccaaccttactgagcatgagaaaatccatattggagagaagccttttaaatgtagtgaatgtggaacagcctttggccagaagaagtacctcataaaacatcagaacattcacactggagagaaaccctatgaatgtaacgaatgtggaaaagccttctctcagcgaacatcacttattgtacatgtgaggattcattcaggtgataaaccttacgaatgcaatgtttgtggaaaagccttctctcagagctcatctctcactgtgcatgtgagaagccatacaggggagaagccctatggttgtaatgaatgtgggaaagctttctctcagttctcaacccttgctctgcatttgagaatacacacaggtaagaagccttatcagtgcagtgaatgtgggaaagctttcagccagaagtcacaccacattagacaccagaaaattcatactcac

SEQ ID NO: 5017 - DNA, 2382 bp, Homo sapiens
  source 1..2382: mol_type = genomic DNA
atgaacattgacgacaaactggaaggattgtttcttaaatgtggcggcatagacgaaatgcagtcttccaggacaatggttgtaatgggtggagtgtctggccagtctactgtgtctggagagctacaggattcagtacttcaagatcgaagtatgcctcaccaggagatccttgctgcagatgaagtgttacaagaaagtgaaatgagacaacaggatatgatatcacatgatgaactcatggtccatgaggagacagtgaaaaatgatgaagagcagatggaaacacatgaaagacttcctcaaggactacagtatgcacttaatgtccctataagcgtaaagcaggaaattacttttactgatgtatctgagcaactgatgagagacaaaaaacaaatcagagagccagtagacttacagaaaaagaagaagcggaaacaacgttctcccgcaaaaatccttacaataaatgaggatggatcacttggtttgaaaacccctaaatctcacgtttgtgagcactgcaatgctgcctttagaacgaactatcacttacagagacatgtcttcattcatacaggtgaaaaaccatttcaatgtagtcaatgtgacatgcgtttcatacagaagtacctgcttcagagacatgagaagattcatactggtgaaaaaccatttcgctgtgatgaatgtggtatgagattcatacaaaaatatcatatggaaaggcataagagaactcatagtggagaaaaaccttaccagtgtgaatactgtttacagtatttttccagaacagatcgtgtattgaaacataaacgtatgtgccatgaaaatcatgacaaaaaactaaatagatgtgccatcaaaggtggccttctgacatctgaggaagattctggcttttctacatcaccaaaagacaactcactgccaaaaaagaaaaggcagaaaacggagaaaaaatcatctggaatggacaaagagagtgctttggacaaatctgacctgaaaaaagacaaaaatgattacttgcctctttattcttcaagtactaaagtaaaagatgagtatatggttgcagaatatgctgttgaaatgccacattcgtcagttgggggctcgcatttagaagatgcgtcaggagaaatacacccacctaagttagttctcaaaaaaattaatagtaagagaagtctgaaacagccactggagcaaaatcaaacaatttcacctttatccacatatgaagagagcaaagtttcaaagtatgcttttgaacttgtggataaacaggctttactggactcagaaggcaatgctgacattgatcaggttgataatttgcaggaggggcccagtaaacctgtgcatagtagtactaattatgatgatgccatgcagtttttgaagaagaagcggtatcttcaagcagcaagtaacaacagcagggaatatgcgctgaatgtgggtaccatagcttctcagccttctgtaacacaagcagctgtggcaagtgtcattgatgaaagtaccacggcatccatattagagtcacaggcactgaatgtggagattaagagtaatcatgacaaaaatgttattccagatgaggtactgcagactctgttggatcattattcccacaaagctaatggacagcatgagatatccttcagtgttgcagatactgaagtgacttctagcatatcaataaattcttcagaagtaccagaggtcaccccgtcagagaatgttggatcaagctcccaagcatcctcatcagataaagccaacatgttgcaggaatactccaagtttctgcagcaggctttggacagaactagccaaaatgatgcctatttgaatagcccgagccttaactttgtgactgataaccagaccctcccaaatcagccagcattctcttccatagacaagcaggtctatgccaccatgcccatcaatagctttcgatcaggaatgaattctccactaagaacaactccagataagtcccactttggactaatagttggtgattcacagcactcatttcccttttcaggtgatgagacaaaccatgcttctgccacatcaacacaggactttctggatcaagtgacttctcagaagaaagctgaggcccagcctgtccaccaagcttaccaaatgagctcctttgaacagcccttccgtgctccctatcatggatcaagagctggaatagctactcaatttagcactgccaatggacaggtgaaccttcggggaccagggacaagtgctgaattttcagaatttcccttggtgaatgtaaatgataatagagctgggatgacatcttcacctgatgccacaactggccagacttttggc

SEQ ID NO: 5018 - DNA, 1638 bp, Homo sapiens
  source 1..1638: mol_type = genomic DNA
atggccgaagcggcgcctgcccgggaccccgagacagacaagcacacagaggaccagagtccttcgacacccttgccccagccagctgctgagaagaactcgtacctctactccacggaaatcacactgtggacggtggtggccgccattcaggccttggagaagaaggtggattcctgcctgacccgcttgctgactctggaggggcgcacggggacagccgagaagaagctggccgactgcgagaagacagctgtggagttcgggaaccagctggagggcaagtgggccgtgctggggaccttgctgcaggagtacgggctgctgcagaggcggctggagaatgtggagaacttgctgcgcaacaggaacttctggatcttgcggctgcccccgggcagcaagggggaggcccccaaggtgcccgtgaccttcgatgatgtggccgtgtatttctctgagctggagtggggcaagctggaggactggcagaaggagctctacaagcacgtgatgaggggcaactacgagacgctggtctccctggattatgcaatctccaaaccagacatcctcacccggatagagaggggagaggagccttgtcttgaccggtggggccaggagaaggggaatgaagtagaggtgggacgtccaaggatgatgggcactggcctccctccgtatccagagcacctcaccagcccacttagccctgcccaggaggagctgaaagaagggcaggcccccaagcagcagcaggactcagaggcgagagtggccccagccgggccagaagcaggtggtggtgtggccatcaagacagaggcacagtctgaagacgagatgacgcctgagcggctctttctgggggtgtcccgaggccagaccgagtgtagaatcccccgagggcccaggaacaggcctgggggccccagccgtcatcaggcccagggcatgcccagggtgcgggcaggggagccacggccaccgggggccagtggggagacgccccgagtcctctcccgcaggcggcagcgggcattcccctgccccgactgcgggcagagcttccgcctgaagatcaatctgacgattcatcagcggacccatgtggaggaggggcggcaggaggcccccggccgctcgcccaccagctgcggggacagccaggccatgctggagccgggggaggtggtggtacccggccctgtcatccgctggctccccgaggagcctgagggtcgccgctccgtggcagggggccgtgccttggtggggcggcggcctgcagccagcaagatgtaccactgcagcgagtgcctgcgcttcttccagcagcgcaagagcctgctgctgcaccagcgcctgcacaccggcaatggccagggctggcccgcctgcccctactgcggcaaggccttccgccggccctcggacctcttccggcaccagcgcatccacaccggtgagcggccctaccagtgcccccagtgtggccggaccttcaaccgcaaccaccacctggccgtgcacatgcagacccacgcccgaggccaggtgggcccacacttccctgccgcccccgcccgccacgggagcctgcccctgccctggcccagccggaaggaggagggc

SEQ ID NO: 5019 - DNA, 2097 bp, Homo sapiens
  source 1..2097: mol_type = genomic DNA
atgaacacatttcaggcatcagtgtcattccaggacgtgactgtggaattcagccaggaggagtggcagcacatgggccctgttgagaggaccctgtacagagatgtgatgctggagaactacagccacctcgtctcagtgggctactgctttacaaaaccagaactgatcttcacattggaacaaggagaagatccatggttattagagaaagagaaaggatttctaagcaggaactccccagaagactcccaacctgatgaaatctcagagaagagcccagaaaatcaaggcaaacatttgttgcaagttttattcaccaataaattattgactacagagcaagaaatttcaggaaaaccacataatcgagacataaacatttttcgtgcaagaatgatgccttgtaaatgtgacattgcggggtctgcttgccaggggctcagcctgatggccccacactgtcagtattcaaaagaaaaggctcatgagcgtaatgtttgtgacaaatggctcatcagtattaaggatggcagaactaacactcaagagaaatctttcgcttatagtaaaattgtgaaaaccctccatcataaggaggaagttattcaacatcagacaattcagactctggggcaagattttgaatataatgaaagtagaaaagcttttcttgaaaaggctgcccttgttacatctaacagtacccacccaaaaggaaaatcttacaatttcaataaatttggggaaaacaaatatgataaatcaacctttattattcctcagaacatgaatccagagaagagtcactatgagtttaatgatactggaaattgtttctgtagaatcactcacaaaactctcacaggagggaaatccttcagccaaaagtcacacattagagaacatcatagagttcatataggggtgaaaccctttgaatatggaaaaagtttcaaccgtaattcaaccctcccagtgcatcagagaactcatgcaacagataaatactctgattatcacccatgtacagagacattcagctaccagtcaactttcagtgtacatcagaaggttcacataagggcaaaaccctatgagtataatgaatgtgggaaatcctgctctatgaattcacacttgatttggcctcagaaaagtcacacaggggagaaaccctatgaatgtcctgagtgcgggaaagccttcagtgagaagtcacgcctaagaaaacatcagagaactcacacgggagagaaaccatacaaatgtgatggatgtgataaagctttcagtgcaaagtcaggcctaagaatacaccagagaacccacacaggggagaaaccattcgaatgtcatgaatgtgggaaatcttttaactataagtcaatcctcatagtgcatcagagaactcacacaggggagaaaccttttgaatgtaatgaatgcgggaaatctttcagccatatgtcaggcctaaggaatcaccgaagaactcacacaggggaaagaccatataaatgtgatgaatgtgggaaagctttcaaactgaagtcaggcctgaggaaacatcatagaacacacacaggggagaagccctacaaatgtaatcagtgtggaaaagctttcggtcagaaatcacaactcagaggacatcatagaattcacacaggggaaaaaccctataaatgtaatcattgtggggaagctttcagtcagaaatcaaacctcagagtacatcacagaactcatactggggagaaaccctatcaatgtgaggagtgtggaaaaacattcaggcagaaatcaaatctcagagggcatcagagaactcacactggggagaagccctatgaatgtaatgaatgtggaaaagctttcagtgagaagtcagtcctaagaaaacatcagcgaactcacaccggggagaaaccatataattgtaatcagtgtggggaagctttcagtcagaaatccaatctcagagtacatcagagaactcacacaggggagaaaccctataaatgtgataaatgtgggagaactttcagtcaaaaatcaagccttagagaacatcagaaagcccacccaggggat

SEQ ID NO: 5020 - DNA, 1146 bp, Homo sapiens
  source 1..1146: mol_type = genomic DNA
atggagctgcgggaagaagcctggtctccggggccgctggattctgaggaccagcagatggccagtcacgagaacccagtggacatcctcatcatggatgatgacgacgtccccagctggcctcccaccaagctgtccccgccccagtctgcgcccccagccggcccgcctccccggccgcggccgcccgccccctacatctgcaacgagtgtggcaagagctttagccactggtccaagctgacgcggcaccagcgcacgcacaccggcgagcggcccaacgcctgcgccgactgcggcaagaccttctcgcagagctcgcacctggtgcagcaccggcgcatccacacgggcgagaagccctacgcctgcttggagtgcggcaagcgcttcagctggagctccaacctcatgcagcaccagcgcatccacacgggcgagaagccctacacctgccccgactgcggccgcagcttcactcagagcaagagcctggccaagcaccggcgctcgcacagcggcctcaagcccttcgtgtgcccgcgctgcggccgcggcttcagccagcccaagagcctcgcgcgtcacctgcggctgcacccggagctgtcggggcctggcgtggcggccaaggtgctggcggctagcgtccggcgggccaaggggcccgaagaggcggtggcggcggacggcgagatcgccatccccgtgggcgatggcgagggcatcatcgtggtgggcgcgccgggcgagggggccgcggccgcggcagccatggcgggcgcgggggcaaaggccgcggggccccggtcgcggcgcgccccggcccccaagccgtacgtgtgtctggagtgcgggaagggcttcgggcacggggccgggctcctggcgcaccagcgggcccagcacggggacgggctcggggcggcggggggcgaggagccggcccacatctgcgtggagtgcggggagggcttcgtgcagggcgccgcgctccggagacacaagaagatccacgcggtgggcgcgccctcggtctgcagcagctgcggacagagctactaccgcgcgggcggggaggaggaggacgacgacgacgaggccgcgggcgggcggtgccccgagtgccgcggtggggagggccgg

SEQ ID NO: 5021 - DNA, 186 bp, Homo sapiens
  source 1..186: mol_type = genomic DNA
atgttcccaccagccagggggaaggagctgctctcgtttgaggatgtggcgatgtacttcaccagagaggagtggggccacctcaactggggtcagaaggacctctaccgagatgtgatgttggagaactacaggaacatggtcttgctggtttatttccagtttgatgctgcaataccactgtgc

SEQ ID NO: 5022 - DNA, 1275 bp, Homo sapiens
  source 1..1275: mol_type = genomic DNA
atgttcccaccagccagggggaaggagctgctctcgtttgaggatgtggcgatgtacttcaccagagaggagtggggccacctcaactggggtcagaaggacctctaccgagatgtgatgttggagaactacaggaacatggtcttgctgggatttcagtttcccaaacctgagatgatctgtcagctggagaactgggacgagcagtggatcctggatctaccgagaactgggaataggaaggcttccggtagtgcttgcccaggttctgaagccagacacaagatgaaaaagctaactccaaaacagaaattttctgaagatttagagtcatataagatatcagtggtaatgcaggaatcagctgagaaactttcagaaaagttacataagtgtaaagaatttgtggacagttgcaggcttactttccctactagtggtgatgaatacagcaggggcttccttcaaaaccttaaccttattcaagatcagaatgcgcaaacaaggtggaagcagggcagatatgatgaggatggcaaacccttcaatcaaagatctttgcttttggggcatgagcgaattctcacaagagcaaagtcttatgaatgcagtgaatgtggaaaagtcattaggcgtaaggcatggtttgatcaacatcaaagaattcactttttagagaatccttttgagtgtaaggtctgtgggcaagccttcagacagcggtcagctcttacggtccataaacagtgtcacctgcaaaacaagccatacagatgtcatgactgtggaaagtgttttcggcagctcgcgtatcttgttgaacataagaggattcacaccaaagaaaaaccttataaatgtagcaaatgtgaaaaaacgtttagtcagaattcaacccttattcgacatcaggtgatccatagtggagaaaaacgccataaatgccttgagtgtggaaaagcctttggccggcattcaacccttctatgtcatcaacagattcacagtaaaccgaacacccataaatgcagtgaatgtggacagtcctttggtaggaatgtggatctcattcagcatcaaagaatccatacaaaggaggaattctttcaatgtggagaatgtgggaaaacgtttagttttaagaggaatctttttcgacatcaggtcattcacactggaagccaaccctaccaatgtgtcatatgtggaaaatctttcaagtggcacacaagctttattaagcaccagggcactcacaaaggacagatatccaca

SEQ ID NO: 5023 - DNA, 186 bp, Homo sapiens
  source 1..186: mol_type = genomic DNA
atggactcagtggcctttgaggatgtggctgtgaacttcaccccagacgagtgggctttgctggatccttcccaaaagaatctctaccgagaagtgatgcaagaaaccttgaggaacttggcctctatagaggtcttatggaagagagactctttgaaagtgaaggtcatcagcatggagaaattt

SEQ ID NO: 5024 - DNA, 246 bp, Homo sapiens
  source 1..246: mol_type = genomic DNA
atgagaaatatgattccacaggacaatgaaaacccaccccaacagggtgaagcaaatcaaaatgactcagtggcctttgaggatgtggctgtgaacttcaccccagacgagtgggctttgctggatccttcccaaaagaatctctaccgagaagtgatgcaagaaaccttgaggaacttggcctctatagaggtcttatggaagagagactctttgaaagtgaaggtcatcagcatggagaaattt

SEQ ID NO: 5025 - DNA, 3279 bp, Homo sapiens
  source 1..3279: mol_type = genomic DNA
atgagttggttcaacgcctcccagctctccagcttcgctaagcaggccctgtcccaggcccagaagtctattgacagggttctggacatccaggaagaggagccgagcatctgggccgagaccattccgtatggagagccgggaataagttcccctgtcagtggaggatgggatacttcaacctgggggttgaaatcaaacactgaacctcagagtccaccaatagcctctcctaaagcaatcacaaagccagttcggaggactgtggtcgatgaatctgaaaatttcttcagtgcctttctctcgccaactgatgtccagaccattcagaagagtccagtggtatcaaaacctccagcaaaatcacaacgaccagaagaagaagtgaaaagcagcttacatgaatccttgcacattggccagtcaagaactcctgaaacaactgaatcacaagtaaaagactcttctttgtgtgtttcaggggaaactctggcagcaggtacttcatcacctaaaactgaaggcaagcacgaagaaactgttaataaagaatcggatatgaaggtgccaactgtaagtttgaaagtatctgaaagtgtaattgatgtgaaaacaactatggaaagtatatctaatacgtctacgcagtctctcacagcagaaacaaaggacatagctttggaacctaaggaacaaaaacatgaagacaggcagagcaatacaccttctcctcctgttagtaccttttcatcaggtacttctaccaccagtgatattgaagttttagatcatgaaagtgtaataagtgagagctcagcgagctcgagacaagagactacagattcaaaatcaagtcttcacttgatgcagacatcttttcagcttctctctgcatctgcttgtcctgaatataatcgtttagatgatttccaaaaactcactgagagttgctgttcatctgatgcttttgaaagaatagactcatttagtgtacagtcattagatagccggagtgtaagtgaaatcaattcagatgatgaattgtcaggcaagggatatgctttagtgcctattatagttaattcttcaactccaaagtctaaaacagttgaatctgctgaaggaaaatctgaagaagtaaatgaaacattagttatacccactgaggaagcagaaatggaagaaagtggacgaagtgcaactcctgttaactgtgaacagcctgatatcttggtttcttccacaccaataaatgaaggacagactgtgttagacaaggtggctgagcagtgtgaacctgctgaaagtcagccagaagcactttctgagaaggaagatgtttgcaagacagttgaatttctgaatgaaaagctggaaaaaagggaggctcagttattatctcttagtaaggaaaaagcacttctagaagaagcttttgataacctgaaagatgaaatgttcagagtgaaagaagaaagcagtagcatttcttccttgaaagatgagtttactcaaagaattgcagaagcagaaaagaaagttcaactagcctgcaaagagagagatgctgctaaaaaggaaatcaaaaacataaaagaagaacttgccactagattaaatagtagtgaaactgcagaccttttgaaagagaaagatgagcagatccgagggttaatggaagaaggagaaaaactttcaaaacagcagctgcacaattctaacatcatcaagaaattaagagctaaagacaaggagaatgaaaatatggttgcaaagctgaacaaaaaagttaaagagctagaagaggagttgcagcatttgaaacaggtccttgatggcaaagaagaggttgagaaacaacatagagaaaatattaaaaaactaaattccatggtagaacgccaagagaaagatcttggccgtcttcaggtagacatggatgaacttgaagaaaagaaccgaagtattcaggctgccctggatagtgcatacaaagaacttactgatcttcacaaagccaatgctgcaaaggatagtgaggcacaggaagctgctctgagccgtgaaatgaaagctaaagaagaactttctgcagcattagagaaggcccaagaagaagcccgtcagcagcaagaaacattagccattcaagtgggggaccttaggcttgcattgcagcgtacagaacaagcggctgccagaaaggaggattatttacgccatgagatcggtgaacttcagcagagactccaggaagcagagaatcgaaaccaggaactgagtcaaagtgtttcatcaacaacaagaccattgcttcgacaaatagaaaatttgcaagcaaccctgggatcccagacatcgtcgtgggagaaattagagaagaatctttctgataggcttggtgaatcccagaccttgctggcagcagcagttgagagagaacgtgcagctacagaagaactccttgctaacaaaattcagatgtcttccatggagtcacagaattctcttttaagacaggaaaacagtagatttcaagcccagctagaatcagagaaaaataggctgtgtaaactggaggatgagaacaataggtaccaggttgaattggaaaacctaaaagatgaatatgtaagaacacttgaagagacgaggaaagaaaagacattgttgaatagtcagttagaaatggaaagaatgaaagttgaacaagaaaggaagaaagccatttttactcaagaaacaataaaagaaaaggaacgcaagccattttctgtttctagcactcccaccatgtcacgctcaagttcaataagtggtgttgatatggcaggactacagacatcttttctgtctcaggatgagtctcatgatcactcatttggaccaatgcctatatcagcaaatggaagcaatctttatgatgctgtaaggatgggagcaggatcaagcataattgaaaacctacagtctcagctaaagctaagggaaggggaaatcactcatttacagctagaaattggcaatctagaaaaaactcgatcaataatggctgaagaactagttaaattaacaaatcaaaatgatgaacttgaagagaaggtgaaggagatacccaaacttagaactcagctaagagatttggatcaaaggtacaacactattctgcagatgtatggagaaaaagcagaagaggcagaagaacttcgattagatctcgaagatgtaaaaaatatgtacaaaactcaaatagatgaacttttaagacaaagtctcagt

SEQ ID NO: 5026 - DNA, 1260 bp, Homo sapiens
  source 1..1260: mol_type = genomic DNA
atgagtagaagttcaccaagtgggaaaggacactctaggatggccgagcctcgatttaacaacccctacttctggccccctcctcccaccatgcccagccagctggacaacctggttctgattaacaagatcaaggagcagctgatggccgagaagatcaggccgcctcacctgccgcccacgtcggcctcgtcgcagcagccgttgctagtgccgccggcacccgccgagagcagccaggccgtcatgtcgctgcccaagctgcagcaggtgccggggctgcatccacaggcggtgccgcagcccgacgtggcgctgcacgcacggccggccaccagcaccgtcacaggtctggggctgtccacccggaccccgtctgtgagcacttctgagtcaagcgcgggcgcgggcacgggcacgggtaccagcaccccgtccacacccaccaccaccagccagagccgcctcatcgcctcgtcccccaccctcatctcagggatcaccagcccccctctcctggactccatcaagacaatccagggccacggcctgcttggcccccccaagtccgaacgcggccgcaaaaagatcaaggcggagaacccggggggtccgcctgtccttgtagtcccctatcccatcctggcctcgggcgagactgccaaggagggcaagacgtacaggtgtaaggtatgcccactgacctttttcaccaagtcagagatgcagatccactccaagtcgcacacagaggccaagccccacaagtgcccgcactgctccaagtcctttgccaacgcctcctacctggcccagcacctgcgcatccacctgggcgtcaagccctaccactgctcctactgtgataagtccttccggcagctctcccacctccagcagcacaccagaatccacacaggcgacagaccctacaagtgcccacatcctggctgcgagaaggctttcactcagctctccaacctccagtctcaccagcgccagcacaacaaggacaagccctacaagtgtcccaactgctaccgggcctattcggactccgcttctttgcagatccacctctcggcccacgccatcaagcacgccaaggcctactgctgcagcatgtgtgggcgggcctacacctcggagacctacctgatgaagcacatgtccaaacacacggtggtggagcacctggtgagccatcactcgccccagaggacggagtcccccggcatcccggtgcgaatctctctcatc

SEQ ID NO: 5027 - DNA, 1050 bp, Homo sapiens
  source 1..1050: mol_type = genomic DNA
atgatccggggcttcgaggcgcccatggcggagaacccgccgccgccgccgccgcccgtcatcttctgccacgactccccgaagcgggtgctggtgtcggtcatcaggacgaccccgatcaagccaacgtgcggcggtggaggggagccggagccgccgccgccgctcatccccaccagccccggcttcagcgacttcatggtgtacccgtggcgctggggcgagaacgcacacaacgtgacgctcagccctggggccgcgggggccgccgcctcggccgccctgcctgcagccgcagccgccgagcactcggggcttcgtggccggggcgcgcccccgcccgccgcctcggcctccgccgccgcctcgggaggtgaggacgaggaggaagcgagcagcccagacagcggccacctcaaggatggaatccgacgtggtaggcccagagcagatactgtccgcgatttaataaatgaaggagagcattcatccagcagaatccgttgtaacatctgtaatagggtgtttccacgggagaaatcgctccaggctcacaaaaggactcatacaggtgagaggccctatctgtgtgactatccagactgtggaaaagcctttgttcaaagtggacagctcaaaacacatcagcgtcttcacaccggagagaaaccttttgtttgttcagaaaatggctgcctgagcagattcacccatgcaaaccgccactgtccgaagcacccctacgccaggctgaagagagaggagcccacggacacactcagcaaacatcaggctgccgacaacaaggccgcggccgagtggctggcgaggtattgggaaatgagagagcagcgcacccccactttgaaaggcaagctggttcagaaggctgatcaggagcagcaggaccctctggaataccttcagtctgatgaagaggacgacgagaagagaggggcccagcgccggctgcaggagcagcgggagcgcctgcatggagccctcgcgctcatagagcttgccaacctgactggggcgccactccgacag

SEQ ID NO: 5028 - DNA, 2310 bp, Homo sapiens
  source 1..2310: mol_type = genomic DNA
atgaaacaattgcctgcggcaacagttcgactcctttcaagttctcagatcatcacttcggtggtcagtgttgtaaaagagcttattgaaaactccttggatgctggtgccacaagcgtagatgttaaactggagaactatggatttgataaaattgaggtgcgagataacggggagggtatcaaggctgttgatgcacctgtaatggcaatgaagtactacacctcaaaaataaatagtcatgaagatcttgaaaatttgacaacttacggttttcgtggagaagccttggggtcaatttgttgtatagctgaggttttaattacaacaagaacggctgctgataattttagcacccagtatgttttagatggcagtggccacatactttctcagaaaccttcacatcttggtcaaggtacaactgtaactgctttaagattatttaagaatctacctgtaagaaagcagttttactcaactgcaaaaaaatgtaaagatgaaataaaaaagatccaagatctcctcatgagctttggtatccttaaacctgacttaaggattgtctttgtacataacaaggcagttatttggcagaaaagcagagtatcagatcacaagatggctctcatgtcagttctggggactgctgttatgaacaatatggaatcctttcagtaccactctgaagaatctcagatttatctcagtggatttcttccaaagtgtgatgcagaccactctttcactagtctttcaacaccagaaagaagtttcatcttcataaacagtcgaccagtacatcaaaaagatatcttaaagttaatccgacatcattacaatctgaaatgcctaaaggaatctactcgtttgtatcctgttttctttctgaaaatcgatgttcctacagctgatgttgatgtaaatttaacaccagataaaagccaagtattattacaaaataaggaatctgttttaattgctcttgaaaatctgatgacgacttgttatggaccattacctagtacaaattcttatgaaaataataaaacagatgtttccgcagctgacatcgttcttagtaaaacagcagaaacagatgtgctttttaataaagtggaatcatctggaaagaattattcaaatgttgatacttcagtcattccattccaaaatgatatgcataatgatgaatctggaaaaaacactgatgattgtttaaatcaccagataagtattggtgactttggttatggtcattgtagtagtgaaatttctaacattgataaaaacactaagaatgcatttcaggacatttcaatgagtaatgtatcatgggagaactctcagacggaatatagtaaaacttgttttataagttccgttaagcacacccagtcagaaaatggcaataaagaccatatagatgagagtggggaaaatgaggaagaagcaggtcttgaaaactcttcggaaatttctgcagatgagtggagcaggggaaatatacttaaaaattcagtgggagagaatattgaacctgtgaaaattttagtgcctgaaaaaagtttaccatgtaaagtaagtaataataattatccaatccctgaacaaatgaatcttaatgaagattcatgtaacaaaaaatcaaatgtaatagataataaatctggaaaagttacagcttatgatttacttagcaatcgagtaatcaagaaacccatgtcagcaagtgctctttttgttcaagatcatcgtcctcagtttctcatagaaaatcctaagactagtttagaggatgcaacactacaaattgaagaactgtggaagacattgagtgaagaggaaaaactgaatctttttaatggatctcattatttagacgttttatataaaatgacagcagatgaccaaagatacagtggatcaacttacctgtctgatcctcgtcttacagcgaatggtttcaagataaaattgataccaggagtttcaattactgaaaattacttggaaatagaaggaatggctaattgtctcccattctatggagtagcagatttaaaagaaattcttaatgctatattaaacagaaatgcaaaggaagtttatgaatgtagacctcgcaaagtgataagttatttagagggagaagcagtgcgtctatccagacaattacccatgtacttatcaaaagaggacatccaagacattatctacagaatgaagcaccagtttggaaatgaaattaaagagtgtgttcatggtcgcccattttttcatcatttaacctatcttccagaaactaca

SEQ ID NO: 5029 - DNA, 495 bp, Homo sapiens
  source 1..495: mol_type = genomic DNA
atgaaacaattgcctgcggcaacagttcgactcctttcaagttctcagatcatcacttcggtggtcagtgttgtaaaagagcttattgaaaactccttggatgctggtgccacaagcgtagatgttaaactggagaactatggatttgataaaattgaggtgcgagataacggggagggtatcaaggctgttgatgcacctgtaatggcaatgaagtactacacctcaaaaataaatagtcatgaagatcttgaaaatttgacaacttacggttttcgtggagaagccttggggtcaatttgttgtatagctgaggttttaattacaacaagaacggctgctgataattttagcacccagtatgttttagatggcagtggccacatactttctcagaaaccttcacatcttggtcaagggtctcactctgtcacacaggctggactgcagtggcatcatcttggttcactgcaacctctgcctcccaggctcaag

SEQ ID NO: 5030 - DNA, 2268 bp, Homo sapiens
  source 1..2268: mol_type = genomic DNA
atgagctttggtatccttaaacctgacttaaggattgtctttgtacataacaaggcagttatttggcagaaaagcagagtatcagatcacaagatggctctcatgtcagttctggggactgctgttatgaacaatatggaatcctttcagtaccactctgaagaatctcagatttatctcagtggatttcttccaaagtgtgatgcagaccactctttcactagtctttcaacaccagaaagaagtttcatcttcataaacagtcgaccagtacatcaaaaagatatcttaaagttaatccgacatcattacaatctgaaatgcctaaaggaatctactcgtttgtatcctgttttctttctgaaaatcgatgttcctacagctgatgttgatgtaaatttaacaccagataaaagccaagtattattacaaaataaggaatctgttttaattgctcttgaaaatctgatgacgacttgttatggaccattacctagtacaaattcttatgaaaataataaaacagatgtttccgcagctgacatcgttcttagtaaaacagcagaaacagatgtgctttttaataaagtggaatcatctggaaagaattattcaaatgttgatacttcagtcattccattccaaaatgatatgcataatgatgaatctggaaaaaacactgatgattgtttaaatcaccagataagtattggtgactttggttatggtcattgtagtagtgaaatttctaacattgataaaaacactaagaatgcatttcaggacatttcaatgagtaatgtatcatgggagaactctcagacggaatatagtaaaacttgttttataagttccgttaagcacacccagtcagaaaatggcaataaagaccatatagatgagagtggggaaaatgaggaagaagcaggtcttgaaaactcttcggaaatttctgcagatgagtggagcaggggaaatatacttaaaaattcagtgggagagaatattgaacctgtgaaaattttagtgcctgaaaaaagtttaccatgtaaagtaagtaataataattatccaatccctgaacaaatgaatcttaatgaagattcatgtaacaaaaaatcaaatgtaatagataataaatctggaaaagttacagcttatgatttacttagcaatcgagtaatcaagaaacccatgtcagcaagtgctctttttgttcaagatcatcgtcctcagtttctcatagaaaatcctaagactagtttagaggatgcaacactacaaattgaagaactgtggaagacattgagtgaagaggaaaaactgaaatatgaagagaaggctactaaagacttggaacgatacaatagtcaaatgaagagagccattgaacaggagtcacaaatgtcactaaaagatggcagaaaaaagataaaacccaccagcgcatggaatttggcccagaagcacaagttaaaaacctcattatctaatcaaccaaaacttgatgaactccttcagtcccaaattgaaaaaagaaggagtcaaaatattaaaatggtacagatccccttttctatgaaaaacttaaaaataaattttaagaaacaaaacaaagttgacttagaagagaaggatgaaccttgcttgatccacaatctcaggtttcctgatgcatggctaatgacatccaaaacagaggtaatgttattaaatccatatagagtagaagaagccctgctatttaaaagacttcttgagaatcataaacttcctgcagagccactggaaaagccaattatgttaacagagagtctttttaatggatctcattatttagacgttttatataaaatgacagcagatgaccaaagatacagtggatcaacttacctgtctgatcctcgtcttacagcgaatggtttcaagataaaattgataccaggagtttcaattactgaaaattacttggaaatagaaggaatggctaattgtctcccattctatggagtagcagatttaaaagaaattcttaatgctatattaaacagaaatgcaaaggaagtttatgaatgtagacctcgcaaagtgataagttatttagagggagaagcagtgcgtctatccagacaattacccatgtacttatcaaaagaggacatccaagacattatctacagaatgaagcaccagtttggaaatgaaattaaagagtgtgttcatggtcgcccattttttcatcatttaacctatcttccagaaactaca

SEQ ID NO: 5031 - DNA, 2796 bp, Homo sapiens
  source 1..2796: mol_type = genomic DNA
atgaaacaattgcctgcggcaacagttcgactcctttcaagttctcagatcatcacttcggtggtcagtgttgtaaaagagcttattgaaaactccttggatgctggtgccacaagcgtagatgttaaactggagaactatggatttgataaaattgaggtgcgagataacggggagggtatcaaggctgttgatgcacctgtaatggcaatgaagtactacacctcaaaaataaatagtcatgaagatcttgaaaatttgacaacttacggttttcgtggagaagccttggggtcaatttgttgtatagctgaggttttaattacaacaagaacggctgctgataattttagcacccagtatgttttagatggcagtggccacatactttctcagaaaccttcacatcttggtcaaggtacaactgtaactgctttaagattatttaagaatctacctgtaagaaagcagttttactcaactgcaaaaaaatgtaaagatgaaataaaaaagatccaagatctcctcatgagctttggtatccttaaacctgacttaaggattgtctttgtacataacaaggcagttatttggcagaaaagcagagtatcagatcacaagatggctctcatgtcagttctggggactgctgttatgaacaatatggaatcctttcagtaccactctgaagaatctcagatttatctcagtggatttcttccaaagtgtgatgcagaccactctttcactagtctttcaacaccagaaagaagtttcatcttcataaacagtcgaccagtacatcaaaaagatatcttaaagttaatccgacatcattacaatctgaaatgcctaaaggaatctactcgtttgtatcctgttttctttctgaaaatcgatgttcctacagctgatgttgatgtaaatttaacaccagataaaagccaagtattattacaaaataaggaatctgttttaattgctcttgaaaatctgatgacgacttgttatggaccattacctagtacaaattcttatgaaaataataaaacagatgtttccgcagctgacatcgttcttagtaaaacagcagaaacagatgtgctttttaataaagtggaatcatctggaaagaattattcaaatgttgatacttcagtcattccattccaaaatgatatgcataatgatgaatctggaaaaaacactgatgattgtttaaatcaccagataagtattggtgactttggttatggtcattgtagtagtgaaatttctaacattgataaaaacactaagaatgcatttcaggacatttcaatgagtaatgtatcatgggagaactctcagacggaatatagtaaaacttgttttataagttccgttaagcacacccagtcagaaaatggcaataaagaccatatagatgagagtggggaaaatgaggaagaagcaggtcttgaaaactcttcggaaatttctgcagatgagtggagcaggggaaatatacttaaaaattcagtgggagagaatattgaacctgtgaaaattttagtgcctgaaaaaagtttaccatgtaaagtaagtaataataattatccaatccctgaacaaatgaatcttaatgaagattcatgtaacaaaaaatcaaatgtaatagataataaatctggaaaagttacagcttatgatttacttagcaatcgagtaatcaagaaacccatgtcagcaagtgctctttttgttcaagatcatcgtcctcagtttctcatagaaaatcctaagactagtttagaggatgcaacactacaaattgaagaactgtggaagacattgagtgaagaggaaaaactgaaatatgaagagaaggctactaaagacttggaacgatacaatagtcaaatgaagagagccattgaacaggagtcacaaatgtcactaaaagatggcagaaaaaagataaaacccaccagcgcatggaatttggcccagaagcacaagttaaaaacctcattatctaatcaaccaaaacttgatgaactccttcagtcccaaattgaaaaaagaaggagtcaaaatattaaaatggtacagatccccttttctatgaaaaacttaaaaataaattttaagaaacaaaacaaagttgacttagaagagaaggatgaaccttgcttgatccacaatctcaggtttcctgatgcatggctaatgacatccaaaacagaggtaatgttattaaatccatatagagtagaagaagccctgctatttaaaagacttcttgagaatcataaacttcctgcagagccactggaaaagccaattatgttaacagagagtctttttaatggatctcattatttagacgttttatataaaatgacagcagatgaccaaagatacagtggatcaacttacctgtctgatcctcgtcttacagcgaatggtttcaagataaaattgataccaggagtttcaattactgaaaattacttggaaatagaaggaatggctaattgtctcccattctatggagtagcagatttaaaagaaattcttaatgctatattaaacagaaatgcaaaggaagtttatgaatgtagacctcgcaaagtgataagttatttagagggagaagcagtgcgtctatccagacaattacccatgtacttatcaaaagaggacatccaagacattatctacagaatgaagcaccagtttggaaatgaaattaaagagtgtgttcatggtcgcccattttttcatcatttaacctatcttccagaaactaca

SEQ ID NO: 5032 - DNA, 2679 bp, Homo sapiens
  source 1..2679: mol_type = genomic DNA
atgaaacaattgcctgcggcaacagttcgactcctttcaagttctcagatcatcacttcggtggtcagtgttgtaaaagagcttattgaaaactccttggatgctggtgccacaagcgtagatgttaaactggagaactatggatttgataaaattgaggtgcgagataacggggagggtatcaaggctgttgatgcacctgtaatggcaatgaagtactacacctcaaaaataaatagtcatgaagatcttgaaaatttgacaacttacggttttcgtggagaagccttggggtcaatttgttgtatagctgaggttttaattacaacaagaacggctgctgataattttagcacccagtatgttttagatggcagtggccacatactttctcagaaaccttcacatcttggtcaaggtacaactgtaactgctttaagattatttaagaatctacctgtaagaaagcagttttactcaactgcaaaaaaatgtaaagatgaaataaaaaagatccaagatctcctcatgagctttggtatccttaaacctgacttaaggattgtctttgtacataacaagatttatctcagtggatttcttccaaagtgtgatgcagaccactctttcactagtctttcaacaccagaaagaagtttcatcttcataaacagtcgaccagtacatcaaaaagatatcttaaagttaatccgacatcattacaatctgaaatgcctaaaggaatctactcgtttgtatcctgttttctttctgaaaatcgatgttcctacagctgatgttgatgtaaatttaacaccagataaaagccaagtattattacaaaataaggaatctgttttaattgctcttgaaaatctgatgacgacttgttatggaccattacctagtacaaattcttatgaaaataataaaacagatgtttccgcagctgacatcgttcttagtaaaacagcagaaacagatgtgctttttaataaagtggaatcatctggaaagaattattcaaatgttgatacttcagtcattccattccaaaatgatatgcataatgatgaatctggaaaaaacactgatgattgtttaaatcaccagataagtattggtgactttggttatggtcattgtagtagtgaaatttctaacattgataaaaacactaagaatgcatttcaggacatttcaatgagtaatgtatcatgggagaactctcagacggaatatagtaaaacttgttttataagttccgttaagcacacccagtcagaaaatggcaataaagaccatatagatgagagtggggaaaatgaggaagaagcaggtcttgaaaactcttcggaaatttctgcagatgagtggagcaggggaaatatacttaaaaattcagtgggagagaatattgaacctgtgaaaattttagtgcctgaaaaaagtttaccatgtaaagtaagtaataataattatccaatccctgaacaaatgaatcttaatgaagattcatgtaacaaaaaatcaaatgtaatagataataaatctggaaaagttacagcttatgatttacttagcaatcgagtaatcaagaaacccatgtcagcaagtgctctttttgttcaagatcatcgtcctcagtttctcatagaaaatcctaagactagtttagaggatgcaacactacaaattgaagaactgtggaagacattgagtgaagaggaaaaactgaaatatgaagagaaggctactaaagacttggaacgatacaatagtcaaatgaagagagccattgaacaggagtcacaaatgtcactaaaagatggcagaaaaaagataaaacccaccagcgcatggaatttggcccagaagcacaagttaaaaacctcattatctaatcaaccaaaacttgatgaactccttcagtcccaaattgaaaaaagaaggagtcaaaatattaaaatggtacagatccccttttctatgaaaaacttaaaaataaattttaagaaacaaaacaaagttgacttagaagagaaggatgaaccttgcttgatccacaatctcaggtttcctgatgcatggctaatgacatccaaaacagaggtaatgttattaaatccatatagagtagaagaagccctgctatttaaaagacttcttgagaatcataaacttcctgcagagccactggaaaagccaattatgttaacagagagtctttttaatggatctcattatttagacgttttatataaaatgacagcagatgaccaaagatacagtggatcaacttacctgtctgatcctcgtcttacagcgaatggtttcaagataaaattgataccaggagtttcaattactgaaaattacttggaaatagaaggaatggctaattgtctcccattctatggagtagcagatttaaaagaaattcttaatgctatattaaacagaaatgcaaaggaagtttatgaatgtagacctcgcaaagtgataagttatttagagggagaagcagtgcgtctatccagacaattacccatgtacttatcaaaagaggacatccaagacattatctacagaatgaagcaccagtttggaaatgaaattaaagagtgtgttcatggtcgcccattttttcatcatttaacctatcttccagaaactaca

SEQ ID NO: 5033 - DNA, 543 bp, Homo sapiens
  source 1..543: mol_type = genomic DNA
atgaaacaattgcctgcggcaacagttcgactcctttcaagttctcagatcatcacttcggtggtcagtgttgtaaaagagcttattgaaaactccttggatgctggtgccacaagcgtagatgttaaactggagaactatggatttgataaaattgaggtgcgagataacggggagggtatcaaggctgttgatgcacctgtaatggcaatgaagtactacacctcaaaaataaatagtcatgaagatcttgaaaatttgacaacttacggttttcgtggagaagccttggggtcaatttgttgtatagctgaggttttaattacaacaagaacggctgctgataattttagcacccagtatgttttagatggcagtggccacatactttctcagaaaccttcacatcttggtcaaggtaagaaagtagctttgtatacaaacattctttaccttttctgtcttaattgttggtttaaaaaaaaaaagttactcggtgaatacaaatatattgctttgggcttggtcctgataaaggctagt

SEQ ID NO: 5034 - DNA, 1581 bp, Homo sapiens
  source 1..1581: mol_type = genomic DNA
atgagaaaggagcattgtgaatataatgaacctgtgaaatcatatggtaatagctcatcccattttgtcattaccccctttaagtgtaatcattgtggaaaaggcttcaatcagactttggacctcatcagacatctgagaattcatactggagagaagccctatgaatgtagtaactgtagaaaagccttcagtcacaaggaaaaacttattaaacattataaaattcacagtagggagcagtcttacaaatgtaatgaatgtggtaaagctttcattaaaatgtcaaatctcattagacatcaaagaattcatactggagagaagccctatgcatgtaaggaatgtgagaagtccttcagccagaaatcaaatcttattgatcatgaaaaaattcatactggagagaaaccttatgaatgtaatgagtgtggaaaagcattcagccagaagcaaagcctcattgcacatcagaaagttcatactggggagaaaccttatgcatgtaatgaatgtggtaaagccttccctcgaattgcatcccttgctcttcatatgagaagtcatacaggagaaaaaccttataaatgtgataaatgtggtaaagccttctctcagttttccatgcttattatacatgttagaattcatacaggtgaaaaaccctatgaatgtaatgagtgtggaaaagccttctctcaaagctcagcccttactgtacatatgagaagtcacactggtgagaaaccctatgaatgtaaggaatgcagaaaagccttcagccacaagaaaaacttcattacacaccagaaaattcatactagagagaaaccttatgagtgtaatgaatgtgggaaagcttttatacagatgtcaaatcttgttagacaccagagaattcatactggggaaaaaccctatatatgtaaggaatgtgggaaagcctttagccagaaatcaaatctcattgctcatgaaaaaattcattctggagagaaaccctatgaatgcaatgaatgtggtaaagccttcagccaaaagcaaaacttcattacacatcaaaaagttcatactggagagaaaccttatgattgtaatgaatgtggtaaagccttctctcaaattgcatcccttacccttcatttgagaagtcatacaggggaaaagccttatgaatgtgataaatgtggtaaagccttctctcagtgctcactgcttaatttacatatgagaagtcacacaggtgagaagccctatgtatgtaatgaatgtgggaaagccttctctcaaagaacttcccttattgtgcacatgagaggccatacaggtgaaaaaccctatgaatgtaataaatgtggaaaagccttctcccaaagctcatcccttactatacatatacgaggacatacaggtgagaaacccttcgactgtagtaaatgtggaaaagccttctctcaaatctcatctcttacccttcatatgagaaaacatacaggtgagaagccctatcactgtattgagtgtggcaaggctttcagccaaaagtcgcaccttgttagacaccagagaattcatactcat

SEQ ID NO: 5035 - DNA, 2058 bp, Homo sapiens
  source 1..2058: mol_type = genomic DNA
atgactgagtcccagggaacagtaacattcaaagatgtggctatcgacttcactcaggaggagtggaagagattggatcctgctcagagaaaactgtaccggaatgtgatgctagaaaactataacaacttaatcacagtaggctatccgttcaccaaacctgatgtgattttcaaattggagcaagaagaagaaccatgggtgatggaggaagaagtattaaggagacactggcaaggagaaatatggggagttgatgagcatcagaaaaaccaggacagacttttgagacaagttgaagttaaattccagaaaacactgactgaagaaaaaggcaatgaatgtcaaaagaaatttgcaaatgtatttcctctgaactctgattttttcccttccagacacaatctctatgagtatgacttatttggaaagtgtttagaacataattttgactgtcataataatgtgaaatgccttatgagaaaggagcattgtgaatataatgaacctgtgaaatcatatggtaatagctcatcccattttgtcattaccccctttaagtgtaatcattgtggaaaaggcttcaatcagactttggacctcatcagacatctgagaattcatactggagagaagccctatgaatgtagtaactgtagaaaagccttcagtcacaaggaaaaacttattaaacattataaaattcacagtagggagcagtcttacaaatgtaatgaatgtggtaaagctttcattaaaatgtcaaatctcattagacatcaaagaattcatactggagagaagccctatgcatgtaaggaatgtgagaagtccttcagccagaaatcaaatcttattgatcatgaaaaaattcatactggagagaaaccttatgaatgtaatgagtgtggaaaagcattcagccagaagcaaagcctcattgcacatcagaaagttcatactggggagaaaccttatgcatgtaatgaatgtggtaaagccttccctcgaattgcatcccttgctcttcatatgagaagtcatacaggagaaaaaccttataaatgtgataaatgtggtaaagccttctctcagttttccatgcttattatacatgttagaattcatacaggtgaaaaaccctatgaatgtaatgagtgtggaaaagccttctctcaaagctcagcccttactgtacatatgagaagtcacactggtgagaaaccctatgaatgtaaggaatgcagaaaagccttcagccacaagaaaaacttcattacacaccagaaaattcatactagagagaaaccttatgagtgtaatgaatgtgggaaagcttttatacagatgtcaaatcttgttagacaccagagaattcatactggggaaaaaccctatatatgtaaggaatgtgggaaagcctttagccagaaatcaaatctcattgctcatgaaaaaattcattctggagagaaaccctatgaatgcaatgaatgtggtaaagccttcagccaaaagcaaaacttcattacacatcaaaaagttcatactggagagaaaccttatgattgtaatgaatgtggtaaagccttctctcaaattgcatcccttacccttcatttgagaagtcatacaggggaaaagccttatgaatgtgataaatgtggtaaagccttctctcagtgctcactgcttaatttacatatgagaagtcacacaggtgagaagccctatgtatgtaatgaatgtgggaaagccttctctcaaagaacttcccttattgtgcacatgagaggccatacaggtgaaaaaccctatgaatgtaataaatgtggaaaagccttctcccaaagctcatcccttactatacatatacgaggacatacaggtgagaaacccttcgactgtagtaaatgtggaaaagccttctctcaaatctcatctcttacccttcatatgagaaaacatacaggtgagaagccctatcactgtattgagtgtggcaaggctttcagccaaaagtcgcaccttgttagacaccagagaattcatactcat

SEQ ID NO: 5036 - DNA, 1932 bp, Homo sapiens
  source 1..1932: mol_type = genomic DNA
atgacatctcaatcttcagtgatcagcaatagctgtgtgacaatggagcgtttgagccacatgatggaaaggaaagcttggtgttctcaagagtctgccctttccgaggaagaagaggatacaaccaggcctcttgaaacagtgacatttaaggatgtggctgttgaccttacccaggaggagtgggagcaaatgaaacctgctcaaagaaacttgtatcgagatgtgatgctggagaactacagcaacctagtcacagtgggctgtcaagtcaccaaaccggatgtgatattcaagttggagcaagaagaggagccctgggtgatggaggaagaaatgtttgggaggcactgtccagaagtttgggaagttgatgaacagatcaagaagcaacaggaaacacttgtgaggaaagtcacatccatctccaagaaaattctgataaaggaaaaagtcattgaatgtaaaaaagttgcgaaaatatttcctctgagttcagacattgttacttcaagacaaagcttctatgactgtgactcacttgataagggtttggaacataatttagacttacttagatatgagaaaggctgtgtaagagagaaacagagtaatgagtttgggaaaccattttaccattgtgcatcctatgttgtaaccccctttaagtgtaatcagtgtggacaagacttcagtcataaatttgacctcattagacatgagcgaattcatgctggagagaaaccttacgaatgtaaagaatgtggaaaagccttcagtaggaaggaaaatcttattacacatcagaaaattcatactggggaaaaaccgtataagtgtaatgaatgtggaaaagctttcattcagatgtcaaaccttattagacaccacagaattcatactggggagaaaccttatgcatgtaaggattgttggaaagccttcagtcagaaatcaaatctcattgaacatgagcgaattcacactggagagaaaccctatgaatgtaaggaatgtgggaaatccttcagccagaagcaaaatcttattgagcacgagaaaattcatactggggagaaaccttatgcatgtaatgaatgtggtagagctttttctcgaatgtcatctgttacgctacatatgagaagtcacacaggggagaaaccctataaatgtaataaatgtggaaaagctttctctcaatgctcagtatttattatacatatgagaagtcacactggtgagaaaccctatgtatgtagtgaatgtgggaaagccttctctcagagttcatccctaaccgtacatatgcgaaatcatacagctgagaaaccctatgaatgtaaggaatgtggaaaagccttcagcaggaaagaaaatctcattacacatcagaaaattcacactggagagaaaccttatgaatgcagtgaatgtgggaaagcttttattcagatgtcaaacctcattcgacaccagagaattcatacgggtgagaaaccctatgcatgtacagtatgtggaaaagcctttagtcagaaatcaaacctcactgaacatgagaaaattcatactggagagaaaccttatcattgtaatcaatgtgggaaagctttcagtcagagacaaaatcttcttgagcatgaaaaaattcatactggagagaaaccattcaaatgtaatgaatgtggtaaagccttctctcgaatctcatccctcactcttcatgtgagaagtcacacaggggagaaaccctatgaatgtaataaatgtgggaaagccttttctcagtgctcattacttattatacatatgagaagtcatactggtgagaaaccctttgaatgtaatgaatgtgggaaagcattctctcaaagagcatccctttctatacataagagaggtcatacaggtgagagacaccaagtatat

SEQ ID NO: 5037 - DNA, 1740 bp, Homo sapiens
  source 1..1740: mol_type = genomic DNA
atgaaacctgctcaaagaaacttgtatcgagatgtgatgctggagaactacagcaacctagtcacagtgggctgtcaagtcaccaaaccggatgtgatattcaagttggagcaagaagaggagccctgggtgatggaggaagaaatgtttgggaggcactgtccagaagtttgggaagttgatgaacagatcaagaagcaacaggaaacacttgtgaggaaagtcacatccatctccaagaaaattctgataaaggaaaaagtcattgaatgtaaaaaagttgcgaaaatatttcctctgagttcagacattgttacttcaagacaaagcttctatgactgtgactcacttgataagggtttggaacataatttagacttacttagatatgagaaaggctgtgtaagagagaaacagagtaatgagtttgggaaaccattttaccattgtgcatcctatgttgtaaccccctttaagtgtaatcagtgtggacaagacttcagtcataaatttgacctcattagacatgagcgaattcatgctggagagaaaccttacgaatgtaaagaatgtggaaaagccttcagtaggaaggaaaatcttattacacatcagaaaattcatactggggaaaaaccgtataagtgtaatgaatgtggaaaagctttcattcagatgtcaaaccttattagacaccacagaattcatactggggagaaaccttatgcatgtaaggattgttggaaagccttcagtcagaaatcaaatctcattgaacatgagcgaattcacactggagagaaaccctatgaatgtaaggaatgtgggaaatccttcagccagaagcaaaatcttattgagcacgagaaaattcatactggggagaaaccttatgcatgtaatgaatgtggtagagctttttctcgaatgtcatctgttacgctacatatgagaagtcacacaggggagaaaccctataaatgtaataaatgtggaaaagctttctctcaatgctcagtatttattatacatatgagaagtcacactggtgagaaaccctatgtatgtagtgaatgtgggaaagccttctctcagagttcatccctaaccgtacatatgcgaaatcatacagctgagaaaccctatgaatgtaaggaatgtggaaaagccttcagcaggaaagaaaatctcattacacatcagaaaattcacactggagagaaaccttatgaatgcagtgaatgtgggaaagcttttattcagatgtcaaacctcattcgacaccagagaattcatacgggtgagaaaccctatgcatgtacagtatgtggaaaagcctttagtcagaaatcaaacctcactgaacatgagaaaattcatactggagagaaaccttatcattgtaatcaatgtgggaaagctttcagtcagagacaaaatcttcttgagcatgaaaaaattcatactggagagaaaccattcaaatgtaatgaatgtggtaaagccttctctcgaatctcatccctcactcttcatgtgagaagtcacacaggggagaaaccctatgaatgtaataaatgtgggaaagccttttctcagtgctcattacttattatacatatgagaagtcatactggtgagaaaccctttgaatgtaatgaatgtgggaaagcattctctcaaagagcatccctttctatacataagagaggtcatacaggtgagagacaccaagtatat

SEQ ID NO: 5038 - DNA, 1713 bp, Homo sapiens
  source 1..1713: mol_type = genomic DNA
atgaaacctgctcaaagaaacttgtatcgagatgtgatgctggagaactacagcaacctagtcacagtgggctgtcaagtcaccaaaccggatgtgatattcaagttggagcaagaagaggagccctgggtgatggaggaagaaatgtttgggaggcactgtccagaacccagaagaggagagaactgctgtgcgtctgaagtgatggcggagggcttgaagttcaaagatgtggtcatttacttctctcaaaaggagtgggaatgcttgcactctgctcagaaggatttgtaccgagatgtaatgttggaaaattacggcaacctggtcttactggggctttctgatactaagccaaatgtgatctccttattggagcagaagaaagagccctggatggttaagaggaaggagacaaaagaatggtgtccagattgggagtttggaagagaaaccaagaatttatctccaaaggaaaacatttatgaaattagatcaccacaacaggagaaggccagagttatcagagaaatcagatgccaggtggagagacaacagggtcatcaggagggacatttcagaccagctgtaataccatttacttccatgcagtgcacagcccatagagaatatcagtggcttcatactggagagaaatcctgtgaatgcaggaaatgtaagaatgcttttaggtaccagtcatgtcctattcaacatgaaataattcataataaggaaaaagaacctgaatgtggagaatgtaggaaaatctttaatagtggatcagacttgattaagcatcagacgcttcatgaaagcaaaaaacatagtgaaaataacaaatgtgcctttaatcatgattctggaattactcaacctcagagcattaatactggagagaaacctcataaatgtaaggaatgtgggaaagcctttcgttccagctcacaaattagtcagcatcagaggatgcatcttggtgagaaaccctataagtgtagggagtgtgggaaagcctttccatccactgcacagcttaatctacatcagaggatccatactgatgagaaatactatgaaagtaaggcgtgtgggaaggcctttacccgtccctcacacctttttcgacatcaaagaatccatacgggtgagaaaccccataaatgtaaggaatgtggaaaggcttttcgttatgacacacagctgagccttcatcagataatccatactggtgaaagacgctatgaatgcagggagtgtggaaaggtgtacagttgtgcctcacagctgagtctacatcaaagaattcatactggtgagaaaccccatgaatgtaaggaatgtgggaaagcctttatctctgattcacatcttattcgacatcagagtgtccatactggggagaaaccctgtaagtgtaaggaatgtgggaagtcctttcgtcgtggctcagaacttacccgacatcagagagctcatactggtgaaaaaccctatgagtgtaaggaatgtgaaaaggcctttacttgtagcacagaacttgttcgacatcaaaaagttcacactggggagagaccccataagtgtaaggaatgtgggaaggctttcattcgaaggtcagaactcacacatcatgagagaagtcacactggtgagaaaccctacgagtgtaaggagtgtgggaagccctttggtggtggctcagaacttagt

SEQ ID NO: 5039 - DNA, 1905 bp, Homo sapiens
  source 1..1905: mol_type = genomic DNA
atgacatctcaatcttcagtgatcagcaatagctgtgtgacaatggagcgtttgagccacatgatggaaaggaaagcttggtgttctcaagagtctgccctttccgaggaagaagaggatacaaccaggcctcttgaaacagtgacatttaaggatgtggctgttgaccttacccaggaggagtgggagcaaatgaaacctgctcaaagaaacttgtatcgagatgtgatgctggagaactacagcaacctagtcacagtgggctgtcaagtcaccaaaccggatgtgatattcaagttggagcaagaagaggagccctgggtgatggaggaagaaatgtttgggaggcactgtccagaacccagaagaggagagaactgctgtgcgtctgaagtgatggcggagggcttgaagttcaaagatgtggtcatttacttctctcaaaaggagtgggaatgcttgcactctgctcagaaggatttgtaccgagatgtaatgttggaaaattacggcaacctggtcttactggggctttctgatactaagccaaatgtgatctccttattggagcagaagaaagagccctggatggttaagaggaaggagacaaaagaatggtgtccagattgggagtttggaagagaaaccaagaatttatctccaaaggaaaacatttatgaaattagatcaccacaacaggagaaggccagagttatcagagaaatcagatgccaggtggagagacaacagggtcatcaggagggacatttcagaccagctgtaataccatttacttccatgcagtgcacagcccatagagaatatcagtggcttcatactggagagaaatcctgtgaatgcaggaaatgtaagaatgcttttaggtaccagtcatgtcctattcaacatgaaataattcataataaggaaaaagaacctgaatgtggagaatgtaggaaaatctttaatagtggatcagacttgattaagcatcagacgcttcatgaaagcaaaaaacatagtgaaaataacaaatgtgcctttaatcatgattctggaattactcaacctcagagcattaatactggagagaaacctcataaatgtaaggaatgtgggaaagcctttcgttccagctcacaaattagtcagcatcagaggatgcatcttggtgagaaaccctataagtgtagggagtgtgggaaagcctttccatccactgcacagcttaatctacatcagaggatccatactgatgagaaatactatgaaagtaaggcgtgtgggaaggcctttacccgtccctcacacctttttcgacatcaaagaatccatacgggtgagaaaccccataaatgtaaggaatgtggaaaggcttttcgttatgacacacagctgagccttcatcagataatccatactggtgaaagacgctatgaatgcagggagtgtggaaaggtgtacagttgtgcctcacagctgagtctacatcaaagaattcatactggtgagaaaccccatgaatgtaaggaatgtgggaaagcctttatctctgattcacatcttattcgacatcagagtgtccatactggggagaaaccctgtaagtgtaaggaatgtgggaagtcctttcgtcgtggctcagaacttacccgacatcagagagctcatactggtgaaaaaccctatgagtgtaaggaatgtgaaaaggcctttacttgtagcacagaacttgttcgacatcaaaaagttcacactggggagagaccccataagtgtaaggaatgtgggaaggctttcattcgaaggtcagaactcacacatcatgagagaagtcacactggtgagaaaccctacgagtgtaaggagtgtgggaagccctttggtggtggctcagaacttagt

SEQ ID NO: 5040 - DNA, 1848 bp, Homo sapiens
  source 1..1848: mol_type = genomic DNA
atggatgtgatgttggaaaactattgccacctcatctctgtggggtgtcacatgaccaaacctgatgtgatcctcaagttggaacgaggagaagagccatggacatcatttgcaggtcatacctgcttggaagaaaactggaaagctgaagactttttagtgaaattcaaggaacaccaagagaagtattctagatcagttgtaagcatcaaccacaaaaaactggtgaaggagaagagtaaaatatatgaaaagacatttactctaggcaaaaaccctgtgaattcaaaaaatctacctcctgaatatgatactcatggaaggattttgaaaaatgtttcagaattaatcatcagtaatctaaatcctgcaagaaagagacttagtgagtataatggatatgggaaatcactcctgagtactaaacaagagactactcatcctgaagtcaaatcccataatcaaagtgccagagctttcagtcataatgaagttcttatgcagtatcagaaaacggaaactccagcacagtcatttggatataatgactgtgagaaatcattccttcaaaggggaggcctgattacacatagtagaccttacaaaggagaaaacccatctgtatataataaaaaaagaagagcaaccaatattgaaaaaaaacatacatgcaatgaatgtgggaaatctttctgcaggaaatcagtattgattctgcatcagggaattcactcagaagaaaaaccctatcaatgtcatcaatgtggaaatgcatttagaaggaaatcatatctcattgatcatcagagaactcacacaggagagaaaccctttgtttgcaatgaatgtggtaagtccttccgcctcaagacagccctcactgatcatcagagaacacacacaggggagaaatcgtatgaatgtctgcaatgtaggaatgccttcagattgaagtcacacctcattcgtcatcagagaactcacacgggagagaaaccatatgagtgtaatgactgtgggaagtccttccgccagaagacaacactctctctacatcagagaatccatacaggtgagaaaccctacatttgtaaagaatgtgggaagtcctttcaccagaaggcaaatcttactgtacatcagagaactcatacaggggaaaagccctatatttgtaatgaatgtgggaaatccttctcccagaagacaacccttgctcttcatgagaaaactcataatgaggagaaaccctatatttgtagtgaatgtggaaagtccttccgccagaagacaacccttgtagcacatcagagaacacatacaggggagaaatcttatgaatgtcctcactgtgggaaggcctttagaatgaagtcatacctcattgatcatcaccgaactcacacaggagagaaaccatatgaatgtaatgaatgtggtaaatcattcagtcaaaagacaaatctcaatctacatcagagaattcatacaggggagaaaccctatgtttgtaatgaatgtgggaagtcctttcgccagaaagcaaccctcactgtacatcagaaaatacataccggccagaaatcctatgaatgtcctcagtgtgggaaagcctttagcaggaagtcatatctcattcatcatcaaagaactcatacgggagagaaaccatataaatgtagtgaatgtggaaagtgcttccgccagaagacaaatcttattgtacatcagagaactcacacaggtgagaaaccctatgtttgtaatgagtgtggtaagtctttcagttataagagaaacctcattgtccatcaaagaactcacaagggagaaaacattgaaatgcaa

SEQ ID NO: 5041 - DNA, 1941 bp, Homo sapiens
  source 1..1941: mol_type = genomic DNA
atggctcagggatcagtgtctttcaatgatgtgactgtggacttcactcaggaggagtggcagcacctggatcatgctcagaagactctatatatggatgtgatgttggaaaactattgccacctcatctctgtggggtgtcacatgaccaaacctgatgtgatcctcaagttggaacgaggagaagagccatggacatcatttgcaggtcatacctgcttggaagaaaactggaaagctgaagactttttagtgaaattcaaggaacaccaagagaagtattctagatcagttgtaagcatcaaccacaaaaaactggtgaaggagaagagtaaaatatatgaaaagacatttactctaggcaaaaaccctgtgaattcaaaaaatctacctcctgaatatgatactcatggaaggattttgaaaaatgtttcagaattaatcatcagtaatctaaatcctgcaagaaagagacttagtgagtataatggatatgggaaatcactcctgagtactaaacaagagactactcatcctgaagtcaaatcccataatcaaagtgccagagctttcagtcataatgaagttcttatgcagtatcagaaaacggaaactccagcacagtcatttggatataatgactgtgagaaatcattccttcaaaggggaggcctgattacacatagtagaccttacaaaggagaaaacccatctgtatataataaaaaaagaagagcaaccaatattgaaaaaaaacatacatgcaatgaatgtgggaaatctttctgcaggaaatcagtattgattctgcatcagggaattcactcagaagaaaaaccctatcaatgtcatcaatgtggaaatgcatttagaaggaaatcatatctcattgatcatcagagaactcacacaggagagaaaccctttgtttgcaatgaatgtggtaagtccttccgcctcaagacagccctcactgatcatcagagaacacacacaggggagaaatcgtatgaatgtctgcaatgtaggaatgccttcagattgaagtcacacctcattcgtcatcagagaactcacacgggagagaaaccatatgagtgtaatgactgtgggaagtccttccgccagaagacaacactctctctacatcagagaatccatacaggtgagaaaccctacatttgtaaagaatgtgggaagtcctttcaccagaaggcaaatcttactgtacatcagagaactcatacaggggaaaagccctatatttgtaatgaatgtgggaaatccttctcccagaagacaacccttgctcttcatgagaaaactcataatgaggagaaaccctatatttgtagtgaatgtggaaagtccttccgccagaagacaacccttgtagcacatcagagaacacatacaggggagaaatcttatgaatgtcctcactgtgggaaggcctttagaatgaagtcatacctcattgatcatcaccgaactcacacaggagagaaaccatatgaatgtaatgaatgtggtaaatcattcagtcaaaagacaaatctcaatctacatcagagaattcatacaggggagaaaccctatgtttgtaatgaatgtgggaagtcctttcgccagaaagcaaccctcactgtacatcagaaaatacataccggccagaaatcctatgaatgtcctcagtgtgggaaagcctttagcaggaagtcatatctcattcatcatcaaagaactcatacgggagagaaaccatataaatgtagtgaatgtggaaagtgcttccgccagaagacaaatcttattgtacatcagagaactcacacaggtgagaaaccctatgtttgtaatgagtgtggtaagtctttcagttataagagaaacctcattgtccatcaaagaactcacaagggagaaaacattgaaatgcaa

SEQ ID NO: 5042 - DNA, 1776 bp, Homo sapiens
  source 1..1776: mol_type = genomic DNA
atggatgtgatgttggaaaactattgccacctcatctctgtggggtgtcacatgaccaaacctgatgtgatcctcaagttggaacgaggagaagagccatggacatcatttgcaggtcatacctgcttggaagaaaactggaaagctgaagactttttagtgaaattcaaggaacaccaagagaagtattctagatcagttgtaagcatcaaccacaaaaaactggtgaaggagaagagtaaaatatatgaaaagacatttactctaggcaaaaaccctgtgaattcaaaaaatctacctcctgaatatgatactcatggaaggattttgaaaaatgtttcagaattaatcatcagtaatctaaatcctgcaagaaagagacttagtgagtataatggatatgggaaatcactcctgagtactaaacaagagactactcatcctgaagtcaaatcccataatcaaagtgccagagctttcagtcataatgaagttcttatgcagtatcagaaaacggaaactccagcacagtcatttggatataatgactgtgagaaatcattccttcaaaggggaggcctgattacacatagtagaccttacaaaggagaaaacccatctgtatataataaaaaaagaagagcaaccaatattgaaaaaaaacatacatgcaatgaatgtgggaaatctttctgcaggaaatcagtattgattctgcatcagggaattcactcagaagaaaaaccctatcaatgtcatcaatgtggaaatgcatttagaaggaaatcatatctcattgatcatcagagaactcacacaggagagaaaccctttgtttgcaatgaatgtggtaagtccttccgcctcaagacagccctcactgatcatcagagaacacacacaggggagaaatcgtatgaatgtctgcaatgtaggaatgccttcagattgaagtcacacctcattcgtcatcagagaactcacacgggagagaaaccatatgagtgtaatgactgtgggaagtccttccgccagaagacaacactctctctacatcagagaatccatacaggtgagaaaccctacatttgtaaagaatgtgggaagtcctttcaccagaaggcaaatcttactgtacatcagagaactcatacaggggaaaagccctatatttgtaatgaatgtgggaaatccttctcccagaagacaacccttgctcttcatgagaaaactcataatgaggagaaaccctatatttgtagtgaatgtggaaagtccttccgccagaagacaacccttgtagcacatcagagaacacatacaggggagaaatcttatgaatgtcctcactgtgggaaggcctttagaatgaagtcatacctcattgatcatcaccgaactcacacaggagagaaaccatatgaatgtaatgaatgtggtaaatcattcagtcaaaagacaaatctcaatctacatcagagaattcatacaggggagaaaccctatgtttgtaatgaatgtgggaagtcctttcgccagaaagcaaccctcactgtacatcagaaaatacataccggccagaaatcctatgaatgtcctcagtgtgggaaagcctttagcaggaagtcatatctcattcatcatcaaagaactcatacgggagagaaaccatataaatgtagtgaatgtggaaagtgcttccgccagaagacaaatcttattgtacatcagagaactcacacaggtggagaggatggcctaactggatgtttatcc

SEQ ID NO: 5043 - DNA, 942 bp, Homo sapiens
  source 1..942: mol_type = genomic DNA
atggaaaaactcacaagacgtgattttcagtgctccagtttcagagatgattgggaatgtaatcggcagtttaagaaagaactcggctctcaggggggacatttcaatcaattggtattcactcatgaagatctgcccactttgagtcaccatccatccttcacattacagcaaatcattaacagtaaaaagaaattctgtgcatctaaagaatataggaaaacctttagacatggctcacagtttgctacacatgagataattcataccattgagaagccttatgaatgtaaggaatgtggaaagtcctttagacatccctcaagactcactcatcatcagaaaattcatactggcaagaaaccctttgaatgtaaggaatgtggaaaaacctttatttgtggctcagaccttactcgacatcacagaattcacactggtgagaaaccctatgaatgtaaggaatgtgggaaagcctttagtagtggttcaaacttcactcgacatcagagaattcacacaggtgagaagccttatgaatgcaaagaatgcgggaaggcctttagtagtggctcaaactttactcaacatcagagaattcatactggggaaaaaccctatgaatgtaaggaatgtggcaatgcctttagtcagagctcacaacttattaaacatcaaagaatccatacaggtgagaaaccttacgaatgtaaggaatgtgaaaaggcttttcgttctggctcagaccttactagacatcagagaattcatactggggagaaaccctatgaatgtaagatatgtgggaaggcttattctcagagttcacagcttattagtcatcatagaattcatactagtgagaaaccctatgaatatagggaatgtggaaagaactttaattatgacccacaacttattcagcatcaaaatttgtactgg

SEQ ID NO: 5044 - DNA, 1257 bp, Homo sapiens
  source 1..1257: mol_type = genomic DNA
atggctcaggagtcagtgatgttcagtgatgtgtccgtagacttctctcaggaggagtgggaatgcctgaatgatgatcagagagatttatacagagatgtgatgttggagaattacagcaacctggtttcaatggcagggcattctatttctaaaccaaatgtgatctcctacttggagcaagggaaggagccctggttggctgacagagagctaacaagaggccagtggccagtcctggaatcaagatgtgagaccaagaaattatttctgaagaaagaaatttatgaaatagaatcaacccagtgggaaataatggaaaaactcacaagacgtgattttcagtgctccagtttcagagatgattgggaatgtaatcggcagtttaagaaagaactcggctctcaggggggacatttcaatcaattggtattcactcatgaagatctgcccactttgagtcaccatccatccttcacattacagcaaatcattaacagtaaaaagaaattctgtgcatctaaagaatataggaaaacctttagacatggctcacagtttgctacacatgagataattcataccattgagaagccttatgaatgtaaggaatgtggaaagtcctttagacatccctcaagactcactcatcatcagaaaattcatactggcaagaaaccctttgaatgtaaggaatgtggaaaaacctttatttgtggctcagaccttactcgacatcacagaattcacactggtgagaaaccctatgaatgtaaggaatgtgggaaagcctttagtagtggttcaaacttcactcgacatcagagaattcacacaggtgagaagccttatgaatgcaaagaatgcgggaaggcctttagtagtggctcaaactttactcaacatcagagaattcatactggggaaaaaccctatgaatgtaaggaatgtggcaatgcctttagtcagagctcacaacttattaaacatcaaagaatccatacaggtgagaaaccttacgaatgtaaggaatgtgaaaaggcttttcgttctggctcagaccttactagacatcagagaattcatactggggagaaaccctatgaatgtaagatatgtgggaaggcttattctcagagttcacagcttattagtcatcatagaattcatactagtgagaaaccctatgaatatagggaatgtggaaagaactttaattatgacccacaacttattcagcatcaaaatttgtactgg

SEQ ID NO: 5045 - DNA, 1254 bp, Homo sapiens
  source 1..1254: mol_type = genomic DNA
atggctcaggagtcagtgatgttcagtgatgtgtccgtagacttctctcaggaggagtgggaatgcctgaatgatgatcagagagatttatacagagatgtgatgttggagaattacagcaacctggtttcaatggggcattctatttctaaaccaaatgtgatctcctacttggagcaagggaaggagccctggttggctgacagagagctaacaagaggccagtggccagtcctggaatcaagatgtgagaccaagaaattatttctgaagaaagaaatttatgaaatagaatcaacccagtgggaaataatggaaaaactcacaagacgtgattttcagtgctccagtttcagagatgattgggaatgtaatcggcagtttaagaaagaactcggctctcaggggggacatttcaatcaattggtattcactcatgaagatctgcccactttgagtcaccatccatccttcacattacagcaaatcattaacagtaaaaagaaattctgtgcatctaaagaatataggaaaacctttagacatggctcacagtttgctacacatgagataattcataccattgagaagccttatgaatgtaaggaatgtggaaagtcctttagacatccctcaagactcactcatcatcagaaaattcatactggcaagaaaccctttgaatgtaaggaatgtggaaaaacctttatttgtggctcagaccttactcgacatcacagaattcacactggtgagaaaccctatgaatgtaaggaatgtgggaaagcctttagtagtggttcaaacttcactcgacatcagagaattcacacaggtgagaagccttatgaatgcaaagaatgcgggaaggcctttagtagtggctcaaactttactcaacatcagagaattcatactggggaaaaaccctatgaatgtaaggaatgtggcaatgcctttagtcagagctcacaacttattaaacatcaaagaatccatacaggtgagaaaccttacgaatgtaaggaatgtgaaaaggcttttcgttctggctcagaccttactagacatcagagaattcatactggggagaaaccctatgaatgtaagatatgtgggaaggcttattctcagagttcacagcttattagtcatcatagaattcatactagtgagaaaccctatgaatatagggaatgtggaaagaactttaattatgacccacaacttattcagcatcaaaatttgtactgg

SEQ ID NO: 5046 - DNA, 1497 bp, Homo sapiens
  source 1..1497: mol_type = genomic DNA
atggcccagggactggtgacattcagggacgtggccatagagttctctctggaagaatggaagtgcctggaacctgctcagagggacttgtacagggaggtgactctggagaactttggtcacttggcctcactaggactctccatttctaagcctgatgtcgtctccttattggagcaagggaaagagccctggatgattgcaaatgatgtgacaggaccatggtgcccagacttggagtccaggtgtgagaaatttctacaaaaagacatttttgaaatcggggcattcaactgggagataatggaaagccttaaatgcagtgacctggagggctccgattttagagctgactgggaatgcgaaggccagtttgagagacaagtcaatgaagagtgctattttaagcaagtgaacgtcacctatggacatatgcccgtgttccagcatcacacgtctcacactgtacgtcagagcagggagactggtgagaaactgatggaatgtcatgaatgtgggaaagcatttagccgtggctcacaccttattcaacatcagaaaattcacactggtgaaaaaccctttggatgtaaggaatgtgggaaggccttcagccgtgcctcacaccttgttcagcatcagagaattcacacgggtgagaaaccttatgactgtaaggactgtgggaaggcctttggtcgtacatcagaacttattctacatcagagacttcatactggtgtcaaaccttatgaatgtaaagaatgtgggaagacctttaggcagcattcacagctgattctgcatcaaagaactcacacaggcgagaaaccctacgtatgtaaagactgtggcaaggctttcattcgtggctcccaactcactgtgcatcggagaatccacacaggggccagaccctatgagtgtaaagaatgcgggaaagcctttagacagcactcacagctgactgtacaccagcgaatccacactggtgagaaaccctacgagtgtaaggaatgcggaaagggctttattcacagctcagaagttactcgacatcaaagaattcattctggggagaaaccctatgagtgtaaggaatgtgggaaggccttcagacagcacgcacagctcacacgacatcagagagtccatactggcgacagaccctatgaatgtaaggactgcgggaaggcatttagtcgtagctcatacctcattcaacatcaaagaattcatacaggtgacaaaccctacgaatgtaaggaatgtgggaaggcctttattcgtgtttcacaactgactcatcatcagcgaattcacacttgtgagaaaccctatgaatgcagggagtgtggaatggcctttattcgtagttcacaacttaccgaacatcagagaattcatcctggtatcaaaccttacgaatgtagagagtgtgggcaggcatttattcttggctcacaactcattgaacactacagaattcatactggt

SEQ ID NO: 5047 - DNA, 336 bp, Homo sapiens
  source 1..336: mol_type = genomic DNA
atgctggccattggtctttccctttgtgatcatctttctcaagatgttttctgtcttcatgagtcaaaatttgaagaggaaaggatggtggctgggtggttgacaaattactctcaggactcagtgacctttgaggatgtggctgtggacttcacccaggaggagtggactttgctggatcaaactcagagaaacttatacagagatgtgatgctggagaactataagaatctagttgcagtagattgggagagtcatattaataccaaatggtcagcacctcagcagaattttttgcaggggaaaacatccagtgtggtggaaatgaattcagag

SEQ ID NO: 5048 - DNA, 1806 bp, Homo sapiens
  source 1..1806: mol_type = genomic DNA
atgcgcataacggccgccatcttaacagcgcgttcccgttggcgtctgaggaacagcatctctgccttcctgttcacggtgaccttcgcttggtgtcctcctggcctcagcaacctgacaattctgtcgtgtcccgatcatctttctcaagatgttttctgtcttcatgagtcaaaatttgaagaggaaaggatggtggctgggtggttgacaaattactctcaggactcagtgacctttgaggatgtggctgtggacttcacccaggaggagtggactttgctggatcaaactcagagaaacttatacagagatgtgatgctggagaactataagaatctagttgcagtagattgggagagtcatattaataccaaatggtcagcacctcagcagaattttttgcaggggaaaacatccagtgtggtggaaatggagagaaaccattttggagaggaactgtttgactttaaccaatgtgaaaaagccttgagtgaacactcatgccttaagactcacaggagaacttactttagaaagaaaacctgtgagtgtaatcaatgtgaaaaagccttcagaaaaccctctatctttactttacacaagaaaactgatatcggagaggaacttcctaactgtaatcaatgtgaaacagccttcagccaacatctacatcttgtttgcaagaaaactagccaaaatctacatcttgtttgcaagaaaactcacactcaagagaaaccatataaatgcagtgactgtgaaaaaggcttaccttcctcctcacacctcagagaatgtgtaagaatttatggtggagagagaccatatactcataaggagtatgtcgaaaccttttctcattctacagccctttttgtacacatgcaaactcaagatggagaaaaattctatgaatgtaaagcatgtgggaaacccttcactgagtcgtcatatcttactcaacatttaagaactcatagtagagtgttacctatagaacataagaaatttggcaaagcctttgctttttccccagatcttgctaaacatataagacttagaactagaggaaaacactatgtttgtaatgaatgtggcaaagaatttacttgtttctcaaaactcaacattcacataagggttcacactggagaaaaaccgtatgagtgcaacaaatgtgggaaagccttcactgattcatcaggtcttataaaacacaggcgaactcacactggagaaaagccttatgaatgtaaggaatgtgggaaagcttttgctaactcttcacatcttactgtacatatgagaactcacactggtgagaagccttatcaatgtaaggaatgtggaaaagcctttattaattcctcttcctttaaaagtcacatgcagactcatcctggtgtaaaaccctatgactgtcaacagtgtgggaaagccttcattcgatcctcatttcttattcgacatttgagaagtcacagtgcagaaaggccttttgaatgtgaggaatgtgggaaagcctttagatactcctcgcaccttagtcaacataaaagaatacatacaggggagaggccatataaatgtcaaaagtgtgggcaagccttcagtatctcatcaggccttacagtacacatgagaactcacactggtgaacggccctttgaatgtcaggaatgtgggaaagcctttactcggtccacatatcttattcgacatctaagaagtcatagtgtggagaaaccatataaggaatgtgggcaaacctttagtaattcctcatgccttactgaatgtgtg

SEQ ID NO: 5049 - DNA, 252 bp, Homo sapiens
  source 1..252: mol_type = genomic DNA
atggtggctgggtggttgacaaattactctcaggactcagtgacctttgaggatgtggctgtggacttcacccaggaggagtggactttgctggatcaaactcagagaaacttatacagagatgtgatgctggagaactataagaatctagttgcagtagattgggagagtcatattaataccaaatggtcagcacctcagcagaattttttgcaggggaaaacatccagtgtggtggaaatgaattcagag

SEQ ID NO: 5050 - DNA, 1008 bp, Homo sapiens
  source 1..1008: mol_type = genomic DNA
atgtctcaggctgtgcagacaaacggaactcaaccattaagcaaaacatgggaactcagtttatatgagttacaacgaacacctcaggaggcaataacagatggcttagaaattgtggtttcacctcgaagtctacacagtgaattaatgtgcccaatttgtttggatatgttgaagaacaccatgactacaaaggagtgtttacatcgtttttgtgcagactgcatcatcacagcccttagaagtggcaacaaagaatgtcctacctgtcggaaaaaactagtttccaaaagatcactaaggccagacccaaactttgatgcactcatcagcaaaatttatccaagtcgtgatgagtatgaagctcatcaagagagagtattagccaggatcaacaagcacaataatcagcaagcactcagtcacagcattgaggaaggactgaagatacaggccatgaacagactgcagcgaggcaagaaacaacagattgaaaatggtagtggagcagaagataatggtgacagttcacactgcagtaatgcatccacacatagcaatcaggaagcaggccctagtaacaaacggaccaaaacatctgatgattctgggctagagcttgataataacaatgcagcaatggcaattgatccagtaatggatggtgctagtgaaattgaattagtattcaggcctcatcccacacttatggaaaaagatgacagtgcacagacgagatacataaagacttctggtaacgccactgttgatcacttatccaagtatctggctgtgaggttagctttagaagaacttcgaagcaaaggtgaatcaaaccagatgaaccttgatacagccagtgagaagcagtataccatttatatagcaacagccagtggccagttcactgtattaaatggctctttttctttggaattggtcagtgagaaatactggaaagtgaacaaacccatggaactttattacgcacctacaaaggagcacaaa

SEQ ID NO: 5051 - DNA, 1275 bp, Homo sapiens
  source 1..1275: mol_type = genomic DNA
atgtcagcctttgatatgtcccatgggttttttcccagggaaccaatctgtccttttgaagaaaagacaaagataggaacgatggtagaggaccaccggtcaaattcttaccaggattcagtgacgtttgatgatgtggctgtggagttcaccccagaggagtgggctttactggacacaactcagaaatacctctacagagatgtgatgctggagaactacatgaacctggcctctgtggatttctttttctgcttaacttcagaatgggaaatacaacctagaaccaaacggtcatcacttcagcagggttttttgaagaatcaaatattcactgggatacaaatgacaagaagctacagtggatggaaactctgtgagaattgtggagaggtcttcagtgaacagttttgccttaagacacacatgagagctcagaatggagggaacacttttgagggtaattgttatggaaaagacagcatcagtgtgcacaaggaagcctctattggacaagaactttccaaatttaatccatgtggaaaagtcttcaccttaactccaggccttgctgtgcatcttgaaattctcaatggaagacaaccctacaaatgtaaggaatgtggaaaaggctttaagtattttgcaagccttgataatcacatgggaatccacattggagagaaactctgtgaatttcaggaatgtgagagagccatcacaacttcctcacacttaaagcagtgtgtagcagttcatactggaaagaaatccgaaaagactaagaactgtgggaaatccttcactaatttttctcaactttctgcacatgcaaaaactcataaaggagagaagtcctttgaatgtaaagaatgtggaagatcctttagaaattcctcatcctttaatgttcacattcaaattcacactggaataaaaccacacaaatgtacggaatgtgggaaagccttcactagatcaactcaccttactcaacatgtaagaactcacactggaataaaaccctatgaatgtaaggaatgtggccaagccttcactcagtacacgggccttgctatacacatacgaaatcacactggagagaaaccctatcagtgtaaggaatgtgggaaagccttcaatagatcttcaacgcttactcaacatagaagaattcacacaggagagaagccttatgaatgtgttgaatgtgggaagaccttcattacttcttcccatcgtagtaaacatttgaaaactcacagtggagaaagg

SEQ ID NO: 5052 - DNA, 1062 bp, Homo sapiens
  source 1..1062: mol_type = genomic DNA
atgtcagcctttgatatgtcccatgatttctttttctgcttaacttcagaatgggaaatacaacctagaaccaaacggtcatcacttcagcagggttttttgaagaatcaaatattcactgggatacaaatgcagacaagaagctacagtggatggaaactctgtgagaattgtggagaggtcttcagtgaacagttttgccttaagacacacatgagagctcagaatggagggaacacttttgagggtaattgttatggaaaagacagcatcagtgtgcacaaggaagcctctattggacaagaactttccaaatttaatccatgtggaaaagtcttcaccttaactccaggccttgctgtgcatcttgaaattctcaatggaagacaaccctacaaatgtaaggaatgtggaaaaggctttaagtattttgcaagccttgataatcacatgggaatccacattggagagaaactctgtgaatttcaggaatgtgagagagccatcacaacttcctcacacttaaagcagtgtgtagcagttcatactggaaagaaatccgaaaagactaagaactgtgggaaatccttcactaatttttctcaactttctgcacatgcaaaaactcataaaggagagaagtcctttgaatgtaaagaatgtggaagatcctttagaaattcctcatcctttaatgttcacattcaaattcacactggaataaaaccacacaaatgtacggaatgtgggaaagccttcactagatcaactcaccttactcaacatgtaagaactcacactggaataaaaccctatgaatgtaaggaatgtggccaagccttcactcagtacacgggccttgctatacacatacgaaatcacactggagagaaaccctatcagtgtaaggaatgtgggaaagccttcaatagatcttcaacgcttactcaacatagaagaattcacacaggagagaagccttatgaatgtgttgaatgtgggaagaccttcattacttcttcccatcgtagtaaacatttgaaaactcacagtggagaaagg

SEQ ID NO: 5053 - DNA, 1251 bp, Homo sapiens
  source 1..1251: mol_type = genomic DNA
atgctggagaactacatgaacctggcctctgtggaatgggaaatacaacctagaaccaaacggtcatcacttcagcagggttttttgaagaatcaaatattcagtgggatacaaatgacaagaggctacagtggatggaaactctgtgactgtaagaattgtggagaggtcttcagggaacagttttgccttaagacacacatgagagttcagaatggagggaatacttctgagggtaattgttatggaaaagacaccctcagtgtgcacaaggaagcctctactggacaggaactttccaaatttaatccatgtggaaaagtctttactctaactccaggtcttgctgtacatcttgaagttctcaatgcaagacaaccctacaaatgtaaggaatgtggaaaaggctttaagtattttgcaagccttgataatcatatgggaatccacactgatgagaaactctgtgaatttcaggaatatgggagagctgtcacagcttcttcacacctaaagcagtgtgtagcagttcatacaggaaagaaatccaaaaagactaagaaatgtgggaaatccttcactaatttttctcaactttatgcacctgtgaaaactcataaaggagagaagtcctttgaatgtaaagaatgtggaagatcctttagaaattcctcatgccttaatgatcacattcaaattcacactggaataaaaccacacaagtgtacttactgtgggaaagccttcactagatcaactcaacttactgaacatgtaagaactcacactggaataaaaccctatgaatgtaaggaatgtggccaagcctttgctcagtactcgggcctttctatacacatacgaagtcacagtggaaagaaaccctatcagtgtaaggaatgtgggaaagccttcactacatccacaagtcttattcagcatacaagaattcacacaggagagaagccttatgaatgtgttgaatgtgggaagaccttcattacttcttcccgtcgtagtaaacatttgaaaactcatagtggagaaaagccctttgtatgcaagatatgtgggaaagcatttctatattcctcacgccttaatgttcacctgcgaactcataccggagagaaacccttcgtatgtaaagaatgtgggaaagcatttgctgtttcctcacgcctaagtagacatgaaagaattcacactggggagaaaccctatgaatgcaaggatatgagtgttaccatt

SEQ ID NO: 5054 - DNA, 1458 bp, Homo sapiens
  source 1..1458: mol_type = genomic DNA
atggcagccatttatttgtcccgtgggtttttttccagggaaccaatctgcccttttgaagaaaagacaaaggtagaaaggatggtggaggactacctggcaagtggttatcaggattcagtgacgtttgatgatgtggctgtggacttcaccccagaggagtgggctttactggacacaactgagaaatacctctacagagatgtgatgctggagaactacatgaacctggcctctgtggaatgggaaatacaacctagaaccaaacggtcatcacttcagcagggttttttgaagaatcaaatattcagtgggatacaaatgacaagaggctacagtggatggaaactctgtgactgtaagaattgtggagaggtcttcagggaacagttttgccttaagacacacatgagagttcagaatggagggaatacttctgagggtaattgttatggaaaagacaccctcagtgtgcacaaggaagcctctactggacaggaactttccaaatttaatccatgtggaaaagtctttactctaactccaggtcttgctgtacatcttgaagttctcaatgcaagacaaccctacaaatgtaaggaatgtggaaaaggctttaagtattttgcaagccttgataatcatatgggaatccacactgatgagaaactctgtgaatttcaggaatatgggagagctgtcacagcttcttcacacctaaagcagtgtgtagcagttcatacaggaaagaaatccaaaaagactaagaaatgtgggaaatccttcactaatttttctcaactttatgcacctgtgaaaactcataaaggagagaagtcctttgaatgtaaagaatgtggaagatcctttagaaattcctcatgccttaatgatcacattcaaattcacactggaataaaaccacacaagtgtacttactgtgggaaagccttcactagatcaactcaacttactgaacatgtaagaactcacactggaataaaaccctatgaatgtaaggaatgtggccaagcctttgctcagtactcgggcctttctatacacatacgaagtcacagtggaaagaaaccctatcagtgtaaggaatgtgggaaagccttcactacatccacaagtcttattcagcatacaagaattcacacaggagagaagccttatgaatgtgttgaatgtgggaagaccttcattacttcttcccgtcgtagtaaacatttgaaaactcatagtggagaaaagccctttgtatgcaagatatgtgggaaagcatttctatattcctcacgccttaatgttcacctgcgaactcataccggagagaaacccttcgtatgtaaagaatgtgggaaagcatttgctgtttcctcacgcctaagtagacatgaaagaattcacactggggagaaaccctatgaatgcaaggatatgagtgttaccatt

SEQ ID NO: 5055 - DNA, 2370 bp, Homo sapiens
  source 1..2370: mol_type = genomic DNA
atggcttactgcctgacaaattgttatcagtactccgtgacctttgaggatacagctgtggacttcacccaggaggagtggattttactggacccagttcagagaaacttatacagagatgtgatgctggagaattatgagaacgtggccaaagtaggatttcagctctttaaacccagtgtcatctcttggttggaagaagaagagttgagaaccttgcagcaaggagttctccaagactgggcaataaaacatcaaaccagtgtttcagcactgcagcaggagttttggaaaatacaaacttctaatgggatacaaatggacctggtaacctttgacagtgtggctgtggagttcacccaggaagagtggactttactggacccagctcagagaaacctgtacagtgatgtgatgctggagaactacaagaacctgtcctcagtaggttaccagctcttcaaacccagtctgatctcttggctggaggaagaggaagagttgagcacactgccaagagttctccaagaatggaaaatgtgcctgaaaaccaaagggccagccctttggcaagataatttttgtttaaaaacattaaatgggatacagttggcaagaaaccaaaatggagaggaactctatgactgtaagcaatgtgaagatgtcttctgtaaacatccatgccttaagaccaacatgagtactcaaaatagaggcaacacgtctgaatgtattcagtatgcaaaagacctcctttctctatacaataaaacctctaccataaggaaagtttctgtgttcagtaagcatggaaaatctttccgcctgattttaaatgttcaggtccagagaaagtgtacacaagataaatcctttgaaggcactgactatgggaaagccttcatttatcagtcataccttgaagcacacaggaaaactcagagtggagaaaaactcaatgaatggaagcaatgtggggaagcatttactcactccacaagccatgctgtaaatgttgaaacacacattattaaaaacccctatgaatgtaaggaatgtggaaaagattttagataccctacccaccttaataatcacatgcaaacccacattgggataaaaccttataaatgtaagcactgtggcaaaaccttcactgtgccgtcaggctttcttgaacatgtacgaactcacactggagagaagccctatgggtgtaaggaatgtggtaaagcctttggtacatctgcaggccttattgaacatataagatgtcacgccagagagaaaacctttaaatgtgaccactgtgggaaagcctttatttcttacccatctctttttggacatttgagagttcataatggagagaagccatatgagcataaggaatatgggaaggcctttggtacatcctcaggtgttattgaagatagaagaagtaacacaggacagaaacgctttgattgtgaccagtgtgggaaagtctttgtttctttctcatctctttttgctcatttgagaactcacactggtgagaagccctttaagtgttacaaatgtgggaaaccatttacctcttctgcctgtcttcgtattcacatgcgaactcacacagaagagagactctatcaatgtaagaaatgtggtaaagctttcactaagtgctcatatcttaccaaacatttacgaacacacgctggagagaaaccctatgaatgtatgaaatgtgggaaagccttcactgagcgctcataccttactaaacatttacgaagacacagtggagagaagccatatgaatgtaagaaatgtggaaaagccttcacagaacgctcagatcttactaaacatttacgaagacacactggagataagccctatgaatataaggactgtgggaaagcctttgttgtctcctccagtctagttgatcatttaagaactcacactggatataaaccctataaatgtaatgcatgtgaaaaagcttacagtaggtcttgtgtactaactcaacacttaaaaactcatgcagcagagaagacctctgaatgtaacgcatgtggaaattcctttcgaaattccatgtgctttcatgatcgcttaaaaactctcaccaaaataaaaccctataaatgtaaggactgtgggaaagccttcacttgtcattcagatcttactaatcatgtgcgaattcacactggagagaagccctataaatgtaaggaatgtgggaaggccttccgtacatcctcaggacgtattcaacatttaagaactcatatgggagagaaaccctttgaatgtgaccagtgtgggaaagcctttgcttctttctcagctcgtattgcacatttgaaaacacac

SEQ ID NO: 5056 - DNA, 1551 bp, Homo sapiens
  source 1..1551: mol_type = genomic DNA
atgcagcctctgagcaagttgatggctatctcaaaacctcgaaacctgtctctacgtgaacaaagagaggttctgagagcagatatgtcttggcagcaggaaaccaaccccgtcgtggagacacatgactctgaggcatctcgtcaaaagttcagacatttccagtatttgaaagtgtctgggccccatgaagccctgagccaactctgggagctctgtcttcaatggctgagaccagagattcatacaaagaagcagattatagaactgttggtgctggaacaattcctggcaatcctgcctgaagaagtcaggacttgggtgaatttacaacatccaaacaacagtaaagatatggtgaccctcatagaagatgtgattgaaatgcttgaagatgaagatatgccctgcaaggactctgccctgcagatggggagcatcaaggagaaaatgaaagctggctcacgaacaggcaaaccacaggaaccagtgacattcaaagatgtggttgtggaattcagcaaggaagagtgggggcaactggactctgctgtaaagaacctgtacaggaatgtgatgctggaaaactttaggaacctgaattcattgcgtaaagcacatctactttccaaaccatttgagagccttaagttggagagtaagaaaaaaagatggataatggagaaagaaataccaaggaagactatttttgacatgaagagtatttctggagaagaatcatcccatggagtgattatgacaaggcttaccgaaagtggacacccttcttcagatgcctggaaaggtgagaattggttatataggaaccagaaaaaatgggacataaatttgccacaagaggctttcattcctgagacaatttacactgaggaggaagattttgaatgtagtgaaaataagaaaagctttgatattaattcagttagctcaatttgtgctatacaagtgggaattccttcaagaaaggggtctccaaaatgtgataagtttaaaacttacttcaaatttaatttagactcagtaggtaagcaacattcagaatatgaatatgggaatgacttgagtttgagtacagatattcgacaccaaaaaagtcatactacaatgaattcctatgaatgttatcaatgtgggaaagccttctgccgaagttcatcccttattcgacatcagatcattcacacaggagagaaaccctataaatgcagtgaatgtgggagattcttcaaccgacgtacaaaccttactaagcatcaaaaacttcatgctgaagcaaaggcctgcacaagcaataaatgtggaaaggccttcagtaaaagtgaagacagtaataatccaacactccattttggaaacaatttctatcaatgtgttaactgtggaaaatccttcaaccggagctcctctcttattcgacaccaaatgattcacacgggagagaaaccattcaaatgtaaggaatgtagtaaagccttcaacaggagttcaaaccttgttaaacatcaaaaactgcatactcgagataagtcc

SEQ ID NO: 5057 - DNA, 1818 bp, Homo sapiens
  source 1..1818: mol_type = genomic DNA
atggcagtaacatttgaagatgtgactattatttttacatgggaggagtggaaattcctggattcttctcaaaaaagactctacagggaggtcatgtgggagaactacacaaatgtcatgtcagtagaaaactggaatgagagctacaaatcccaagaagaaaaattcagatacttagaatatgaaaatttttcctactggcaaggctggtggaatgctggcgcccagatgtatgagaatcagaactatggggaaactgttcaagggacagattccaaagacctcacacagcaagatcgttcccagtgtcaggaatggttaatactctccacacaagtaccagggtatgggaactatgaactgacttttgaaagcaaaagtctcaggaacttaaaatataaaaattttatgccttggcagtccttagaaacaaaaaccactcaagactatggtagagaaatctacatgagtggttcacatggttttcaagggggcagataccgtcttggcatatccaggaaaaacctctccatggaaaaagaacagaagctcatagttcagcattcttatatcccagtggaggaagcccttccacagtatgttggggtgatatgtcaagaagacctactgagagattcaatggaagaaaagtactgtggatgtaataaatgtaaaggaatttattattggaactcacggtgtgttttccacaagagaaatcaacctggagaaaacctctgtcaatgctccatctgtaaagcatgcttctctcagagatcagacttgtatagacatccaagaaaccacataggtaagaagctgtacggatgtgatgaagttgacggtaactttcatcagagctccggagttcactttcatcagagagttcacataggggaggtaccttatagctgtaatgcatgtggtaagagcttcagccagatctctagtcttcacaatcatcaaagagtccacacagaagagaaattctataaaattgagtgtgataaagacctcagtagaaattcattacttcacattcaccagagacttcacataggagagaagccttttaaatgtaatcagtgtggtaagagttttaatcggagttcagtacttcatgttcatcagagagtccacacaggagaaaaaccatataagtgtgatgagtgtggtaagggtttcagccagagctcaaatcttcgaattcatcagttagtacacacaggagagaagtcttataaatgtgaagactgtggtaaaggctttacccagcgctcaaatcttcaaattcatcagagagtgcatacaggagagaaaccttataaatgtgatgactgtggaaaggactttagtcacagctcagatcttcgcattcatcagagagtccatacaggggagaaaccctatacttgtcctgaatgtgggaagggcttcagtaagagttcaaagcttcacactcatcaaagagtacatactggagagaaaccctacaaatgtgaagagtgtggcaagggattcagtcagcgttcacatcttctcattcatcagagagtccatacaggagaaaagccctataaatgtcatgattgtggaaagggttttagtcacagttctaatcttcacattcatcagagggtccatacaggagagaagccttatcaatgtgctaagtgtggtaaaggtttcagtcatagctcagctcttcgaattcatcaaagagtccatgcaggagagaaaccttacaaatgccgtgaatattataagggatttgatcataattcacatcttcacaataatcatagaagaggaaactta

SEQ ID NO: 5058 - DNA, 3144 bp, Homo sapiens
  source 1..3144: mol_type = genomic DNA
atgcaatcgaaagtgacaggaaacatgccaactcaatccctcttaatgtacatggatgggccagaagtgattggcagctctcttggcagtccgatggagatggaggatgccttgtcaatgaaagggaccgctgttgttccattccgagctacacaagaaaaaaatgtcatccaaatcgaggggtatatgcccttggattgcatgttctgcagccagaccttcacacattcagaagaccttaataaacatgtcttaatgcaacaccggcctaccctctgtgaaccagcagttcttcgggttgaagcagagtatctcagtccgcttgataaaagtcaagtgcgaacagaacctcccaaggaaaagaattgcaaggaaaatgaatttagctgtgaggtatgtgggcagacatttagagtcgcttttgatgttgagatccacatgagaacacacaaagattctttcacttacgggtgtaacatgtgcggaagaagattcaaggagccttggtttcttaaaaatcacatgcggacacataatggcaaatcgggggccagaagcaaactgcagcaaggcttggagagtagtccagcaacgatcaacgaggtcgtccaggtgcacgcggccgagagcatctcctctccttacaaaatctgcatggtttgtggcttcctatttccaaataaagaaagtctaattgagcaccgcaaggtgcacaccaaaaaaactgctttcggtaccagcagcgcgcagacagactctccacaaggaggaatgccgtcctcgagggaggacttcctgcagttgttcaacttgagaccaaaatctcaccctgaaacggggaagaagcctgtcagatgcatccctcagctcgatccgttcaccaccttccaggcttggcagctggctaccaaaggaaaagttgccatttgccaagaagtgaaggaatcggggcaagaagggagcaccgacaacgacgattcgagttccgagaaggagcttggagaaacaaataagggcagttgtgcaggcctctcgcaagagaaagagaagtgcaaacactcccacggcgaagcgccctccgtggacgcggatcccaagttacccagtagcaaggagaagcccactcactgctccgagtgcggcaaagctttcagaacctaccaccagctggtcttgcactccagggtccacaagaaggaccggagggccggcgcggagtcgcccaccatgtctgtggacgggaggcagccggggacgtgttctcctgacctcgccgcccctctggatgaaaatggagccgtggatcgaggggaaggtggttctgaagacggatctgaggatgggcttcccgaaggaatccatctggataaaaatgatgatggaggaaaaataaaacatcttacatcttcaagagagtgtagttattgtggaaagtttttccgttcaaattattacctcaatattcatctcagaacgcatacaggtgaaaaaccatacaaatgtgaattttgtgaatatgctgcagcccagaagacatctctgaggtatcacttggagagacatcacaaggaaaaacaaaccgatgttgctgctgaagtcaagaacgatggtaaaaatcaggacactgaagatgcactattaaccgctgacagtgcgcaaaccaaaaatttgaaaagattttttgatggtgccaaagatgttacaggcagtccacctgcaaagcagcttaaggagatgccttctgtttttcagaatgttctgggcagcgctgtcctctcaccagcacacaaagatactcaggatttccataaaaatgcagctgatgacagtgctgataaagtgaataaaaaccctacccctgcttacctggacctgttaaaaaagagatcagcagttgaaactcaggcaaataacctcatctgtagaaccaaggcggatgttactcctcctccggatggcagtaccacccataaccttgaagttagccccaaagagaagcaaacggagaccgcagctgactgcagatacaggccaagtgtggattgtcacgaaaaacctttaaatttatccgtgggggctcttcacaattgcccggcaatttctttgagtaaaagtttgattccaagtatcacctgtccattttgtaccttcaagacattttatccagaagttttaatgatgcaccagagactggagcataaatacaatcctgacgttcataaaaactgtcgaaacaagtccttgcttagaagtcgacgtaccggatgcccgccagcgttgctgggaaaagatgtgcctcccctctctagtttctgtaaacccaagcccaagtctgctttcccggcgcagtccaaatccctgccatctgcgaaggggaagcagagccctcctgggccaggcaaggcccctctgacttcagggatagactctagcactttagccccaagtaacctgaagtcccacagaccacagcagaatgtgggggtccaaggggccgccaccaggcaacagcaatctgagatgtttcctaaaaccagtgtttcccctgcaccggataagacaaaaagacccgagacaaaattgaaacctcttccagtagctccttctcagcccaccctcggcagcagtaacatcaatggttccatcgactaccccgccaagaacgacagcccgtgggcacctccgggaagagactatttctgtaatcggagtgccagcaatactgcagcagaatttggtgagccccttccaaaaagactgaagtccagcgtggttgcccttgacgttgaccagcccggggccaattacagaagaggctatgaccttcccaagtaccatatggtcagaggcatcacatcactgttaccgcaggactgtgtgtatccgtcgcaggcgctgcctcccaaaccaaggttcctgagctccagcgaggtcgattctccaaatgtgctgactgttcagaagccctatggtggctccgggccactttacacttgtgtgcctgctggtagtccagcatccagctcgacgttagaaggaaaaaggcctgtgtcatatcaacacttatctaacagcatggcacaaaagagaaactatgagaattttattgggaatgcacattatcgaccaaatgacaaaaaaact

SEQ ID NO: 5059 - DNA, 1431 bp, Homo sapiens
  source 1..1431: mol_type = genomic DNA
atggagtggaggaataagaaaaggagcgattggctgtcgatggtgctcagaactgctggagtggaggaagcctttgggtctgaagtgtctgtgagacctcacagaagagcacccctgggctccacttacctgccccctgctccttcagggatggaggcaatggcggccagcacttccctgcctgaccctggagactttgaccggaacgtgccccggatctgtggggtgtgtggagaccgagccactggctttcacttcaatgctatgacctgtgaaggctgcaaaggcttcttcaggcgaagcatgaagcggaaggcactattcacctgccccttcaacggggactgccgcatcaccaaggacaaccgacgccactgccaggcctgccggctcaaacgctgtgtggacatcggcatgatgaaggagttcattctgacagatgaggaagtgcagaggaagcgggagatgatcctgaagcggaaggaggaggaggccttgaaggacagtctgcggcccaagctgtctgaggagcagcagcgcatcattgccatactgctggacgcccaccataagacctacgaccccacctactccgacttctgccagttccggcctccagttcgtgtgaatgatggtggagggagccatccttccaggcccaactccagacacactcccagcttctctggggactcctcctcctcctgctcagatcactgtatcacctcttcagacatgatggactcgtccagcttctccaatctggatctgagtgaagaagattcagatgacccttctgtgaccctagagctgtcccagctctccatgctgccccacctggctgacctggtcagttacagcatccaaaaggtcattggctttgctaagatgataccaggattcagagacctcacctctgaggaccagatcgtactgctgaagtcaagtgccattgaggtcatcatgttgcgctccaatgagtccttcaccatggacgacatgtcctggacctgtggcaaccaagactacaagtaccgcgtcagtgacgtgaccaaagccggacacagcctggagctgattgagcccctcatcaagttccaggtgggactgaagaagctgaacttgcatgaggaggagcatgtcctgctcatggccatctgcatcgtctccccagatcgtcctggggtgcaggacgccgcgctgattgaggccatccaggaccgcctgtccaacacactgcagacgtacatccgctgccgccacccgcccccgggcagccacctgctctatgccaagatgatccagaagctagccgacctgcgcagcctcaatgaggagcactccaagcagtaccgctgcctctccttccagcctgagtgcagcatgaagctaacgccccttgtgctcgaagtgtttggcaatgagatctcc

SEQ ID NO: 5060 - DNA, 1731 bp, Homo sapiens
  source 1..1731: mol_type = genomic DNA
atgctcgggttccccccgggtcgcccgcagctcccggtccagctccgcccacagactcggatggcgaccgcactgagggacccggcttcggttcccatagctacagaggtgcttttcaaacttacacagggaagtgtgacctttgaagatgtggccgtgtacttctcctgggaggaatgggatctccttgatgaggctcagaaacacctgtacttcgatgtgatgctggagaactttgcacttacgtcctccctgggttgttggtgtggagtggaacatgaggaaacaccttctgaacagagaatttctggagaaagagtgccacagttcaggacttccaaagaaggttcatcttcccagaatgccgactcctgtgaaatatgttgcctggtcttgagagatattttgcacttggctgaacaccaaggaacaaactgcgggcagaaactacacacatgtggaaaacaattctacatcagtgcaaatcttcaacagcaccagaggcagcacattacagaggcacctttcagaagttatgtggacactgcctcgtttacacagagttgcatagtccatgtgtcggagaaaccctttacctgcagggagatcaggaaagacttcctggccaacatgaggtttctccatcaagacgccactcaaacaggggagaagccaaataacagtaacaagtgtgcggtggccttttacagtggaaaaagtcatcacaactggggaaaatgcagtaaagcctttagccacatagacacacttgttcaggaccagagaatcctcactagagaaggactttttgagtgcagtaaatgtgggaaagcatgtacgcgaagatgtaacctcattcagcaccagaaagtccacagtgaagaaaggccttatgaatgcaatgaatgtggaaaattctttacctactactccagtttcattatacatcagagagttcatactggagaaaggccttatgcgtgccctgaatgtgggaaatcgtttagtcagatatacagcctcaatagccataggaaagttcacactggagaaaggccttatgaatgtggggaatgtgggaaatcttttagccaaaggtccaacctcatgcagcatcgcagagttcacactggagaaaggccttatgaatgcagcgaatgtgggaaatcttttagccaaaactttagcctgatctaccaccagagagttcacactggagaaagacctcatgagtgcaatgaatgtggaaaatcctttagccgaagctccagcctcattcaccaccggagacttcacactggagaaagaccctatgagtgcagtaaatgtgggaagtcatttaagcaaagctccagcttcagttcacatcggaaagtccacacaggggaaaggccttatgtgtgtggggaatgtgggaaatcctttagccatagctccaaccttaagaaccaccagagagttcacactggagaaagacctgttgagtgcagtgaatgtagcaaatcctttagctgtaaatctaacctcattaaacacctgagagttcacactggagaaaggccttatgagtgcagtgaatgtgggaaatcctttagccaaagttctagcctcattcaacaccgcagagttcacacgggaaaaaggccttatcagtgcagtcaatgtgggaaatcctttggctgcaaatctgtcctcattcaacaccagagagttcacattggagaaaagcct

SEQ ID NO: 5061 - DNA, 1665 bp, Homo sapiens
  source 1..1665: mol_type = genomic DNA
atgctggagaactttgcacttacgtcctccctgggacttatatcatcctggtctcatgtagttgctcaactagggctaggggaagtgccctctgttcttcacaggatgttcatgactccagcctcagcaagatgggatcagagagggcctggcctacatgaatggcacttgggaaaaggcatgtcatcaggttgttggtgtggagtggaacatgaggaaacaccttctgaacagagaatttctggagaaagagtgccacagttcaggacttccaaagaaggttcatcttcccagaatgccgactcctgtgaaatatgttgcctggtcttgagagatattttgcacttggctgaacaccaaggaacaaactgcgggcagaaactacacacatgtggaaaacaattctacatcagtgcaaatcttcaacagcaccagaggcagcacattacagaggcacctttcagaagttatgtggacactgcctcgtttacacagagttgcatagtccatgtgtcggagaaaccctttacctgcagggagatcaggaaagacttcctggccaacatgaggtttctccatcaagacgccactcaaacaggggagaagccaaataacagtaacaagtgtgcggtggccttttacagtggaaaaagtcatcacaactggggaaaatgcagtaaagcctttagccacatagacacacttgttcaggaccagagaatcctcactagagaaggactttttgagtgcagtaaatgtgggaaagcatgtacgcgaagatgtaacctcattcagcaccagaaagtccacagtgaagaaaggccttatgaatgcaatgaatgtggaaaattctttacctactactccagtttcattatacatcagagagttcatactggagaaaggccttatgcgtgccctgaatgtgggaaatcgtttagtcagatatacagcctcaatagccataggaaagttcacactggagaaaggccttatgaatgtggggaatgtgggaaatcttttagccaaaggtccaacctcatgcagcatcgcagagttcacactggagaaaggccttatgaatgcagcgaatgtgggaaatcttttagccaaaactttagcctgatctaccaccagagagttcacactggagaaagacctcatgagtgcaatgaatgtggaaaatcctttagccgaagctccagcctcattcaccaccggagacttcacactggagaaagaccctatgagtgcagtaaatgtgggaagtcatttaagcaaagctccagcttcagttcacatcggaaagtccacacaggggaaaggccttatgtgtgtggggaatgtgggaaatcctttagccatagctccaaccttaagaaccaccagagagttcacactggagaaagacctgttgagtgcagtgaatgtagcaaatcctttagctgtaaatctaacctcattaaacacctgagagttcacactggagaaaggccttatgagtgcagtgaatgtgggaaatcctttagccaaagttctagcctcattcaacaccgcagagttcacacgggaaaaaggccttatcagtgcagtcaatgtgggaaatcctttggctgcaaatctgtcctcattcaacaccagagagttcacattggagaaaagcct

SEQ ID NO: 5062 - DNA, 1509 bp, Homo sapiens
  source 1..1509: mol_type = genomic DNA
atgctggagaactttgcacttacgtcctccctgggttgttggtgtggagtggaacatgaggaaacaccttctgaacagagaatttctggagaaagagtgccacagttcaggacttccaaagaaggttcatcttcccagaatgccgactcctgtgaaatatgttgcctggtcttgagagatattttgcacttggctgaacaccaaggaacaaactgcgggcagaaactacacacatgtggaaaacaattctacatcagtgcaaatcttcaacagcaccagaggcagcacattacagaggcacctttcagaagttatgtggacactgcctcgtttacacagagttgcatagtccatgtgtcggagaaaccctttacctgcagggagatcaggaaagacttcctggccaacatgaggtttctccatcaagacgccactcaaacaggggagaagccaaataacagtaacaagtgtgcggtggccttttacagtggaaaaagtcatcacaactggggaaaatgcagtaaagcctttagccacatagacacacttgttcaggaccagagaatcctcactagagaaggactttttgagtgcagtaaatgtgggaaagcatgtacgcgaagatgtaacctcattcagcaccagaaagtccacagtgaagaaaggccttatgaatgcaatgaatgtggaaaattctttacctactactccagtttcattatacatcagagagttcatactggagaaaggccttatgcgtgccctgaatgtgggaaatcgtttagtcagatatacagcctcaatagccataggaaagttcacactggagaaaggccttatgaatgtggggaatgtgggaaatcttttagccaaaggtccaacctcatgcagcatcgcagagttcacactggagaaaggccttatgaatgcagcgaatgtgggaaatcttttagccaaaactttagcctgatctaccaccagagagttcacactggagaaagacctcatgagtgcaatgaatgtggaaaatcctttagccgaagctccagcctcattcaccaccggagacttcacactggagaaagaccctatgagtgcagtaaatgtgggaagtcatttaagcaaagctccagcttcagttcacatcggaaagtccacacaggggaaaggccttatgtgtgtggggaatgtgggaaatcctttagccatagctccaaccttaagaaccaccagagagttcacactggagaaagacctgttgagtgcagtgaatgtagcaaatcctttagctgtaaatctaacctcattaaacacctgagagttcacactggagaaaggccttatgagtgcagtgaatgtgggaaatcctttagccaaagttctagcctcattcaacaccgcagagttcacacgggaaaaaggccttatcagtgcagtcaatgtgggaaatcctttggctgcaaatctgtcctcattcaacaccagagagttcacattggagaaaagcct

SEQ ID NO: 5063 - DNA, 1887 bp, Homo sapiens
  source 1..1887: mol_type = genomic DNA
atgctcgggttccccccgggtcgcccgcagctcccggtccagctccgcccacagactcggatggcgaccgcactgagggacccggcttcggttcccatagctacagaggtgcttttcaaacttacacagggaagtgtgacctttgaagatgtggccgtgtacttctcctgggaggaatgggatctccttgatgaggctcagaaacacctgtacttcgatgtgatgctggagaactttgcacttacgtcctccctgggacttatatcatcctggtctcatgtagttgctcaactagggctaggggaagtgccctctgttcttcacaggatgttcatgactccagcctcagcaagatgggatcagagagggcctggcctacatgaatggcacttgggaaaaggcatgtcatcaggttgttggtgtggagtggaacatgaggaaacaccttctgaacagagaatttctggagaaagagtgccacagttcaggacttccaaagaaggttcatcttcccagaatgccgactcctgtgaaatatgttgcctggtcttgagagatattttgcacttggctgaacaccaaggaacaaactgcgggcagaaactacacacatgtggaaaacaattctacatcagtgcaaatcttcaacagcaccagaggcagcacattacagaggcacctttcagaagttatgtggacactgcctcgtttacacagagttgcatagtccatgtgtcggagaaaccctttacctgcagggagatcaggaaagacttcctggccaacatgaggtttctccatcaagacgccactcaaacaggggagaagccaaataacagtaacaagtgtgcggtggccttttacagtggaaaaagtcatcacaactggggaaaatgcagtaaagcctttagccacatagacacacttgttcaggaccagagaatcctcactagagaaggactttttgagtgcagtaaatgtgggaaagcatgtacgcgaagatgtaacctcattcagcaccagaaagtccacagtgaagaaaggccttatgaatgcaatgaatgtggaaaattctttacctactactccagtttcattatacatcagagagttcatactggagaaaggccttatgcgtgccctgaatgtgggaaatcgtttagtcagatatacagcctcaatagccataggaaagttcacactggagaaaggccttatgaatgtggggaatgtgggaaatcttttagccaaaggtccaacctcatgcagcatcgcagagttcacactggagaaaggccttatgaatgcagcgaatgtgggaaatcttttagccaaaactttagcctgatctaccaccagagagttcacactggagaaagacctcatgagtgcaatgaatgtggaaaatcctttagccgaagctccagcctcattcaccaccggagacttcacactggagaaagaccctatgagtgcagtaaatgtgggaagtcatttaagcaaagctccagcttcagttcacatcggaaagtccacacaggggaaaggccttatgtgtgtggggaatgtgggaaatcctttagccatagctccaaccttaagaaccaccagagagttcacactggagaaagacctgttgagtgcagtgaatgtagcaaatcctttagctgtaaatctaacctcattaaacacctgagagttcacactggagaaaggccttatgagtgcagtgaatgtgggaaatcctttagccaaagttctagcctcattcaacaccgcagagttcacacgggaaaaaggccttatcagtgcagtcaatgtgggaaatcctttggctgcaaatctgtcctcattcaacaccagagagttcacattggagaaaagcct

SEQ ID NO: 5064 - DNA, 1848 bp, Homo sapiens
  source 1..1848: mol_type = genomic DNA
atgctcgggttccccccgggtcgcccgcagctcccggtccagctccgcccacagactcggatggcgaccgcactgagggacccggcttcgggaagtgtgacctttgaagatgtggccgtgtacttctcctgggaggaatgggatctccttgatgaggctcagaaacacctgtacttcgatgtgatgctggagaactttgcacttacgtcctccctgggacttatatcatcctggtctcatgtagttgctcaactagggctaggggaagtgccctctgttcttcacaggatgttcatgactccagcctcagcaagatgggatcagagagggcctggcctacatgaatggcacttgggaaaaggcatgtcatcaggttgttggtgtggagtggaacatgaggaaacaccttctgaacagagaatttctggagaaagagtgccacagttcaggacttccaaagaaggttcatcttcccagaatgccgactcctgtgaaatatgttgcctggtcttgagagatattttgcacttggctgaacaccaaggaacaaactgcgggcagaaactacacacatgtggaaaacaattctacatcagtgcaaatcttcaacagcaccagaggcagcacattacagaggcacctttcagaagttatgtggacactgcctcgtttacacagagttgcatagtccatgtgtcggagaaaccctttacctgcagggagatcaggaaagacttcctggccaacatgaggtttctccatcaagacgccactcaaacaggggagaagccaaataacagtaacaagtgtgcggtggccttttacagtggaaaaagtcatcacaactggggaaaatgcagtaaagcctttagccacatagacacacttgttcaggaccagagaatcctcactagagaaggactttttgagtgcagtaaatgtgggaaagcatgtacgcgaagatgtaacctcattcagcaccagaaagtccacagtgaagaaaggccttatgaatgcaatgaatgtggaaaattctttacctactactccagtttcattatacatcagagagttcatactggagaaaggccttatgcgtgccctgaatgtgggaaatcgtttagtcagatatacagcctcaatagccataggaaagttcacactggagaaaggccttatgaatgtggggaatgtgggaaatcttttagccaaaggtccaacctcatgcagcatcgcagagttcacactggagaaaggccttatgaatgcagcgaatgtgggaaatcttttagccaaaactttagcctgatctaccaccagagagttcacactggagaaagacctcatgagtgcaatgaatgtggaaaatcctttagccgaagctccagcctcattcaccaccggagacttcacactggagaaagaccctatgagtgcagtaaatgtgggaagtcatttaagcaaagctccagcttcagttcacatcggaaagtccacacaggggaaaggccttatgtgtgtggggaatgtgggaaatcctttagccatagctccaaccttaagaaccaccagagagttcacactggagaaagacctgttgagtgcagtgaatgtagcaaatcctttagctgtaaatctaacctcattaaacacctgagagttcacactggagaaaggccttatgagtgcagtgaatgtgggaaatcctttagccaaagttctagcctcattcaacaccgcagagttcacacgggaaaaaggccttatcagtgcagtcaatgtgggaaatcctttggctgcaaatctgtcctcattcaacaccagagagttcacattggagaaaagcct

SEQ ID NO: 5065 - DNA, 1692 bp, Homo sapiens
  source 1..1692: mol_type = genomic DNA
atgctcgggttccccccgggtcgcccgcagctcccggtccagctccgcccacagactcggatggcgaccgcactgagggacccggcttcgggaagtgtgacctttgaagatgtggccgtgtacttctcctgggaggaatgggatctccttgatgaggctcagaaacacctgtacttcgatgtgatgctggagaactttgcacttacgtcctccctgggttgttggtgtggagtggaacatgaggaaacaccttctgaacagagaatttctggagaaagagtgccacagttcaggacttccaaagaaggttcatcttcccagaatgccgactcctgtgaaatatgttgcctggtcttgagagatattttgcacttggctgaacaccaaggaacaaactgcgggcagaaactacacacatgtggaaaacaattctacatcagtgcaaatcttcaacagcaccagaggcagcacattacagaggcacctttcagaagttatgtggacactgcctcgtttacacagagttgcatagtccatgtgtcggagaaaccctttacctgcagggagatcaggaaagacttcctggccaacatgaggtttctccatcaagacgccactcaaacaggggagaagccaaataacagtaacaagtgtgcggtggccttttacagtggaaaaagtcatcacaactggggaaaatgcagtaaagcctttagccacatagacacacttgttcaggaccagagaatcctcactagagaaggactttttgagtgcagtaaatgtgggaaagcatgtacgcgaagatgtaacctcattcagcaccagaaagtccacagtgaagaaaggccttatgaatgcaatgaatgtggaaaattctttacctactactccagtttcattatacatcagagagttcatactggagaaaggccttatgcgtgccctgaatgtgggaaatcgtttagtcagatatacagcctcaatagccataggaaagttcacactggagaaaggccttatgaatgtggggaatgtgggaaatcttttagccaaaggtccaacctcatgcagcatcgcagagttcacactggagaaaggccttatgaatgcagcgaatgtgggaaatcttttagccaaaactttagcctgatctaccaccagagagttcacactggagaaagacctcatgagtgcaatgaatgtggaaaatcctttagccgaagctccagcctcattcaccaccggagacttcacactggagaaagaccctatgagtgcagtaaatgtgggaagtcatttaagcaaagctccagcttcagttcacatcggaaagtccacacaggggaaaggccttatgtgtgtggggaatgtgggaaatcctttagccatagctccaaccttaagaaccaccagagagttcacactggagaaagacctgttgagtgcagtgaatgtagcaaatcctttagctgtaaatctaacctcattaaacacctgagagttcacactggagaaaggccttatgagtgcagtgaatgtgggaaatcctttagccaaagttctagcctcattcaacaccgcagagttcacacgggaaaaaggccttatcagtgcagtcaatgtgggaaatcctttggctgcaaatctgtcctcattcaacaccagagagttcacattggagaaaagcct

SEQ ID NO: 5066 - DNA, 1980 bp, Homo sapiens
  source 1..1980: mol_type = genomic DNA
atggcggcggccgcggcggcgctctcgggcgcgggcacgccacccgcgggcggcggggccgggggcggcggggccgggggcggcgggtccccgccgggcggctgggccgtggcgcgcctggagggccgcgagttcgagtatctgatgaagaagcgctcggtgaccatcggccgcaactcgtcgcagggctcggtggacgtgagcatgggccactcgagcttcatctcccggcgccacctcgagatcttcacgcccccgggcggcggcggccatggcggggccgctccggagctgccgcccgcgcagcccaggcccgacgccggcggcgacttctacctgcgctgcttgggcaagaacggggtattcgtggacggcgtgttccagaggcgcggggcgccgccgctgcagctgccgcgcgtgtgcacattcaggttcccgagcacaaacatcaagataacgttcactgccctgtccagcgagaagagagagaagcaggaggcgtctgagtctccagtgaaggccgtacagccacacatctcgcccctgaccatcaacattccagacaccatggcccacctcatcagccctctgccctcccccacgggaaccatcagcgctgcaaactcctgcccctccagcccccggggagcggggtcttcagggtacaaggtgggccgagtgatgccatctgacctcaatttaatggctgacaactcacagcctgaaaatgaaaaggaagcttcaggtggagacagcccgaaggatgattcaaagccgccttactcctacgcgcagctgatagttcaggcgattacgatggctcccgacaaacagctcaccctgaacgggatttatacacacatcactaaaaattatccctactacaggactgcggacaagggctggcagaattcaattcgccacaatctctctctgaatcgttatttcatcaaagtgccgcgttcccaggaagaaccaggcaaaggctcgttctggaggatagacccagcctctgaaagcaaattaatagaacaggcttttaggaaacgacggcctaggggcgtgccctgctttagaacccctctgggaccgctctcttctaggagtgccccagcctctcccaatcacgcgggagtgctgtctgctcactctagtggcgcccagacccctgagagcctgtcgagggaaggttcgccggcccccctggagcctgagcctggcgctgcacagcccaaactcgctgtcatccaggaagcccggtttgcccagagcgccccagggtcacctctgtccagtcagccagtcttaatcaccgtccagcggcagctaccacaggccatcaagcctgtcacctacactgtggccaccccagtgaccacctcgacctcccagccacccgtcgtgcagacggttcacgtcgtccaccagatcccagcggtgtcggtcaccagtgtggccggactggccccagcgaacacgtacactgtctctggacaagctgtggtcaccccggcagccgtgctggcccctcctaaggcagaggcccaggagaatggagaccacagggaagtcaaagtgaaagtagagcctattcccgccattggccacgccacgctcggcactgccagccggatcattcagacggcacagaccaccccggtccagacggtgaccatagtacaacaggcacctctaggtcaacaccagctaccaataaaaactgtaacacaaaacggcactcacgtggcatcagtccccactgcggtccacggccaggtgaacaatgccgcggcgagtcctttgcacatgttggcaacacacgcatccgcatcggcctccctgcccacaaagcgccacaacggtgaccagccggagcagccggagctgaagcggatcaagacagaagacggcgagggcatcgtcattgccctgagcgtggacacgccaccggcagccgtaagggaaaagggtgtccagaac

SEQ ID NO: 5067 - DNA, 2199 bp, Homo sapiens
  source 1..2199: mol_type = genomic DNA
atggccgaagtcggcgaggacagcggcgcccgcgccctgctcgcgctgcgctcggcgccctgcagcccagtgctgtgcgccgcagccgccgccgccgccttccccgcggccgcacccccgccggcccccgcgcagccccagcctccgcccgggccgccgccgccgccgccaccgccgctgcctccgggcgcgatcgcgggcgcgggctcctccgggggctcctccggggtatccggggactccgcggtcgcgggcgcggcgccggccctggtggccgcggcggccgcctcggtacggcagagcccggggccggcgctggcgcggctggagggccgcgagttcgagttcctcatgcgccagcccagcgtcaccatcggccgcaactcgtcgcagggctcggtggacttgagcatgggcctgtccagcttcatctcgcggcgccacctgcagctcagcttccaggagccgcacttctacctgcgctgcctcggcaagaacggcgtcttcgtggacggggccttccagagacgcggcgcgcccgccctgcagctgcccaagcagtgtaccttccggtttcccagcacggccatcaagatccagttcacgtcgctctatcacaaagaagaggccccagcctccccgctgcggccactgtacccccagatctcccctctgaagatccacatcccggagccggacctccggagcatggtcagccccgtcccctccccgacgggcaccatcagtgtccccaactcctgcccagccagtccacgcggtgccggctcctccagttaccgctttgtgcagaacgtgacctcggacctgcagctggcagcagagtttgcagcaaaggccgcgtcggagcagcaggcagacacgtctggaggagacagccccaaggatgagtcaaagccgccgttctcctacgcgcagctgatcgtgcaggccatctcctccgcccaggaccggcagctgaccctgagcgggatctacgcccacatcaccaagcattacccctactaccggacggccgacaaaggctggcagaattctatccggcacaacctctctttgaaccgttactttatcaaagtcccacgttcccaggaggagcctgggaaggggtccttttggcgaatagaccctgcctctgaagccaagctcgtggaacaggcattccggaaacggaggcagaggggtgtctcctgcttccgcacccccttcgggcctctgtcctcaaggagcgctccagcttcgcccacacaccccgggctgatgtcccctcgctccggcggcctgcagaccccagagtgcctgtctcgggagggctcccccattccacacgaccctgagtttgggtccaagttagcttctgtcccagagtaccggtattcccaaagcgcacccggctcccccgtcagcgcccagccagtgatcatggccgtgcctccccgaccgtccagcctcgtggccaagcccgtggcctacatgcccgcctccatcgtaacctcacagcagcccgcgggccacgccatccacgtcgtgcagcaggcccccaccgtcaccatggtcagggtggtcaccacatctgccaactcggccaacggatacatcctcaccagccagggcgcggcggggggctcccatgatgcggcgggcgcagccgtgctggacctgggcagcgaggccagaggcctggaggagaaacccaccattgcgtttgccacaatccccgcggctggtggagtcatccagacggtggccagccagatggcccccggggtccccggacacacggtcaccatcctgcagcccgccacacccgtgaccctcgggcagcaccaccttccagtccgggccgtgacccagaacggaaagcatgcggttcccacgaacagtttagccggcaacgcttacgccctcaccagccctttgcagctccttgcgacccaagcgagttcatccgcgccggtggtggtcacccgggtgtgcgaggtggggcccaaggagccagcagcagccgtcgcggccacggccaccaccaccccagccactgccaccaccgcctctgcctccgcctcttccactggagagcccgaggtcaaaaggtcccgggtggaggagcccagtggtgctgtaaccacaccggctggagtgatcgcagctgccggcccccaggggccaggcaccggggag

SEQ ID NO: 5068 - DNA, 2601 bp, Homo sapiens
  source 1..2601: mol_type = genomic DNA
atggagaccaaaggctaccacagtctccctgaaggtctagatatggaaagacggtggggtcaagtttctcaggctgtggagcgttcttccctgggacctacagagaggaccgatgagaataactacatggagattgtcaacgtaagctgtgtttccggtgctattccaaacaacagtactcaaggaagcagcaaagaaaaacaagaactactcccttgccttcagcaagacaataatcggcctgggattttaacatctgatattaaaactgagctggaatctaaggaactttcagcaactgtagctgagtccatgggtttatatatggattctgtaagagatgctgactattcctatgagcagcagaaccaacaaggaagcatgagtccagctaagatttatcagaatgttgaacagctggtgaaattttacaaaggaaatggccatcgtccttccactctaagttgtgtgaacacgcccttgagatcatttatgtctgactctgggagctccgtgaatggtggcgtcatgcgcgccgttgttaaaagccctatcatgtgtcatgagaaaagcccgtctgtttgcagccctctgaacatgacatcttcggtttgcagccctgctggaatcaactctgtgtcctccaccacagccagctttggcagttttccagtgcacagcccaatcacccagggaactcctctgacatgctcccctaatgttgaaaatcgaggctccaggtcgcacagccctgcacatgctagcaatgtgggctctcctctctcaagtccgttaagtagcatgaaatcctcaatttccagccctccaagtcactgcagtgtaaaatctccagtctccagtcccaataatgtcactctgagatcctctgtgtctagccctgcaaatattaacaactcaaggtgctctgtttccagcccttcgaacactaataacagatccacgctttccagtccggcagccagtactgtgggatctatctgtagccctgtaaacaatgccttcagctacactgcttctggcacctctgctggatccagtacattgcgggatgtggttcccagtccagacacgcaggagaaaggtgctcaagaggtcccttttcctaagactgaggaagtagagagtgccatctcaaatggtgtgactggccagcttaatattgtccagtacataaaaccagaaccagatggagcttttagcagctcatgtctaggaggaaatagcaaaataaattcggattcttcattctcagtaccaataaagcaagaatcaaccaagcattcatgttcaggcacctcttttaaagggaatccaacagtaaacccgtttccatttatggatggctcgtatttttcctttatggatgataaagactattattccctatcaggaattttaggaccacctgtgcccggctttgatggtaactgtgaaggcagcggattcccagtgggtattaaacaagaaccagatgatgggagctattacccagaggccagcatcccttcctctgctattgttggggtgaattcaggtggacagtccttccactacaggattggtgctcaaggtacaatatctttatcacgatcggctagagaccaatctttccaacacctgagttcctttcctcctgtcaatactttagtggagtcatggaaatcacacggcgacctgtcgtctagaagaagtgatgggtatccggtcttagaatacattccagaaaatgtatcaagctctactttacgaagtgtttctactggatcttcaagaccttcaaaaatatgtttggtgtgtggggatgaggcttcaggatgccattatggggtagtcacctgtggcagctgcaaagttttcttcaaaagagcagtggaagggcaacacaactatttatgtgctggaagaaatgattgcatcattgataagattcgacgaaagaattgtcctgcttgcagacttcagaaatgtcttcaagctggaatgaatttaggaggatttaaaaacttgcctcttgaggaccaaattaccctaatccagtattcttggatgtgtctatcatcatttgccttgagctggagatcgtacaaacatacgaacagccaatttctctattttgcaccagacctagtctttaatgaagagaagatgcatcagtctgccatgtatgaactatgccaggggatgcaccaaatcagccttcagttcgttcgactgcagctcacctttgaagaatacaccatcatgaaagttttgctgctactaagcacaattccaaaggatggcctcaaaagccaggctgcatttgaagaaatgaggacaaattacatcaaagaactgaggaagatggtaactaagtgtcccaacaattctgggcagagctggcagaggttctaccaactgaccaagctgctggactccatgcatgacctggtgagcgacctgctggaattctgcttctacaccttccgagagtcccatgcgctgaaggtagagttccccgcaatgctggtggagatcatcagcgaccagctgcccaaggtggagtcggggaacgccaagccgctctacttccaccggaag

SEQ ID NO: 5069 - DNA, 2964 bp, Homo sapiens
  source 1..2964: mol_type = genomic DNA
atggagaccaaaggctaccacagtctccctgaaggtctagatatggaaagacggtggggtcaagtttctcaggctgtggagcgttcttccctgggacctacagagaggaccgatgagaataactacatggagattgtcaacgtaagctgtgtttccggtgctattccaaacaacagtactcaaggaagcagcaaagaaaaacaagaactactcccttgccttcagcaagacaataatcggcctgggattttaacatctgatattaaaactgagctggaatctaaggaactttcagcaactgtagctgagtccatgggtttatatatggattctgtaagagatgctgactattcctatgagcagcagaaccaacaaggaagcatgagtccagctaagatttatcagaatgttgaacagctggtgaaattttacaaaggaaatggccatcgtccttccactctaagttgtgtgaacacgcccttgagatcatttatgtctgactctgggagctccgtgaatggtggcgtcatgcgcgccgttgttaaaagccctatcatgtgtcatgagaaaagcccgtctgtttgcagccctctgaacatgacatcttcggtttgcagccctgctggaatcaactctgtgtcctccaccacagccagctttggcagttttccagtgcacagcccaatcacccagggaactcctctgacatgctcccctaatgttgaaaatcgaggctccaggtcgcacagccctgcacatgctagcaatgtgggctctcctctctcaagtccgttaagtagcatgaaatcctcaatttccagccctccaagtcactgcagtgtaaaatctccagtctccagtcccaataatgtcactctgagatcctctgtgtctagccctgcaaatattaacaactcaaggtgctctgtttccagcccttcgaacactaataacagatccacgctttccagtccggcagccagtactgtgggatctatctgtagccctgtaaacaatgccttcagctacactgcttctggcacctctgctggatccagtacattgcgggatgtggttcccagtccagacacgcaggagaaaggtgctcaagaggtcccttttcctaagactgaggaagtagagagtgccatctcaaatggtgtgactggccagcttaatattgtccagtacataaaaccagaaccagatggagcttttagcagctcatgtctaggaggaaatagcaaaataaattcggattcttcattctcagtaccaataaagcaagaatcaaccaagcattcatgttcaggcacctcttttaaagggaatccaacagtaaacccgtttccatttatggatggctcgtatttttcctttatggatgataaagactattattccctatcaggaattttaggaccacctgtgcccggctttgatggtaactgtgaaggcagcggattcccagtgggtattaaacaagaaccagatgatgggagctattacccagaggccagcatcccttcctctgctattgttggggtgaattcaggtggacagtccttccactacaggattggtgctcaaggtacaatatctttatcacgatcggctagagaccaatctttccaacacctgagttcctttcctcctgtcaatactttagtggagtcatggaaatcacacggcgacctgtcgtctagaagaagtgatgggtatccggtcttagaatacattccagaaaatgtatcaagctctactttacgaagtgtttctactggatcttcaagaccttcaaaaatatgtttggtgtgtggggatgaggcttcaggatgccattatggggtagtcacctgtggcagctgcaaagttttcttcaaaagagcagtggaaggtaaatgttcatggcaacacaactatttatgtgctggaagaaatgattgcatcattgataagattcgacgaaagaattgtcctgcttgcagacttcagaaatgtcttcaagctggaatgaatttaggagcacgaaagtcaaagaagttgggaaagttaaaagggattcacgaggagcagccacagcagcagcagcccccacccccacccccacccccgcaaagcccagaggaagggacaacgtacatcgctcctgcaaaagaaccctcggtcaacacagcactggttcctcagctctccacaatctcacgagcgctcacaccttcccccgttatggtccttgaaaacattgaacctgaaattgtatatgcaggctatgacagctcaaaaccagatacagccgaaaatctgctctccacgctcaaccgcttagcaggcaaacagatgatccaagtcgtgaagtgggcaaaggtacttccaggatttaaaaacttgcctcttgaggaccaaattaccctaatccagtattcttggatgtgtctatcatcatttgccttgagctggagatcgtacaaacatacgaacagccaatttctctattttgcaccagacctagtctttaatgaagagaagatgcatcagtctgccatgtatgaactatgccaggggatgcaccaaatcagccttcagttcgttcgactgcagctcacctttgaagaatacaccatcatgaaagttttgctgctactaagcacaattccaaaggatggcctcaaaagccaggctgcatttgaagaaatgaggacaaattacatcaaagaactgaggaagatggtaactaagtgtcccaacaattctgggcagagctggcagaggttctaccaactgaccaagctgctggactccatgcatgacctggtgagcgacctgctggaattctgcttctacaccttccgagagtcccatgcgctgaaggtagagttccccgcaatgctggtggagatcatcagcgaccagctgcccaaggtggagtcggggaacgccaagccgctctacttccaccggaag

SEQ ID NO: 5070 - DNA, 810 bp, Homo sapiens
  source 1..810: mol_type = genomic DNA
atggacctgcagaatgacctaggccagacagccctgcacctggcagccatcctgggggagacatccacggtggagaagctgtacgcagcaggcgccgggctgtgtgtggcggagcgtaggggccacacggcgctgcacctggcctgccgtgtgggggcacacgcctgtgcccgtgccctgcttcagccccgcccccggcgccccagggaagcccccgacacctacctcgctcagggccctgaccgtactcccgacaccaaccatacccctgtcgccttgtaccccgattccgacttggagaaggaagaagaggagagtgaggaggactggaagctgcagctggaggctgaaaactacgagggccacaccccactccacgtggccgttatccacaaagatgtggagatggtccggctgctccgagatgctggagctgaccttgacaaaccggagcccacgtgcggccggagcccccttcatttggcagtggaggcccaggcagccgatgtgctggagcttctcctgagggcaggcgcgaaccctgctgcccgcatgtacggtggccgcaccccactcggcagtgccatgctccggcccaaccccatcctcgcccgcctcctccgtgcacacggagcccctgagcccgagggcgaggacgagaaatccggcccctgcagcagcagtagcgacagcgacagcggagacgagggcgatgaatacgacgacattgtggttcacagcagccgcagccaaacccggctgcctcccaccccagcctcaaaacctcttcctgacgacccccgccccgtg

SEQ ID NO: 5071 - DNA, 2166 bp, Homo sapiens
  source 1..2166: mol_type = genomic DNA
atggagggctcacgtccccgcgccccgagcggccacttagcgccgtcgccgccggctttcgacggcgagctggatctgcagcgatactccaacgggccagccgtgagcgcagggtcgctcgggatgggagcggtgagctggtctgagagtcgtgcaggcgaacggcgcttcccctgccctgtatgcgggaagcgcttccgcttcaactctatccttgctttgcacctgcgggcgcacccaggagcccaggccttccagtgccctcactgcggccaccgcgcggcgcagcgggctctgctgcgctcgcacctgcgcacacaccagcccgagcgcccacgtagtcctgctgcacgcctgttgctggagttggaagagcgcgcgctactacgcgaggcccgactggggagagcccgaagctcagggggcatgcaggccacccctgccactgagggtctggcgcggccccaggctccttcatcgtccgccttccgttgcccctactgcaaaggcaagtttcgcacctcggcggagcgcgaacgccacctgcacatcctgcataggccctggaagtgcggcctgtgcagtttcggctccagccaggaggaggagctgctgcaccacagcctgacggcccacggggctcccgagcgtcccctggcggccacctccgctgcgcctccgcctcagcctcagcctcagcctccaccccagcccgaacccagatcagtcccccagccggagccggagccggagcccgaacgtgaggcaaccccgaccccagctcctgccgctcccgaggagcccccagcgcctccggagttccgctgccaagtgtgcggccagagctttacacagtcttggtttctcaagggccacatgcgtaagcacaaggcctccttcgatcatgcgtgtccggtgtgcggccgctgcttcaaggagccctggttccttaagaaccacatgaaggtgcacgccagcaagctgggcccactgcgtgccccggggcctgcctccgggcctgcccgcgccccccagcctcctgacctcggcctgctggcctatgagccgttgggcccagcgctcctcttggccccggctcccaccccggccgagcgccgtgagcccccgagcctcttgggctacctgagcctgcgagctggcgagggccggcccaacggcgagggtgctgagcccggtcccggccgcagcttcggaggcttccgcccgctgtcctctgctctcccggcccgggctcgccggcaccgtgcggaggagcctgaggaagaagaggaggtggtggaggccgaggaggaaacctgggcccggggcaggtcgctgggctctctggcttccctgcacccgcgcccgggtgagggaccggggcactctgcctctgctgctggggcccaggcaagatcgaccgccacgcaggaagagaatgggctgttggttggagggacccggcctgaagggggccggggcgccaccggcaaggattgtcctttctgcggaaaatctttccgctcagcacatcacctcaaagtgcatctgcgagtgcacacaggcgagcggccctacaagtgtccgcactgcgactacgcgggcacccagtccggctcgctcaagtatcacctacagcgccaccaccgggagcagaggagcggggccggccccgggccacccccggagccaccgcctccttcccagcggggttcggccccgcaatctggagccaagccgtctccgcagcctgcgacctgggtggagggcgcctcaagtccccggcctccttctagcggtgctgggccggggtcccgtcggaagcccgccagccctgggaggaccctgcgcaacgggcgaggcggtgaggccgaacccctggacctgtccttgcgggcagggccgggaggcgaggccgggcctgggggtgccctccaccgctgcctcttctgcccgttcgccactggagccccagagctcatggccttgcaccttcaagtgcaccacagccgccgggctaggggccgccggccaccccaggctgacgcgtccccgccctatgcccgagtaccatcaggagagacccctcccagtccttcgcaggaaggggaggagggctccgggctgtccagacccggagaggcagggctgggggggcaagaacgg

SEQ ID NO: 5072 - DNA, 2334 bp, Homo sapiens
  source 1..2334: mol_type = genomic DNA
atggactccaaagaatcattaactcctggtagagaagaaaaccccagcagtgtgcttgctcaggagaggggagatgtgatggacttctataaaaccctaagaggaggagctactgtgaaggtttctgcgtcttcaccctcactggctgtcgcttctcaatcagactccaagcagcgaagacttttggttgattttccaaaaggctcagtaagcaatgcgcagcagccagatctgtccaaagcagtttcactctcaatgggactgtatatgggagagacagaaacaaaagtgatgggaaatgacctgggattcccacagcagggccaaatcagcctttcctcgggggaaacagacttaaagcttttggaagaaagcattgcaaacctcaataggtcgaccagtgttccagagaaccccaagagttcagcatccactgctgtgtctgctgcccccacagagaaggagtttccaaaaactcactctgatgtatcttcagaacagcaacatttgaagggccagactggcaccaacggtggcaatgtgaaattgtataccacagaccaaagcacctttgacattttgcaggatttggagttttcttctgggtccccaggtaaagagacgaatgagagtccttggagatcagacctgttgatagatgaaaactgtttgctttctcctctggcgggagaagacgattcattccttttggaaggaaactcgaatgaggactgcaagcctctcattttaccggacactaaacccaaaattaaggataatggagatctggttttgtcaagccccagtaatgtaacactgccccaagtgaaaacagaaaaagaagatttcatcgaactctgcacccctggggtaattaagcaagagaaactgggcacagtttactgtcaggcaagctttcctggagcaaatataattggtaataaaatgtctgccatttctgttcatggtgtgagtacctctggaggacagatgtaccactatgacatgaatacagcatccctttctcaacagcaggatcagaagcctatttttaatgtcattccaccaattcccgttggttccgaaaattggaataggtgccaaggatctggagatgacaacttgacttctctggggactctgaacttccctggtcgaacagttttttctaatggctattcaagccccagcatgagaccagatgtaagctctcctccatccagctcctcaacagcaacaacaggaccacctcccaaactctgcctggtgtgctctgatgaagcttcaggatgtcattatggagtcttaacttgtggaagctgtaaagttttcttcaaaagagcagtggaaggtagacagcacaattacctatgtgctggaaggaatgattgcatcatcgataaaattcgaagaaaaaactgcccagcatgccgctatcgaaaatgtcttcaggctggaatgaacctggaagctcgaaaaacaaagaaaaaaataaaaggaattcagcaggccactacaggagtctcacaagaaacctctgaaaatcctggtaacaaaacaatagttcctgcaacgttaccacaactcacccctaccctggtgtcactgttggaggttattgaacctgaagtgttatatgcaggatatgatagctctgttccagactcaacttggaggatcatgactacgctcaacatgttaggagggcggcaagtgattgcagcagtgaaatgggcaaaggcaataccaggtttcaggaacttacacctggatgaccaaatgaccctactgcagtactcctggatgtttcttatggcatttgctctggggtggagatcatatagacaatcaagtgcaaacctgctgtgttttgctcctgatctgattattaatgagcagagaatgactctaccctgcatgtacgaccaatgtaaacacatgctgtatgtttcctctgagttacacaggcttcaggtatcttatgaagagtatctctgtatgaaaaccttactgcttctctcttcagttcctaaggacggtctgaagagccaagagctatttgatgaaattagaatgacctacatcaaagagctaggaaaagccattgtcaagagggaaggaaactccagccagaactggcagcggttttatcaactgacaaaactcttggattctatgcatgaagtggttgaaaatctccttaactattgcttccaaacatttttggataagaccatgagtattgaattccccgagatgttagctgaaatcatcaccaatcagataccaaaatattcaaatggaaatatcaaaaaacttctgtttcatcaaaag

SEQ ID NO: 5073 - DNA, 2226 bp, Homo sapiens
  source 1..2226: mol_type = genomic DNA
atggactccaaagaatcattaactcctggtagagaagaaaaccccagcagtgtgcttgctcaggagaggggagatgtgatggacttctataaaaccctaagaggaggagctactgtgaaggtttctgcgtcttcaccctcactggctgtcgcttctcaatcagactccaagcagcgaagacttttggttgattttccaaaaggctcagtaagcaatgcgcagcagccagatctgtccaaagcagtttcactctcaatgggactgtatatgggagagacagaaacaaaagtgatgggaaatgacctgggattcccacagcagggccaaatcagcctttcctcgggggaaacagacttaaagcttttggaagaaagcattgcaaacctcaataggtcgaccagtgttccagagaaccccaagagttcagcatccactgctgtgtctgctgcccccacagagaaggagtttccaaaaactcactctgatgtatcttcagaacagcaacatttgaagggccagactggcaccaacggtggcaatgtgaaattgtataccacagaccaaagcacctttgacattttgcaggatttggagttttcttctgggtccccaggtaaagagacgaatgagagtccttggagatcagacctgttgatagatgaaaactgtttgctttctcctctggcgggagaagacgattcattccttttggaaggaaactcgaatgaggactgcaagcctctcattttaccggacactaaacccaaaattaaggataatggagatctggttttgtcaagccccagtaatgtaacactgccccaagtgaaaacagaaaaagaagatttcatcgaactctgcacccctggggtaattaagcaagagaaactgggcacagtttactgtcaggcaagctttcctggagcaaatataattggtaataaaatgtctgccatttctgttcatggtgtgagtacctctggaggacagatgtaccactatgacatgaatacagcatccctttctcaacagcaggatcagaagcctatttttaatgtcattccaccaattcccgttggttccgaaaattggaataggtgccaaggatctggagatgacaacttgacttctctggggactctgaacttccctggtcgaacagttttttctaatggctattcaagccccagcatgagaccagatgtaagctctcctccatccagctcctcaacagcaacaacaggaccacctcccaaactctgcctggtgtgctctgatgaagcttcaggatgtcattatggagtcttaacttgtggaagctgtaaagttttcttcaaaagagcagtggaaggacagcacaattacctatgtgctggaaggaatgattgcatcatcgataaaattcgaagaaaaaactgcccagcatgccgctatcgaaaatgtcttcaggctggaatgaacctggaagctcgaaaaacaaagaaaaaaataaaaggaattcagcaggccactacaggagtctcacaagaaacctctgaaaatcctggtaacaaaacaatagttcctgcaacgttaccacaactcacccctaccctggtgtcactgttggaggttattgaacctgaagtgttatatgcaggatatgatagctctgttccagactcaacttggaggatcatgactacgctcaacatgttaggagggcggcaagtgattgcagcagtgaaatgggcaaaggcaataccaggtttcaggaacttacacctggatgaccaaatgaccctactgcagtactcctggatgtttcttatggcatttgctctggggtggagatcatatagacaatcaagtgcaaacctgctgtgttttgctcctgatctgattattaatgagcagagaatgactctaccctgcatgtacgaccaatgtaaacacatgctgtatgtttcctctgagttacacaggcttcaggtatcttatgaagagtatctctgtatgaaaaccttactgcttctctcttcagttcctaaggacggtctgaagagccaagagctatttgatgaaattagaatgacctacatcaaagagctaggaaaagccattgtcaagagggaaggaaactccagccagaactggcagcggttttatcaactgacaaaactcttggattctatgcatgaaaatgttatgtggttaaaaccagaaagcacatctcacacattaatc

SEQ ID NO: 5074 - DNA, 1395 bp, Homo sapiens
  source 1..1395: mol_type = genomic DNA
atgtgggtgtgtttgagagggatcctagacagccaagccttctggcatgaaacgctgagaagatgggagtgtctgctggcagagatgaaagtgagcaggggtgagcgcagccactgcccaacgcaaaccgtgaagaagcttctggaagagcagaggcgccgccagcagcagcagcccgacgctggcggggtgcagggacaatttctccctcccccagagcagcccctgaccccatctgtgaatgaggctgtgactggccaccctcccttcccagcacactcggagactgtgggttctggacctagcagcctgggctttccagactgggaccccaacacgcatgctgcctacactgacagcccctactcttgccctgcttctgctgccgaaaatttcctgcctcctgacttctacccaccctcggacccagggcagccgtgcccatttccccagggcatggaggctggaccctggagagtttctgcacccccttcaggacccccacagttccccgctgtggtccctggaccatcgctggaggtggcccgagctcacatgctggctttggggccacagcagctgctggcccaggatgaggagggggacacgctccttcacctgtttgcggctcgggggctgcgctgggcggcatatgctgcggctgaggtgctccaggtgtaccggcgtcttgacattcgtgagcataagggcaagacccctctcctggtggcggctgctgccaaccagcccctgattgtggaggatctgttgaacctgggagcagagcccaatgccgctgaccatcagggacgttcggtcttgcacgtggccgctacctacgggctcccaggagttctcttggctgtgcttaactctggggtccaggttgacctggaagccagagacttcgagggcctcaccccgctccacacggccatcctggcccttaacgttgctatgcgcccttccgacctctgtccccgggtgctgagcacacaggcccgagacaggctggattgtgtccacatgttgctgcaaatgggtgctaatcacaccagccaggagatcaagagcaacaagacagttctgcacttggccgtgcaggctgccaaccccactctggttcagctgctgctggagctgccccggggagacctgcggacctttgtcaacatgaaggcccacgggaacacagccctccacatggcggctgccctgccccctgggccggcccaggaggccatcgtgcggcacctgttggcagctggggcggaccccacactgcgcaacctggagaatgagcagcccgttcacctgctgcggcccgggccgggccctgaggggctccggcagctgttgaagaggagccgtgtggcgccgccaggcctgtcctct

SEQ ID NO: 5075 - DNA, 1500 bp, Homo sapiens
  source 1..1500: mol_type = genomic DNA
atgaatcaacgaaggagtgagtcaaggcccgggaaccacagactccaagcctacgcagagcccgggaagggggattccggaggggcggggcctctttccggaagcgcccgccgggggcggggagggggcggggccatccgcgtgaggcgaccctgttggtccggaggggcggggcgaggaggaggacccgcttgggcggttcggctgcccacagtaaccgctgggtggacctggccagcgctccgaaccttgtcctcgctgcgcgccggcccctcggagccccacagcccgggaaggaggccgccgcgggccgggcgcccgctctgccaagcggacccgcaacccggaaaggcggcgcggcggagcctggagccggatcctgctcagaccgggccccggccggccagagccgcgggcatgtcggaggcgcggaaggggccggacgaggcggaggagagccagtacgactctggcattgagtctctgcgctctctgcgctccctacccgagtccacctcggctccagcctccgggccctcggacggcagcccccagccctgcacccatcctccgggacccgtcaaggaaccacaggagaaggaagacgcggatggggagcgggctgattccacctatggctcctcctcgctcacctacaccctgtccttgctggggggccccgaggctgaggacccggccccacgcctgccactcccccacgtgggggcgctgagccctcagcagctggaagcactcacttacatctccgaggacggagacacgctggtccacctggcagtgattcatgaggccccagcggtgctgctctgttgcctggctttgctgccccaggaggtcctggacattcaaaataacctttaccagacagcactccatctggctgtacatctggaccaaccgggcgcagttcgggcactggtgctgaagggggccagccgggcactacaggaccggcatggtgacacagcccttcatgtggcctgccagcgccagcacttggcctgtgcccgctgcctgctggaagggcggccagagccaggcagaggaacatctcactctctggacctccagctgcaaaactggcaaggtctggcttgtctccacattgccacccttcagaagaaccaaccactcatggaattgctgcttcggaatggagctgacattgatgtgcaggagggcaccagtggtaagacagcgctgcacctggctgtggaaacccaagagcggggcctggtacagttcctgctccaggctggtgcccaggtagatgcccgcatgctgaacgggtgcacacccctgcacctggcagctggccggggtctcatgggcatctcatccactctgtgcaaggcgggtgctgactccctgctgcggaatgtggaggatgagacgccccaggacctgactgaggaatcccttgtccttttgccctttgatgacctgaagatctcagggaaactgctgctgtgtaccgac

SEQ ID NO: 5076 - DNA, 2154 bp, Homo sapiens
  source 1..2154: mol_type = genomic DNA
atgattgtggacaagctgctggacgacagccgcggcggagaggggctgcgggacgcggcgggcggctgcggcctcatgaccagcccgctcaacctgagctacttctacggcgcgtcgccgcccgccgccgccccgggcgcctgcgacgccagctgctcggtcttgggcccctcggcgcccggctcgcccggctccgactcctccgacttctcctctgcctcgtcggtgtcctcctgcggcgccgtggagtcccggtcgagaggcggcgcccgcgccgagcgccagccagttgagccccatatgggggttggcaggcagcagagaggcccctttcaaggtgttcgggtaaagaactcagtgaaggaactcctgttgcacatccgaagtcataaacagaaggcttctggccaagctgtggatgattttaagacacaaggtgtgaacatagaacagttcagagaattgaagaacacagtatcatacagtgggaaaaggaaagggcccgattcgttgtctgatggacctgcttgcaaaaggccagctctgttgcattcccaatttttgacaccacctcaaacaccaacgcccggggagagcatggaagatgttcatctcaatgaacccaaacaggagagcagtgctgatctgcttcagaacattatcaacattaagaatgaatgcagccccgtttccctgaacacagttcaagttagctggctgaaccccgtggtggtccctcagagctcccccgcagagcagtgtcaggacttccatggagggcaggtcttttctccacctcagaaatgccaaccattccaagtcaggggctcccaacaaatgatagaccaggcttccctgtaccagtattctccacagaaccagcatgtagagcagcagccacactacacccacaaaccaactctggaatacagtccttttcccatacctccccagtcccccgcttatgaaccaaacctctttgatggtccagaatcacagttttgcccaaaccaaagcttagtttcccttcttggtgatcaaagggaatctgagaatattgctaatcccatgcagacttcctccagtgttcagcagcaaaatgatgctcacttgcacagcttcagcatgatgcccagcagcgcctgtgaggccatggtggggcacgagatggcctctgactcttcaaacacttcactgccattctcaaacatgggaaatccaatgaacaccacacagttagggaaatcactttttcagtggcaggtggagcaggaagaaagcaaattggcaaatatttcccaagaccagtttctttcaaaggatgcagatggtgacacgttccttcatattgctgttgcccaagggagaagggcactttcctatgttcttgcaagaaagatgaatgcacttcacatgctggatattaaagagcacaatggacagagtgcctttcaggtggcagtggctgccaatcagcatctcattgtgcaggatctggtgaacatcggggcacaggtgaacaccacagactgctggggaagaacacctctgcatgtgtgtgctgagaagggccactcccaggtgcttcaggcgattcagaagggagcagtgggaagtaatcagtttgtggatcttgaggcaactaactatgatggcctgactccccttcactgtgcagtcatagcccacaatgctgtggtccatgaactccagagaaatcaacagcctcattcacctgaagttcaggagcttttactgaagaataagagtctggttgataccattaagtgcctaattcaaatgggagcagcggtggaagcgaaggatcgcaaaagtggccgcacagccctgcatttggcagctgaagaagcaaatctggaactcattcgcctctttttggagctgcccagttgcctgtcttttgtgaatgcaaaggcttacaatggcaacactgccctccatgttgctgccagcttgcagtatcggttgacacaattagatgctgtccgcctgttgatgaggaagggagcagacccaagtactcggaacttggagaacgaacagccagtgcatttggttcccgatggccctgtgggagaacagatccgacgtatcctgaagggaaagtccattcagcagagagctccaccgtat

SEQ ID NO: 5077 - DNA, 1854 bp, Homo sapiens
  source 1..1854: mol_type = genomic DNA
atgggggttggcaggcagcagagaggcccctttcaaggtgttcgggtaaagaactcagtgaaggaactcctgttgcacatccgaagtcataaacagaaggcttctggccaagctgtggatgattttaagacacaaggtgtgaacatagaacagttcagagaattgaagaacacagtatcatacagtgggaaaaggaaagggcccgattcgttgtctgatggacctgcttgcaaaaggccagctctgttgcattcccaatttttgacaccacctcaaacaccaacgcccggggagagcatggaagatgttcatctcaatgaacccaaacaggagagcagtgctgatctgcttcagaacattatcaacattaagaatgaatgcagccccgtttccctgaacacagttcaagttagctggctgaaccccgtggtggtccctcagagctcccccgcagagcagtgtcaggacttccatggagggcaggtcttttctccacctcagaaatgccaaccattccaagtcaggggctcccaacaaatgatagaccaggcttccctgtaccagtattctccacagaaccagcatgtagagcagcagccacactacacccacaaaccaactctggaatacagtccttttcccatacctccccagtcccccgcttatgaaccaaacctctttgatggtccagaatcacagttttgcccaaaccaaagcttagtttcccttcttggtgatcaaagggaatctgagaatattgctaatcccatgcagacttcctccagtgttcagcagcaaaatgatgctcacttgcacagcttcagcatgatgcccagcagcgcctgtgaggccatggtggggcacgagatggcctctgactcttcaaacacttcactgccattctcaaacatgggaaatccaatgaacaccacacagttagggaaatcactttttcagtggcaggtggagcaggaagaaagcaaattggcaaatatttcccaagaccagtttctttcaaaggatgcagatggtgacacgttccttcatattgctgttgcccaagggagaagggcactttcctatgttcttgcaagaaagatgaatgcacttcacatgctggatattaaagagcacaatggacagagtgcctttcaggtggcagtggctgccaatcagcatctcattgtgcaggatctggtgaacatcggggcacaggtgaacaccacagactgctggggaagaacacctctgcatgtgtgtgctgagaagggccactcccaggtgcttcaggcgattcagaagggagcagtgggaagtaatcagtttgtggatcttgaggcaactaactatgatggcctgactccccttcactgtgcagtcatagcccacaatgctgtggtccatgaactccagagaaatcaacagcctcattcacctgaagttcaggagcttttactgaagaataagagtctggttgataccattaagtgcctaattcaaatgggagcagcggtggaagcgaaggatcgcaaaagtggccgcacagccctgcatttggcagctgaagaagcaaatctggaactcattcgcctctttttggagctgcccagttgcctgtcttttgtgaatgcaaaggcttacaatggcaacactgccctccatgttgctgccagcttgcagtatcggttgacacaattagatgctgtccgcctgttgatgaggaagggagcagacccaagtactcggaacttggagaacgaacagccagtgcatttggttcccgatggccctgtgggagaacagatccgacgtatcctgaagggaaagtccattcagcagagagctccaccgtat

SEQ ID NO: 5078 - DNA, 9369 bp, Homo sapiens
  source 1..9369: mol_type = genomic DNA
atgcaccatggcactggcccccagaacgtccagcatcagctgcagaggtccagggcctgccctggcagcgagggtgaggagcagccggcccaccccaacccacccccgtcccccgcagctcccttcgctccctcagcaagcccgtcggcaccccagtctcccagttatcaaatacagcagctgatgaataggagccctgcaaccgggcagaacgtgaacatcaccctgcagagcgtgggccctgtcgtcgggggaaaccagcagatcacactggccccactgccgctccccagccccacctctccaggcttccagttcagcgctcagcctcggcggtttgagcatgggtctccatcatacattcaggtcacgtcccccttgtcccagcaggtccagacccagagtcccacgcagcccagtccggggccggggcaggccttgcagaatgtgcgtgcaggtgcccctggccctgggctgggcctctgcagcagcagccctacagggggcttcgtggatgccagcgtgctggtgaggcagatcagcttgagcccctccagtggtggacactttgtgtttcaggatgggtcagggctcacccagatcgcccagggagcccaggttcagctccagcacccgggtacgcccatcacagtccgagagcggagaccctcccagccccacacacagtcagggggcaccatccaccacctgggaccccagagccctgcagccgcgggtggggccggcctgcagcccctggccagcccaagccacatcaccacggctaacttgccaccgcagatcagcagcatcatccagggccagctggttcagcagcagcaggtgctgcaggggccgccgctgccccggcccctgggcttcgagaggacacccggcgtgctgctccccggggctgggggcgcagcggggtttgggatgacgtccccacccccgcccaccagcccttccaggactgccgtgcccccaggcctttccagcctcccactcacgtctgtggggaacacgggaatgaagaaggttcccaagaagttagaggagattcccccagcctctccggagatggcacagatgaggaagcagtgcctggactatcattaccaggagatgcaggctctgaaggaggtcttcaaggagtatttgattgaactgtttttcttgcaacactttcaagggaacatgatggatttcttagctttcaagaagaaacattatgccccattacaagcatatcttaggcagaatgatttggacattgaagaagaggaggaggaggaggaagaggaggaagaaaaatctgaggttatcaatgacgagcagcaagccctcgcagggagcctggtagcaggggccggaagcacagtagagacggacctgtttaagaggcagcaggcgatgccctccacaggtatggcagagcagtctaagaggcctcgccttgaagtgggtcaccaaggggtagttttccagcacccaggggcggacgcaggcgttcctctccagcaactaatgccgaccgcacaaggaggaatgccccccacgccgcaggccgcgcagctcgctggacagaggcagagtcagcagcagtatgacccctccacggggcctcccgtgcagaacgctgccagcttgcacaccccactgccgcagctgcccgggaggctgcccccagccggtgttcccactgcagccctctcctctgcgctgcagtttgcacagcagccgcaagtggtagaggcccagacacagctccaaatcccggtgaagactcagcagcccaatgttcccatccctgcaccgcccagcagccaactccccatccctccctcgcagcctgcacagctggccctccacgttcccacacctggaaaggtgcaggtgcaggcctctcagctttcctccctgccacagatggtagcatcgacaaggctccctgtggaccctgccccgccctgcccacggcctctgcccacctcttctacctcgtccctcgcgcctgtgagtggctccggcccaggaccctcccctgctcgatcctctccagtaaatagaccttcctcagccaccaataaggcactatctccagtcacttcccggaccccaggggtggtggcatctgcccccaccaaaccacagagtcctgctcagaatgccacctcgtcccaagacagttctcaggatacgctgacagaacaaataactctggagaaccaggtgcatcagcgcattgcggagctgaggaaagcaggtctgtggtcccagaggcgtctgccaaagctgcaggaggccccacgccccaagtcccactgggactatctgctggaggagatgcagtggatggccacagactttgcccaggagaggaggtggaaggtggctgctgcgaagaagctcgttagaactgtggtgcgccatcacgaggagaagcagctccgtgaagaaagggggaagaaggaagagcagagcagactgaggcggatagccgcctccacggcccgggagatagagtgcttttggtcgaatattgaacaggttgtggaaataaaactacgagtagaattagaagaaaaaaggaagaaggccttaaatttacagaaagtttccaggagagggaaagaattgagacctaaaggatttgacgcattacaggaaagttctctggattcaggaatgtctggaagaaaaagaaaagctagcatatctttgactgatgacgaagtggacgatgaagaggaaacaattgaagaggaggaagcaaatgaaggcgttgtggaccaccaaacagaactttctaatttagccaaggaagctgagctgcccctcctggacctgatgaagctgtacgaaggcgccttcctgccgagttctcagtggccccggccgaagcctgatggggaggacacaagcggagaggaagatgcagatgactgtccaggcgacagggagagtcgcaaggacttggttctcatcgactcgcttttcatcatggatcagttcaaagctgccgagaggatgaatatcgggaagccaaacgccaaggacattgcggacgtcactgcggtggctgaagccatcctgccgaagggcagtgctcgggtcacaacctcggtcaagtttaatgctccatctttgttgtatggggctctcagagattatcagaagattggcctggactggctggccaaactttacaggaagaatctcaatggcatattggcagatgaagctgggctgggtaaaacagtgcagatcattgctttttttgcccacctagcttgtaacgaaggtaattggggcccccatcttgttgttgtgagaagttgtaacatactcaagtgggagcttgaattgaaacgttggtgtcccggactcaaaatcctctcatatattggcagccacagagaactcaaagcaaagagacaggagtgggccgaacccaacagcttccacgtctgcatcacgtcctacactcagttcttccggggcctcaccgccttcacacgagtgcgctggaagtgcctggtcattgatgagatgcagcgcgtgaagggcatgaccgagaggcactgggaagcggttttcaccctgcagagccaacaacgtctgcttctgatcgactcgccgctgcacaataccttcctggagctctggaccatggtgcacttcctggtcccagggatctccaggccctacctgagctcccctctgagggcccccagtgaagagagccaggattactaccataaagtggtcataaggttacacagggtgacacagccatttattttgaggagaactaagagagatgtggaaaagcaactaacaaagaaatatgagcatgttttgaagtgtcgcctttctaaccgacaaaaagccttatacgaggacgttatcctgcaacctggcactcaggaggccttgaagagcgggcactttgtcaacgtcctgagcatccttgtgcggctgcagcgcatctgcaaccaccctgggctcgtcgagccccggcacccaggctcttcctacgtggcggggccactggagtatccgtccgcatctctaatcctgaaggcactggagagagatttctggaaggaagcagatctttctatgtttgatctcatcggcttagaaaataaaatcactcgtcacgaggcagagttgctgtctaagaaaaagataccgcggaaactcatggaggaaatctccacttcagcagccccagcagcccgaccagcagcagcaaagctgaaggccagcaggttgtttcagcctgtgcagtatggccagaagcccgagggtcgcaccgtggctttccccagcactcacccgccccggacggcagcccccaccacggcctctgctgctccacagggcccgcttcgaggacggccgcccatcgccacgttctctgccaatccggaggcaaaagcagcagcagccccgtttcagacctctcaggcttccgccagtgctccacgacaccagcccgcctcggcctccagcacagccgctagcccggcccatcctgcgaaactgcgggcccagaccacagcacaggcctccaccccaggccagcccccgccccagccccaggccccctcgcacgcggccgggcagagcgcgctgcctcagaggctggtgctcccctcgcaggcccaggcccgcttgcccagtggagaggtagtgaaaatagctcagctggcatccatcacaggaccacagagccgcgtggctcagccagagacgccggtgacactgcagttccagggcagcaagttcaccctgtcacacagccagctccggcagctcacagcgggccagccgctgcagctgcaaggcagcgtcctccagatcgtgtccgcccccgggcagccctaccttcgagcccctggccctgtggtgatgcagaccgtgtctcaggcgggcgctgtgcacggcgccctgggaagcaagcccccggccggcggtcccagccctgcacccttgaccccacaagttggcgttccgggccgcgtggcggtgaatgccttggctgtaggagaacccggaacggcctccaaaccagcttctcccattggagggccgacccaggaggaaaagaccagactcttgaaagagcgcctggatcagatttatttagtcaacgagcggcgctgttctcaagctccagtctatggcagagacttgctaaggatttgtgccctgcctagccatggaagggtacagtggcgtgggtccctggatggccgtcgtgggaaggaggccgggccagcgcacagttacacttcatcctcagaaagtccaagtgagctgatgttgacgctttgtcggtgtggagagtctctgcaggatgttattgacagggtggcctttgtgattcctccggtggtggcagcacccccgtccctacgggtgccgcggccgccacccctgtacagccacagaatgaggatcttgaggcagggcctgagagagcacgctgcgccgtacttccagcagctgcggcagaccacggctccacgcctgctgcagttccctgagctgaggctggtgcagttcgactcagggaagttggaagctttagctatcttgcttcagaaattgaaatctgaaggacgtcgggtgctgattttatcacagatgattcttatgttggacattttagagatgttcttgaacttccattacctcacctatgtaagaatcgatgaaaatgccagcagtgagcaacggcaggaactgatgaggagtttcaacagagacaggcggattttttgtgccattctctccactcacagccgtaccacaggtataaaccttgtagaggcggacaccgtcgtgttttatgacaatgacctgaatccagtgatggatgccaaagctcaggagtggtgcgataggatcgggagatgcaaagacatccacatatacaggcttgtgagtggcaattccattgaagagaaattgttgaaaaatggaactaaagatctgatccgagaagtggctgctcagggaaatgactactccatggctttcttaactcagcgaaccatccaggagctgtttgaagtttattctcccatggatgatgctggcttcccggtcaaagctgaggagtttgtggtgctttctcaggaaccttctgtcacggaaaccattgcacccaaaattgcaagacctttcatagaggccctcaagagtattgagtatctggaggaggatgcccagaagtccgcacaggagggggtgctgggaccacacactgatgctctgtcatcagactctgagaacatgccgtgtgatgaagaaccatcccaattagaggagctagctgacttcatggagcagcttacaccaattgaaaaatatgctttaaattacctggaattattccatacttctattgagcaagaaaaggagagaaacagtgaggacgcagtgatgactgcagtgagggcatgggagttctggaacctgaagaccctgcaggagagggaggcccggctgcggctggagcaggaggaggcggagctcctgacctacacgcgagaggatgcctacagcatggagtatgtctacgaagatgtcgatgggcagacagaagtcatgccgctctggaccccacccaccccgccgcaggacgacagcgacatctacctcgactcggtcatgtgtctcatgtatgaagccactcccatcccagaggctaagctgccccctgtgtacgtgaggaaggagcggaagcgacacaaaacagacccctcagctgcaggcaggaagaagaagcagcgtcacggggaggcggtcgtccctcctcggtccctgtttgaccgcgcaacaccaggacttctgaaaattcgcagagagggcaaggagcagaagaagaatattctgctgaagcagcaggtgccattcgccaagcccctgccaacttttgccaaacccacagctgagcctggtcaagacaaccccgagtggctcatcagtgaggactgggcgctgctgcaggctgtaaagcagttactggagctgcctttgaacctcacaatcgtgtcacctgctcacacacctaattgggatcttgtcagtgacgttgttaactcctgtagccgaatctaccgctcttccaaacagtgccggaatcgctacgagaatgtcatcattccacgagaggaggggaagagtaaaaacaaccgtcctctccgtacgagccagatctatgcccaggatgagaatgccacacacacccagctgtacacgagccactttgacttaatgaaaatgactgctggcaagaggagtcccccaatcaaacctctgcttggcatgaatccctttcagaagaaccccaagcacgcgtctgtgttggcagaaagtggaatcaactatgacaagccgctgcctcccatccaggtggcatctctccgtgcagagcgaatcgcaaaagagaaaaaggctctggctgatcagcagaaggcacagcagccggccgtggcccagccacccccgccccagccgcagcccccaccacccccgcagcagccaccgccaccgctgccacaaccacaggcagcgggcagccagccgccagcagggccaccagctgtccagccccaaccccagccacagccccagacccagccacagcctgtgcaggccccagcgaaggcgcagcccgcaatcacgacggggggcagtgcagccgtactggcaggaaccattaaaacatcagttactgggacgagcatgcccactggtgccgtgagtggaaatgtgatcgtgaacaccatcgcaggggtcccagctgccaccttccagtccatcaacaagcgcctggcgtcgccagtggctcctggggccttgactacgccgggaggctctgctcccgcccaggtggtgcacacccagcccccgccacgggcagtcggctccccagccacggcgacccctgacctggtgtccatggcaacgactcagggtgttcgagcggtcacttctgtgacagcctcggccgtggtcactaccaacctgaccccagtgcagaccccggcacggtctttggtgccccaagtgtcccaagccacaggagttcagctccctggaaaaaccatcacacctgcacatttccagcttctcaggcagcagcagcagcagcagcaacaacagcagcagcagcagcagcagcagcagcagcagcagcagcagcaacagcagcagcagcaacagacgacgacgacctctcaggtgcaagttccacagatccagggccaggcccagtccccagcacagatcaaagctgtgggcaagctgacgccggaacacctcatcaaaatgcagaagcagaaactgcagatgcccccgcagcccccaccgccacaggcccagtctgcgcccccgcagccaacagcccaagtgcaagtgcagacctcgcagccgccgcagcagcagagcccccagctcacgacggtcacggccccaaggcctggtgccctgctgacgggcaccaccgtggccaacctccaggtggcccggctcacccgggttcccacttctcagctgcaggcgcaagggcagatgcagacccaggcaccccagccagcccaggtggccttggcgaagcctccggtggtgtccgtcccggcagctgtggtctcctcaccgggagtcaccaccctgcccatgaacgtcgcggggatcagcgtggcgatcggtcagccacagaaggcagcaggacagaccgtggtggcccagcccgtgcacatgcagcagctgctgaagctgaagcagcaggccgtccagcagcagaaggccatccagccccaggctgcacagggcccggcagccgtccagcagaagatcaccgcacagcagatcaccacccctggcgcgcagcagaaggttgcctacgccgcgcagccggcccttaagacccagtttcttaccacacccatctcccaggcccagaaactggccggggcccagcaagtgcagacccagatccaggttgcaaaacttcctcaagttgttcaacagcaaacacccgtggccagcatccagcaagttgcctctgcttcccagcaggcttctccacagactgtggcgctcacgcaggcgacggcggccgggcagcaggtgcagatgatccctgcagtgaccgcgactgcccaggtggttcagcagaaactcattcagcagcaggtggtgaccacggcgtcggccccgctccagactccaggcgctcccaacccagcccaggtgcccgccagctccgacagcccaagccagcagcccaagttacagatgagggtccctgctgtcaggctaaagacacctactaagcctccgtgccag

SEQ ID NO: 5079 - DNA, 1599 bp, Homo sapiens
  source 1..1599: mol_type = genomic DNA
atggattcttctcagcacttagtgacctttgaggatgtggctgtggactttacccaggaggagtggactttgttggatcaagcccagagagatctctacagagatgtgatgttggagaactacaagaatctcattatactagcagggtctgaattattcaaacgtagtctcatgtctggattggaacaaatggaagagctgaggacaggagtgacaggagttctgcaggaattggatttgcaactcaaaaccaaaggctccccactgctgcaagatatttctgcagaaagatcaccaaatggagtacaattggagagaagcaatactgcagagaaactgtatgactctaaccattctggaaaagtcttcaatgaacacccatttcttatgactcacatgataactcacattggagagaaaacttctgaggataatcagagtggaaaagccttaagaaagaactttcctcatagtttttacaagaaaagtcatgctgaggggaaaatgcctaagtgtgttaaacatgaaaaagccttcaaccagtttccaaatcttactaggcagaataaaactcacacacaagagaaattgtgtgaatgcaaagactgttggagaacttttcttaatcagtcatcccttaagttacatataagatctcacaatggagacaaacactatgtatgtaaggaatgtgggaaagccttcagtaattcctcacaccttataggacatggaagaattcacagtggagagaagccctatgtctgtaaagaatgtggtaaagctttcactcaatccacaggacttaaattacacatcagaactcacagtggagaaaaaccatataaatgtaaagagtgtgggaaagccttcacccattcttcataccttactgatcatacaagaatccacagtggaaagaagccctatgtatgtatggaatgtggaaaagccttcactagatccacaggacttattttacacatgcgaattcacactggagaaaagccatatgaatgtaaggagtgtggaaaagcttttattcattcctcataccttacaaaacatgtaaggattcacagtggagagaagctgtatttatgtaaggcatgtgggaaagcttttactcgttcctcaggacttgttttacacatgagaacacatactggagaaaagccctatgaatgtaaagaatgtgggaaagcctttaataattcctcaatgcttagtcaacatgtaaggattcacactggagagaagccatatgaatgcaaagaatgtgggaaagctttcactcaatcctcgggccttagtacccatttaagaactcacactggagaaaaggcctgtgaatgtaaggaatgcggtaaagcatttgctcgttccacaaatcttaatatgcacatgcgaacgcacacaggagaaaagccttatgcatgtaaagaatgtgggaaagccttcaggtattccacataccttaacgttcacacacgaactcacactggagcaaaaccatatgaatgtaagaaatgtgggaaaaacttcactcaatcttcagcacttgctaaacatctaagaactaaggcatgtgaaaaaacc

SEQ ID NO: 5080 - DNA, 3771 bp, Homo sapiens
  source 1..3771: mol_type = genomic DNA
atgaaggcggcagatgagcctgcctacctgacagtgggaaccgatgtcagtgccaagtaccgaggtgccttctgtgaggcaaagattaagactgtgaaaaggctggtgaaagttaaggtactcctgaaacaggataataccacacaattggtacaagatgaccaagtaaagggtcctttaagagttggagctattgttgaaacaaggacatctgatggatcttttcaggaagctattatcagcaagttgacagatgctagttggtataccgtggtgtttgatgatggtgatgagcgaacattgagacgtacctcactttgtctgaaaggagagagacattttgcagagagtgagacacttgaccagcttccattaacaaatccagagcattttggaactccagtaattgcaaagaagacgaacagaggaaggagatcttctcttcctgttactgaagatgaaaaggaagaagaaagcagtgaagaggaagatgaagacaagcgccgtctcaatgatgaattactaggaaaagttgtaagtgtggtgtctgcaacggagaggactgaatggtatcctgctttggtaatatctcccagctgtaatgatgacatcacagtgaaaaaggatcagtgtttagttcgatcatttattgattctaaattttactctatagcaagaaaggacattaaggaagtagacattctcaatctaccggaatctgagctctccactaaaccagggcttcagaaagcaagcatcttcttaaaaactagagttgttcctgataattggaaaatggatataagtgaaatccttgagtcatccagtagtgatgatgaagatggcccagctgaagaaaatgatgaagagaaggaaaaggaggccaaaaagacagaagaagaggtgcctgaggaagaacttgatcctgaagagagggacaacttcctccagcagctttataagtttatggaagacagaggtactccaatcaacaaaccacctgttttgggctataaagatctcaatctcttcaaactcttcagactggtttatcatcagggtggatgtgacaatattgatagtggtgctgtatggaagcaaatttatatggaccttggcattcctattttgaattcagctgcttcctacaatgtaaaaactgcttatagaaagtatctctatggttttgaggagtactgccgttcggcaaatattcagttcagaactgttcatcaccatgaaccaaaagtaaaagaggaaaaaaaagacttagaagaatcaatggaagaggctctcaaattagatcaagaaatgcctttaacagaagtgaagagtgaacctgaggaaaatatcgattcaaacagtgaaagtgaaagagaagagatagaattaaaatctccgaggggacgaaggagaattgctcgagatgtaaattctattaaaaaggaaattgaagaagagaaaacagaagacaaattaaaagataatgatacagaaaataaggatgtagatgatgactatgaaactgcagagaaaaaagaaaatgagctactactggggagaaaaaatacaccaaagcaaaaagagaagaaaattaaaaaacaggaggattctgacaaagactcagatgaagaggaagagaaaagccaagagagggaagaaactgaaagcaaatgtgactctgaaggagaggaagatgaggaagacatggaaccctgcctaacaggaaccaaagtgaaagtaaaatatggacgagggaagactcagaaaatttatgaagccagtattaaaagcactgaaattgatgacggagaagttttatatttggtacattactatggatggaatgtcaggtatgatgagtgggtgaaggctgacaggataatctggcctttggacaaaggtggaccaaagaaaaaacagaagaaaaaagctaaaaataaagaagatagtgaaaaggacgaaaagagagatgaggagaggcagaagtcaaaacggggacgacctcctttaaaatcaaccctctcatcaaacatgccgtatggcttatctaagacagcaaacagtgaaggaaaatcagactcttgttcatctgatagtgaaacagaagatgctttagaaaagaatttaataaatgaagaactttctcttaaagatgaactagaaaaaaatgaaaatttgaatgatgataagctagatgaagaaaatccaaagatttctgcacatatattaaaagaaaatgataggactcaaatgcagcctttagaaaccctgaagttagaagttggagagaatgaacaaatagtacagatttttgggaacaaaatggaaaaaacagaagaagttaagaaagaagccgaaaaatctccaaaaggaaagggaagacgaagcaagacaaaagatctttctttagaaattataaagatttcatcatttggccagaatgaagcaggaagtgaacctcatatagaagctcatagtcttgaattgtcttcattagacaataaaaacttttcttctgctacagaagatgaaattgaccaatgtgtgaaagaaaagaagttgaaacggaaaatactaggacaatcatcgccagagaaaaaaataagaattgagaatggaatggaaatgacaaatactgtatctcaagaaaggaccagtgattgtattggatctgagggaatgaaaaacttaaattttgaacagcactttgaaagagaaaatgaaggaatgccatcattgatagcagagtcaaaccaatgcatccaacaactgactagtgaaagatttgatagtccagctgaagaaactgtaaatattccactaaaagaagatgaggatgcaatgcctctgatcgggcctgaaaccttggtttgccatgaagtagatttggatgatttggatgaaaaggataagaccagcattgaggatgtagcagttgaaagctctgagtctaactctcttgtttctattccacctgccctacctcctgtagtccaacataacttttcagtagcttcaccacttactcttagtcaagatgagtctcgaagcgtaaaaagtgagagtgatataacgattgaagttgatagtattgctgaagaatctcaagaaggtctctgtgagagggaatcggcaaatggatttgaaactaatgttgcctctggtacctgtagtataattgtacaagagagagagagcagagagaagggtcagaagaggccaagtgatggaaatagtggattaatggcaaaaaagcaaaagcgtaccccaaagcgaacaagtgctgcagccaaaaatgaaaagaatggaacaggacaaagcagtgatagtgaagatcttcctgtcctagacaattcaagtaaatgtaccccagtaaagcatcttaatgtatctaagccacagaaacttgcacgatctcctgcaagaatatccccgcacatcaaagatggagagaaagataaacacagagaaaaacatccgaattcatcccctaggacatataaatggagctttcagctcaatgaattagataatatgaacagtacagagagaatctcatttctccaagaaaaactacaggaaatcagaaaatattatatgtctttgaagtctgaagttgcaaccatagacaggaggagaaaaagattaaaaaagaaagacagggaagtgtctcatgcgggagcctccatgtcatctgcttcatcagacactggaatgagtccctcatcatcatctcccccacaaaatgtacttgctgtagaatgcagg

SEQ ID NO: 5081 - DNA, 3564 bp, Homo sapiens
  source 1..3564: mol_type = genomic DNA
atgaaggcggcagatgagcctgcctacctgacagtgggaaccgatgtcagtgccaagtaccgaggtgccttctgtgaggcaaagattaagactgtgaaaaggctggtgaaagttaaggtactcctgaaacaggataataccacacaattggtacaagatgaccaagtaaagggtcctttaagagttggagctattgttgaaacaaggacatctgatggatcttttcaggaagctattatcagcaagttgacagatgctagttggtataccgtggtgtttgatgatggtgatgagcgaacattgagacgtacctcactttgtctgaaaggagagagacattttgcagagagtgagacacttgaccagcttccattaacaaatccagagcattttggaactccagtaattgcaaagaagacgaacagaggaaggagatcttctcttcctgttactgaagatgaaaaggaagaagaaagcagtgaagaggaagatgaagacaagcgccgtctcaatgatgaattactaggaaaagttgtaagtgtggtgtctgcaacggagaggactgaatggtatcctgctttggtaatatctcccagctgtaatgatgacatcacagtgaaaaaggatcagtgtttagttcgatcatttattgattctaaattttactctatagcaagaaaggacattaaggaagtagacattctcaatctaccggaatctgagctctccactaaaccagggcttcagaaagcaagcatcttcttaaaaactagagttgttcctgataattggaaaatggatataagtgaaatccttgagtcatccagtagtgatgatgaagatggcccagctgaagaaaatgatgaagagaaggaaaaggaggccaaaaagacagaagaagaggtgcctgaggaagaacttgatcctgaagagagggacaacttcctccagcagctttataagtttatggaagacagaggtactccaatcaacaaaccacctgttttgggctataaagatctcaatctcttcaaactcttcagactggtttatcatcagggtggatgtgacaatattgatagtggtgctgtatggaagcaaatttatatggaccttggcattcctattttgaattcagctgcttcctacaatgtaaaaactgcttatagaaagtatctctatggttttgaggagtactgccgttcggcaaatattcagttcagaactgttcatcaccatgaaccaaaagtaaaagaggaaaaaaaagacttagaagaatcaatggaagaggctctcaaattagatcaagaaatgcctttaacagaagtgaagagtgaacctgaggaaaatatcgattcaaacagtgaaagtgaaagagaagagatagaattaaaatctccgaggggacgaaggagaattgctcgagatgtaaattctattaaaaaggaaattgaagaagagaaaacagaagacaaattaaaagataatgatacagaaaataaggatgtagatgatgactatgaaactgcagagaaaaaagaaaatgagctactactggggagaaaaaatacaccaaagcaaaaagagaagaaaattaaaaaacaggaggattctgacaaagactcagatgaagaggaagagaaaagccaagagagggaagaaactgaaagcaaatgtgactctgaaggagaggaagatgaggaagacatggaaccctgcctaacaggaaccaaagtgaaagtaaaatatggacgagggaagactcagaaaatttatgaagccagtattaaaagcactgaaattgatgacggagaagttttatatttggtacattactatggatggaatgtcaggtatgatgagtgggtgaaggctgacaggataatctggcctttggacaaaggtggaccaaagaaaaaacagaagaaaaaagctaaaaataaagaagatagtgaaaaggacgaaaagagagatgaggagaggcagaagtcaaaacggggacgacctcctttaaaatcaaccctctcatcaaacatgccgtatggcttatctaagacagcaaacagtgaaggaaaatcagactcttgttcatctgatagtgaaacagaagatgctttagaaaagaatttaataaatgaagaactttctcttaaagatgaactagaaaaaaatgaaaatttgaatgatgataagctagatgaagaaaatccaaagatttctgcacatatattaaaagaaaatgataggactcaaatgcagcctttagaaaccctgaagttagaagttggagagaatgaacaaatagtacagatttttgggaacaaaatggaaaaaacagaagaagttaagaaagaagccgaaaaatctccaaaaggaaagggaagacgaagcaagacaaaagatctttctttagaaattataaagatttcatcatttggccagaatgaagcaggaagtgaacctcatatagaagctcatagtcttgaattgtcttcattagacaataaaaacttttcttctgctacagaagatgaaattgaccaatgtgtgaaagaaaagaagttgaaacggaaaatactaggacaatcatcgccagagaaaaaaataagaattgagaatggaatggaaatgacaaatactgtatctcaagaaaggaccagtgattgtattggatctgagggaatgaaaaacttaaattttgaacagcactttgaaagagaaaatgaaggaatgccatcattgatagcagagtcaaaccaatgcatccaacaactgactagtgaaagatttgatagtccagctgaagaaactgtaaatattccactaaaagaagatgaggatgcaatgcctctgatcgggcctgaaaccttggtttgccatgaagtagatttggatgatttggatgaaaaggataagaccagcattgaggatgtagcagttgaaagctctgagtctaactctcttgtttctattccacctgccctacctcctgtagtccaacataacttttcagtagcttcaccacttactcttagtcaagatgagtctcgaagcgtaaaaagtgagagtgatataacgattgaagttgatagtattgctgaagaatctcaagaaggtctctgtgagagggaatcggcaaatggatttgaaactaatgttgcctctggtacctgtagtataattgtacaagagagagagagcagagagaagggtcagaagaggccaagtgatggaaatagtggattaatggcaaaaaagcaaaagcgtaccccaaagcgaacaagtgctgcagccaaaaatgaaaagaatggaacagatgaattagataatatgaacagtacagagagaatctcatttctccaagaaaaactacaggaaatcagaaaatattatatgtctttgaagtctgaagttgcaaccatagacaggaggagaaaaagattaaaaaagaaagacagggaagtgtctcatgcgggagcctccatgtcatctgcttcatcagacactggaatgagtccctcatcatcatctcccccacaaaatgtacttgctgtagaatgcagg

SEQ ID NO: 5082 - DNA, 3609 bp, Homo sapiens
  source 1..3609: mol_type = genomic DNA
atgaaggcggcagatgagcctgcctacctgacagtgggaaccgatgtcagtgccaagtaccgaggtgccttctgtgaggcaaagattaagactgtgaaaaggctggtgaaagttaaggtactcctgaaacaggataataccacacaattggtacaagatgaccaagtaaagggtcctttaagagttggagctattgttgaaacaaggacatctgatggatcttttcaggaagctattatcagcaagttgacagatgctagttggtataccgtggtgtttgatgatggtgatgagcgaacattgagacgtacctcactttgtctgaaaggagagagacattttgcagagagtgagacacttgaccagcttccattaacaaatccagagcattttggaactccagtaattgcaaagaagacgaacagaggaaggagatcttctcttcctgttactgaagatgaaaaggaagaagaaagcagtgaagaggaagatgaagacaagcgccgtctcaatgatgaattactaggaaaagttgtaagtgtggtgtctgcaacggagaggactgaatggtatcctgctttggtaatatctcccagctgtaatgatgacatcacagtgaaaaaggatcagtgtttagttcgatcatttattgattctaaattttactctatagcaagaaaggacattaaggaagtagacattctcaatctaccggaatctgagctctccactaaaccagggcttcagaaagcaagcatcttcttaaaaactagagttgttcctgataattggaaaatggatataagtgaaatccttgagtcatccagtagtgatgatgaagatggcccagctgaagaaaatgatgaagagaaggaaaaggaggccaaaaagacagaagaagaggtgcctgaggaagaacttgatcctgaagagagggacaacttcctccagcagctttataagtttatggaagacagaggtactccaatcaacaaaccacctgttttgggctataaagatctcaatctcttcaaactcttcagactggtttatcatcagggtggatgtgacaatattgatagtggtgctgtatggaagcaaatttatatggaccttggcattcctattttgaattcagctgcttcctacaatgtaaaaactgcttatagaaagtatctctatggttttgaggagtactgccgttcggcaaatattcagttcagaactgttcatcaccatgaaccaaaagtaaaagaggaaaaaaaagacttagaagaatcaatggaagaggctctcaaattagatcaagaaatgcctttaacagaagtgaagagtgaacctgaggaaaatatcgattcaaacagtgaaagtgaaagagaagagatagaattaaaatctccgaggggacgaaggagaattgctcgagatgtaaattctattaaaaaggaaattgaagaagagaaaacagaagacaaattaaaagataatgatacagaaaataaggatgtagatgatgactatgaaactgcagagaaaaaagaaaatgagctactactggggagaaaaaatacaccaaagcaaaaagagaagaaaattaaaaaacaggaggattctgacaaagactcagatgaagaggaagagaaaagccaagagagggaagaaactgaaagcaaatgtgactctgaaggagaggaagatgaggaagacatggaaccctgcctaacaggaaccaaagtgaaagtaaaatatggacgagggaagactcagaaaatttatgaagccagtattaaaagcactgaaattgatgacggagaagttttatatttggtacattactatggatggaatgtcaggtatgatgagtgggtgaaggctgacaggataatctggcctttggacaaaggtggaccaaagaaaaaacagaagaaaaaagctaaaaataaagaagatagtgaaaaggacgaaaagagagatgaggagaggcagaagtcaaaacggggacgacctcctttaaaatcaaccctctcatcaaacatgccgtatggcttatctaagacagcaaacagtgaaggaaaatcagactcttgttcatctgatagtgaaacagaagatgctttagaaaagaatttaataaatgaagaactttctcttaaagatgaactagaaaaaaatgaaaatttgaatgatgataagctagatgaagaaaatccaaagatttctgcacatatattaaaagaaaatgataggactcaaatgcagcctttagaaaccctgaagttagaagttggagagaatgaacaaatagtacagatttttgggaacaaaatggaaaaaacagaagaagttaagaaagaagccgaaaaatctccaaaaggaaagggaagacgaagcaagacaaaagatctttctttagaaattataaagatttcatcatttggccagaatgaagcaggaagtgaacctcatatagaagctcatagtcttgaattgtcttcattagacaataaaaacttttcttctgctacagaagatgaaattgaccaatgtgtgaaagaaaagaagttgaaacggaaaatactaggacaatcatcgccagagaaaaaaataagaattgagaatggaatggaaatgacaaatactgtatctcaagaaaggaccagtgattgtattggatctgagggaatgaaaaacttaaattttgaacagcactttgaaagagaaaatgaaggaatgccatcattgatagcagagtcaaaccaatgcatccaacaactgactagtgaaagatttgatagtccagctgaagaaactgtaaatattccactaaaagaagatgaggatgcaatgcctctgatcgggcctgaaaccttggtttgccatgaagtagatttggatgatttggatgaaaaggataagaccagcattgaggatgtagcagttgaaagctctgagtctaactctcttgtttctattccacctgccctacctcctgtagtccaacataacttttcagtagcttcaccacttactcttagtcaagatgagtctcgaagcgtaaaaagtgagagtgatataacgattgaagttgatagtattgctgaagaatctcaagaaggtctctgtgagagggaatcggcaaatggatttgaaactaatgttgcctctggtacctgtagtataattgtacaagagagagagagcagagagaagggtcagaagaggccaagtgatggaaatagtggattaatggcaaaaaagcaaaagcgtaccccaaagcgaacaagtgctgcagccaaaaatgaaaagaatggaacaggacaaagcagtgatagtgaagatcttcctgtcctagacaattcaaatgaattagataatatgaacagtacagagagaatctcatttctccaagaaaaactacaggaaatcagaaaatattatatgtctttgaagtctgaagttgcaaccatagacaggaggagaaaaagattaaaaaagaaagacagggaagtgtctcatgcgggagcctccatgtcatctgcttcatcagacactggaatgagtccctcatcatcatctcccccacaaaatgtacttgctgtagaatgcagg

SEQ ID NO: 5083 - DNA, 3678 bp, Homo sapiens
  source 1..3678: mol_type = genomic DNA
atgaaggcccttgatgagcctccctatttgacagtgggcactgatgtgagtgctaaatacagaggagccttttgtgaagccaagatcaagacagcaaaaagacttgtcaaagtcaaggtgacatttagacatgattcttcaacagtggaagttcaggatgaccacataaagggcccactaaaggtaggagctattgtggaagtgaagaatcttgatggtgcatatcaggaagctgttatcaataaactaacagatgcgagttggtacactgtagtttttgatgacggagatgagaagacactgagacgatcttcactgtgcctgaaaggagagaggcattttgctgaaagtgaaacattagaccagctcccactcaccaaccctgagcattttggcactccagtcataggaaagaaaacaaatagaggaagaagatctaatcatataccagaggaagagtcttcatcatcctccagtgatgaagatgaggatgataggaaacagattgatgagctactaggcaaagttgtatgtgtagattacattagtttggataaaaagaaagcactgtggtttcctgcattggtggtttgtcctgattgtagtgatgagattgctgtaaaaaaggacaatattcttgttcgatctttcaaagatggaaaatttacttcagttccaagaaaagatgtccatgaaattactagtgacactgcaccaaagcctgatgctgttttaaagcaagcctttgaacaggcacttgaatttcacaaaagtagaactattcctgctaactggaagactgaattgaaagaagatagctctagcagtgaagcagaggaagaagaggaggaggaagatgatgaaaaagaaaaggaggataatagcagtgaagaagaagaagaaatagaaccatttccagaagaaagggagaactttcttcagcaattgtacaaatttatggaagatagaggtacacctattaacaaacgacctgtacttggatatcgaaatttgaatctctttaagttattcagacttgtacacaaacttggaggatttgataatattgaaagtggagctgtttggaaacaagtctaccaagatcttggaatccctgtcttaaattcagctgcaggatacaatgttaaatgtgcttataaaaaatacttatatggttttgaggagtactgtagatcagccaacattgaatttcagatggcattgccagagaaagttgttaacaagcaatgtaaggagtgtgaaaatgtaaaagaaataaaagttaaggaggaaaatgaaacagagatcaaagaaataaagatggaggaggagaggaatataataccaagagaagaaaagcctattgaggatgaaattgaaagaaaagaaaatattaagccctctctgggaagtaaaaagaatttattagaatctatacctacacattctgatcaggaaaaagaagttaacattaaaaaaccagaagacaatgaaaatctggatgacaaagatgatgacacaactagggtagatgaatccctcaacataaaggtagaagctgaggaagaaaaagcaaaatctggatacgatgaatggattaaagcagataaaatagtaagacctgctgataaaaatgtgccaaagataaaacatcggaagaaaataaagaataaattagacaaagaaaaagacaaagatgaaaaatactctccaaaaaactgtaaacttcggcgcttgtccaaaccaccatttcagacaaatccatctcctgaaatggtatccaaactggatctcactgatgccaaaaactctgatactgctcatattaagtccatagaaattacttcgatccttaatggacttcaagcttctgaaagttctgctgaagacagtgagcaggaagatgagagaggtgctcaagacatggataataatggcaaagaggaatctaagattgatcatttgaccaacaacagaaatgatcttatttcaaaggaggaacagaacagttcatctttgctagaagaaaacaaagttcatgcagatttggtaatatccaaaccagtgtcaaaatctccagaaagattaaggaaagatatagaagtattatccgaagatactgattatgaagaagatgaagtcacaaaaaagagaaaggatgtcaagaaggacacaacagataaatcttcaaaaccacaaataaaacgtggtaaaagaaggtattgcaatacagaagagtgtctaaaaactggatcacctggcaaaaaggaagagaaggccaagaacaaagaatcactttgcatggaaaacagtagcaacagctcttcagatgaagatgaagaagaaacaaaagcaaagatgacaccaactaagaaatacaatggtttggaggaaaaaagaaaatctctacggacaactggtttctattcaggattttcagaagtggcagaaaaaaggattaaacttttaaataactctgatgaaagacttcaaaacagcagggccaaagatcgaaaagatgtctggtcaagtattcagggacagtggcctaaaaaaacgctgaaagagcttttttcagactctgatactgaggctgcagcttccccaccgcatcctgccccagaggagggggtggcagaggagtcactgcagactgtggctgaagaggagagttgttcacccagtgtagaactagaaaaaccacctccagtcaatgtcgatagtaaacccattgaagaaaaaacagtagaggtcaatgacagaaaagcagaatttccaagtagtggcagtaattcagtgctaaatacccctcctactacacctgaatcgccttcatcagtcactgtaacagaaggcagccggcagcagtcttctgtaacagtatcagaaccactggctccaaaccaagaagaggttcgaagtatcaagagtgaaactgatagcacaattgaggtggatagtgttgctggggagctccaagacctccagtctgaagggaatagctcgccagcaggttttgatgccagtgtgagctcaagcagtagtaatcagccagaaccagaacatcctgaaaaagcctgtacaggtcagaaaagagtgaaagatgctcagggaggaggaagttcatcaaaaaagcagaaaagaagccataaagcaacagtggtaaacaacaaaaagaagggaaaaggcacaaatagtagtgatagtgaagaactttcagctggtgaaagtataactaagagtcagccagtcaaatcagtttccactggaatgaagtctcatagtaccaaatctcccgcaaggacgcagtctccaggaaaatgtggaaagaatggtgataaggatcctgatctcaaggaacccagtaatcgattacccaaagtttacaaatggagttttcagatgtcggacctggaaaatatgacaagtgccgaacgcatcacaattcttcaagaaaaacttcaagaaatcagaaaacattatctgtcattaaaatctgaagtagcttccattgatcggaggagaaagcgtttaaagaagaaagagagagaaagtgctgctacatcctcatcctcctcttcaccttcatccagttccataacagctgctgttatgttaactttagctgaaccgtcaatgtccagcgcatcacaaaatggaatgtcagttgagtgcagg

SEQ ID NO: 5084 - DNA, 3936 bp, Homo sapiens
  source 1..3936: mol_type = genomic DNA
atgaaggcccttgatgagcctccctatttgacagtgggcactgatgtgagtgctaaatacagaggagccttttgtgaagccaagatcaagacagcaaaaagacttgtcaaagtcaaggtgacatttagacatgattcttcaacagtggaagttcaggatgaccacataaagggcccactaaaggtaggagctattgtggaagtgaagaatcttgatggtgcatatcaggaagctgttatcaataaactaacagatgcgagttggtacactgtagtttttgatgacggagatgagaagacactgagacgatcttcactgtgcctgaaaggagagaggcattttgctgaaagtgaaacattagaccagctcccactcaccaaccctgagcattttggcactccagtcataggaaagaaaacaaatagaggaagaagatctaatcatataccagaggaagagtcttcatcatcctccagtgatgaagatgaggatgataggaaacagattgatgagctactaggcaaagttgtatgtgtagattacattagtttggataaaaagaaagcactgtggtttcctgcattggtggtttgtcctgattgtagtgatgagattgctgtaaaaaaggacaatattcttgttcgatctttcaaagatggaaaatttacttcagttccaagaaaagatgtccatgaaattactagtgacactgcaccaaagcctgatgctgttttaaagcaagcctttgaacaggcacttgaatttcacaaaagtagaactattcctgctaactggaagactgaattgaaagaagatagctctagcagtgaagcagaggaagaagaggaggaggaagatgatgaaaaagaaaaggaggataatagcagtgaagaagaagaagaaatagaaccatttccagaagaaagggagaactttcttcagcaattgtacaaatttatggaagatagaggtacacctattaacaaacgacctgtacttggatatcgaaatttgaatctctttaagttattcagacttgtacacaaacttggaggatttgataatattgaaagtggagctgtttggaaacaagtctaccaagatcttggaatccctgtcttaaattcagctgcaggatacaatgttaaatgtgcttataaaaaatacttatatggttttgaggagtactgtagatcagccaacattgaatttcagatggcattgccagagaaagttgttaacaagcaatgtaaggagtgtgaaaatgtaaaagaaataaaagttaaggaggaaaatgaaacagagatcaaagaaataaagatggaggaggagaggaatataataccaagagaagaaaagcctattgaggatgaaattgaaagaaaagaaaatattaagccctctctgggaagtaaaaagaatttattagaatctatacctacacattctgatcaggaaaaagaagttaacattaaaaaaccagaagacaatgaaaatctggatgacaaagatgatgacacaactagggtagatgaatccctcaacataaaggtagaagctgaggaagaaaaagcaaaatctggagatgaaacgaataaagaagaagatgaagatgatgaagaagcagaagaggaggaggaggaggaagaagaagaagaggatgaagatgatgatgacaacaatgaggaagaggagtttgagtgctatccaccaggcatgaaagtccaagtgcggtatggacgagggaaaaatcaaaaaatgtatgaagctagtattaaagattctgatgtcgaaggtggagaggtcctttacttggtgcattactgcggatggaatgtgagatacgatgaatggattaaagcagataaaatagtaagacctgctgataaaaatgtgccaaagataaaacatcggaagaaaataaagaataaattagacaaagaaaaagacaaagatgaaaaatactctccaaaaaactgtaaacttcggcgcttgtccaaaccaccatttcagacaaatccatctcctgaaatggtatccaaactggatctcactgatgccaaaaactctgatactgctcatattaagtccatagaaattacttcgatccttaatggacttcaagcttctgaaagttctgctgaagacagtgagcaggaagatgagagaggtgctcaagacatggataataatggcaaagaggaatctaagattgatcatttgaccaacaacagaaatgatcttatttcaaaggaggaacagaacagttcatctttgctagaagaaaacaaagttcatgcagatttggtaatatccaaaccagtgtcaaaatctccagaaagattaaggaaagatatagaagtattatccgaagatactgattatgaagaagatgaagtcacaaaaaagagaaaggatgtcaagaaggacacaacagataaatcttcaaaaccacaaataaaacgtggtaaaagaaggtattgcaatacagaagagtgtctaaaaactggatcacctggcaaaaaggaagagaaggccaagaacaaagaatcactttgcatggaaaacagtagcaacagctcttcagatgaagatgaagaagaaacaaaagcaaagatgacaccaactaagaaatacaatggtttggaggaaaaaagaaaatctctacggacaactggtttctattcaggattttcagaagtggcagaaaaaaggattaaacttttaaataactctgatgaaagacttcaaaacagcagggccaaagatcgaaaagatgtctggtcaagtattcagggacagtggcctaaaaaaacgctgaaagagcttttttcagactctgatactgaggctgcagcttccccaccgcatcctgccccagaggagggggtggcagaggagtcactgcagactgtggctgaagaggagagttgttcacccagtgtagaactagaaaaaccacctccagtcaatgtcgatagtaaacccattgaagaaaaaacagtagaggtcaatgacagaaaagcagaatttccaagtagtggcagtaattcagtgctaaatacccctcctactacacctgaatcgccttcatcagtcactgtaacagaaggcagccggcagcagtcttctgtaacagtatcagaaccactggctccaaaccaagaagaggttcgaagtatcaagagtgaaactgatagcacaattgaggtggatagtgttgctggggagctccaagacctccagtctgaagggaatagctcgccagcaggttttgatgccagtgtgagctcaagcagtagtaatcagccagaaccagaacatcctgaaaaagcctgtacaggtcagaaaagagtgaaagatgctcagggaggaggaagttcatcaaaaaagcagaaaagaagccataaagcaacagtggtaaacaacaaaaagaagggaaaaggcacaaatagtagtgatagtgaagaactttcagctggtgaaagtataactaagagtcagccagtcaaatcagtttccactggaatgaagtctcatagtaccaaatctcccgcaaggacgcagtctccaggaaaatgtggaaagaatggtgataaggatcctgatctcaaggaacccagtaatcgattacccaaagtttacaaatggagttttcagatgtcggacctggaaaatatgacaagtgccgaacgcatcacaattcttcaagaaaaacttcaagaaatcagaaaacattatctgtcattaaaatctgaagtagcttccattgatcggaggagaaagcgtttaaagaagaaagagagagaaagtgctgctacatcctcatcctcctcttcaccttcatccagttccataacagctgctgttatgttaactttagctgaaccgtcaatgtccagcgcatcacaaaatggaatgtcagttgagtgcagg

SEQ ID NO: 5085 - DNA, 486 bp, Homo sapiens
  source 1..486: mol_type = genomic DNA
atgaacaaggaagttaaagacaatcaggaaatgaaatcaaggatattggtgattaaggctgcagaagacagtgcgttgcagtatatgaacttcatgaatgtcatctttgcagcacagaaacagaatattttgattgatgcctgtgttttagactccgactcagggctcctccaacaggcttgtgacatcacgggaggactgtacctgaaggtgcctcagatgccttctcttctgcagtatttgctgtgggtgtttcttcccgatcaagatcagagatctcagttaatcctcccacccccagttcatgttgactacagggctgcttgcttctgtcatcgaaatctcattgaaattggttatgtctgttctgtgtgtttgtcaatattctgcaatttcagccccatttgtactacgtgcgagacagcctttaaaatttctctgcctccagtgctgaaagccaagaaaaagaaactgaaagtgtctgcc

SEQ ID NO: 5086 - DNA, 801 bp, Homo sapiens
  source 1..801: mol_type = genomic DNA
atggtgctgggaaattcgcatttattcatgaatcgttccaacaaacttgctgtgatagcaagtcacattcaagaaagccgattcttatatcctggaaagaatggcagacttggagacttcttcggagaccctggcaaccctcctgaatttaatccctctgggagtaaagatggaaaatacgaacttttaacctcagcaaatgaagttattgttgaagagattaaagatctaatgaccaaaagtgacataaagggtcaacatacagaaactttgctggcaggatccctggccaaagccctttgctacattcatagaatgaacaaggaagttaaagacaatcaggaaatgaaatcaaggatattggtgattaaggctgcagaagacagtgcgttgcagtatatgaacttcatgaatgtcatctttgcagcacagaaacagaatattttgattgatgcctgtgttttagactccgactcagggctcctccaacaggcttgtgacatcacgggaggactgtacctgaaggtgcctcagatgccttctcttctgcagtatttgctgtgggtgtttcttcccgatcaagatcagagatctcagttaatcctcccacccccagttcatgttgactacagggctgcttgcttctgtcatcgaaatctcattgaaattggttatgtctgttctgtgtgtttgtcaatattctgcaatttcagccccatttgtactacgtgcgagacagcctttaaaatttctctgcctccagtgctgaaagccaagaaaaagaaactgaaagtgtctgcc

SEQ ID NO: 5087 - DNA, 1407 bp, Homo sapiens
  source 1..1407: mol_type = genomic DNA
atggtgaattactcctatgatgaagatctggaagagctttgtcccgtgtgtggagataaagtgtctgggtaccattatgggctcctcacctgtgaaagctgcaagggattttttaagcgaacagtccaaaataataaaaggtacacatgtatagaaaaccagaactgccaaattgacaaaacacagagaaagcgttgtccttactgtcgttttcaaaaatgtctaagtgttggaatgaagctagaagctgtaagggccgaccgaatgcgtggaggaaggaataagtttgggccaatgtacaagagagacagggccctgaagcaacagaaaaaagccctcatccgagccaatggacttaagctagaagccatgtctcaggtgatccaagctatgccctctgacctgaccatttcctctgcaattcaaaacatccactctgcctccaaaggcctacctctgaaccatgctgccttgcctcctacagactatgacagaagtccctttgtaacatcccccattagcatgacaatgccccctcacggcagcctgcaaggttaccaaacatatggccactttcctagccgggccatcaagtctgagtacccagacccctataccagctcacccgagtccataatgggctattcatatatggatagttaccagacgagctctccagcaagcatcccacatctgatactggaacttttgaagtgtgagccagatgagcctcaagtccaggctaaaatcatggcctatttgcagcaagagcaggctaaccgaagcaagcacgaaaagctgagcacctttgggcttatgtgcaaaatggcagatcaaactctcttctccattgtcgagtgggccaggagtagtatcttcttcagagaacttaaggttgatgaccaaatgaagctgcttcagaactgctggagtgagctcttaatcctcgaccacatttaccgacaagtggtacatggaaaggaaggatccatcttcctggttactgggcaacaagtggactattccataatagcatcacaagccggagccaccctcaacaacctcatgagtcatgcacaggagttagtggcaaaacttcgttctctccagtttgatcaacgagagttcgtatgtctgaaattcttggtgctctttagtttagatgtcaaaaaccttgaaaacttccagctggtagaaggtgtccaggaacaagtcaatgccgccctgctggactacacaatgtgtaactacccgcagcagacagagaaatttggacagctacttcttcgactacccgaaatccgggccatcagtatgcaggctgaagaatacctctactacaagcacctgaacggggatgtgccctataataaccttctcattgaaatgttgcatgccaaaagagca

SEQ ID NO: 5088 - DNA, 1623 bp, Homo sapiens
  source 1..1623: mol_type = genomic DNA
atgtcttctaattcagatactggggatttacaagagtctttaaagcacggacttacacctattggtgctgggcttccggaccgacacggatcccccatccccgcccgcggtcgccttgtcatgctgcccaaagtggagacggaagccctgggactggctcgatcgcatggggaacagggccagatgccggaaaacatgcaagtgtctcaatttaaaatggtgaattactcctatgatgaagatctggaagagctttgtcccgtgtgtggagataaagtgtctgggtaccattatgggctcctcacctgtgaaagctgcaagggattttttaagcgaacagtccaaaataataaaaggtacacatgtatagaaaaccagaactgccaaattgacaaaacacagagaaagcgttgtccttactgtcgttttcaaaaatgtctaagtgttggaatgaagctagaagctgtaagggccgaccgaatgcgtggaggaaggaataagtttgggccaatgtacaagagagacagggccctgaagcaacagaaaaaagccctcatccgagccaatggacttaagctagaagccatgtctcaggtgatccaagctatgccctctgacctgaccatttcctctgcaattcaaaacatccactctgcctccaaaggcctacctctgaaccatgctgccttgcctcctacagactatgacagaagtccctttgtaacatcccccattagcatgacaatgccccctcacggcagcctgcaaggttaccaaacatatggccactttcctagccgggccatcaagtctgagtacccagacccctataccagctcacccgagtccataatgggctattcatatatggatagttaccagacgagctctccagcaagcatcccacatctgatactggaacttttgaagtgtgagccagatgagcctcaagtccaggctaaaatcatggcctatttgcagcaagagcaggctaaccgaagcaagcacgaaaagctgagcacctttgggcttatgtgcaaaatggcagatcaaactctcttctccattgtcgagtgggccaggagtagtatcttcttcagagaacttaaggttgatgaccaaatgaagctgcttcagaactgctggagtgagctcttaatcctcgaccacatttaccgacaagtggtacatggaaaggaaggatccatcttcctggttactgggcaacaagtggactattccataatagcatcacaagccggagccaccctcaacaacctcatgagtcatgcacaggagttagtggcaaaacttcgttctctccagtttgatcaacgagagttcgtatgtctgaaattcttggtgctctttagtttagatgtcaaaaaccttgaaaacttccagctggtagaaggtgtccaggaacaagtcaatgccgccctgctggactacacaatgtgtaactacccgcagcagacagagaaatttggacagctacttcttcgactacccgaaatccgggccatcagtatgcaggctgaagaatacctctactacaagcacctgaacggggatgtgccctataataaccttctcattgaaatgttgcatgccaaaagagca

SEQ ID NO: 5089 - DNA, 504 bp, Homo sapiens
  source 1..504: mol_type = genomic DNA
atgaaactgtccgtcctaccccctcgctccctcctcgccccctacaccgtgttgtgctgcccaccagactcggagaagccgcggctgtccccggaaccctccgagcggcgccctcaggcccccgccaaaaagctccgcaagccgaggaccatctactccagcctgcagctgcagcacctaaaccagcgtttccagcacacgcagtacctggcgctgcccgagagggcccagctggcagcgcagctcggcctcacccagacccaggtaaagatctggtttcagaacaaacgctccaagtataagaagctcctgaagcagaattctggggggcaggaaggggacttccctgggaggaccttctctgtgtctccctgctccccacccctcccctccctctgggatctacccaaggcagggaccctgcccaccagtggctatggcaacagctttggagcctggtatcagcatcactcctcagatgtcctggcttcgcctcagatgatg

SEQ ID NO: 5090 - DNA, 879 bp, Homo sapiens
  source 1..879: mol_type = genomic DNA
atgatgaccatgactacgatggctgacggcttggaaggccaggactcgtccaaatccgccttcatggagttcgggcagcagcagcagcagcagcagcaacagcagcagcagcagcagcagcaacagcaacagccgccgccgccgccgccgccgccgccgcagccgcactcgcagcagagctccccggccatggcaggcgcgcactaccctctgcactgcctgcactcggcggcggcggcggcagcggccggctcgcaccaccaccaccaccaccagcaccaccaccacggctcgccctacgcgtcgggcggagggaactcctacaaccaccgctcgctcgccgcctacccctacatgagccactcgcagcacagcccttacctccagtcctaccacaacagcagcgcagccgcccagacgcgaggggacgacacagatcaacaaaaaactacagtgattgaaaacggggaaatcaggttcaatggaaaagggaaaaagattcggaagcctcggaccatttattccagcctgcagctccaggctttaaaccatcgctttcagcagacacagtatctggcccttccagagagagccgaactggcagcttccttaggactgacacaaacacaggtgaagatatggtttcagaacaaacgctctaagtttaagaaactgctgaagcagggcagtaatcctcatgagagcgaccccctccagggctcggcggccctgtcgccacgctcgccagcgctgcctccagtctgggacgtttctgcctcggccaagggtgtcagtatgccccccaacagctacatgcctggctattctcactggtactcctctccacaccaggacacgatgcagagaccacagatgatg

SEQ ID NO: 5091 - DNA, 765 bp, Homo sapiens
  source 1..765: mol_type = genomic DNA
atgaccatgaccaccatgccagaaagtctcaacagccccgtgtcgggcaaggcggtgtttatggagtttgggccgcccaaccagcaaatgtctccttctcccatgtcccacgggcactactccatgcactgtttacactcggcgggccattcgcagcccgacggcgcctacagctcagcctcgtccttctcccgaccgctgggctacccctacgtcaactcggtcagcagccacgcatccagcccctacatcagttcggtgcagtcctacccgggcagcgccagcctcgcccagagccgcctggaggacccaggggcggactcggagaagagcacggtggtggaaggcggtgaagtgcgcttcaatggcaagggaaaaaagatccgtaaacccaggacgatttattccagtttgcagttgcaggctttgaaccggaggttccagcaaactcagtacctagctctgccggagagggcggagctcgcggcctctttgggactcacacagactcaggtcaagatctggttccaaaacaagcgatccaagttcaagaagctgatgaagcagggtggggcggctctggagggtagtgcgttggccaacggtcgggccctgtctgctggctccccacccgtgccgcccggctggaaccctaactcttcatccgggaagggctcaggaggaaacgcgggctcctatatccccagctacacatcgtggtacccttcagcgcaccaagaagctatgcagcaaccccaacttatg

SEQ ID NO: 5092 - DNA, 387 bp, Homo sapiens
  source 1..387: mol_type = genomic DNA
atgaccatgaccaccatgccagaaagtctcaacagccccgtgtcgggcaaggcggtgtttatggagtttgggccgcccaaccagcaaatgtctccttctcccatgtcccacgggcactactccatgcactgtttacactcggcgggccattcgcagcccgacggcgcctacagctcagcctcgtccttctcccgaccgctgggctacccctacgtcaactcggtcagcagccacgcatccagcccctacatcagttcggtgcagtcctacccgggcagcgccagcctcgcccagagccgcctggaggacccaggtcaagatctggttccaaaacaagcgatccaagttcaagaagctgatgaagcagggtggggcggctctggaggg

SEQ ID NO: 5093 - DNA, 984 bp, Homo sapiens
  source 1..984: mol_type = genomic DNA
atgactggagtctttgacagtctagtggctgatatgcactcgacccagatcgccgcctccagcacgtaccaccagcaccagcagcccccgagcggcggcggcgccggcccgggtggcaacagcagcagcagcagcagcctccacaagccccaggagtcgcccacccttccggtgtccaccgccaccgacagcagctactacaccaaccagcagcacccggcgggcggcggcggcggcgggggctcgccctacgcgcacatgggttcctaccagtaccaagccagcggcctcaacaacgtcccttactccgccaagagcagctatgacctgggctacaccgccgcctacacctcctacgctccctatggaaccagttcgtccccagccaacaacgagcctgagaaggaggaccttgagcctgaaattcggatagtgaacgggaagccaaagaaagtccggaaaccccgcaccatctactccagtttccagctggcggctcttcagcggcgtttccaaaagactcaatacttggccttgccggagcgagccgagctggcggcctctctgggcctcacccagactcaggtcaaaatctggttccagaaccgccggtccaagttcaagaagatgtggaaaagtggtgagatcccctcggagcagcaccctggggccagcgcttctccaccttgtgcttcgccgccagtctcagcgccggcctcctgggactttggtgtgccgcagcggatggcgggcggcggtggtccgggcagtggcggcagcggcgccggcagctcgggctccagcccgagcagcgcggcctcggcttttctgggcaactacccctggtaccaccagacctcgggatccgcctcacacctgcaggccacggcgccgctgctgcaccccactcagaccccgcagccgcatcaccaccaccaccatcacggcggcgggggcgccccggtgagcgcggggacgattttc

SEQ ID NO: 5094 - DNA, 954 bp, Homo sapiens
  source 1..954: mol_type = genomic DNA
atgacccttgatcatcagatcatcaatccaactcttaaatggtcacaacctgcagtgccaagtggtgggcctcttgtgcagcatgcacacacaactctggacagtgatgctggcctcacagaaaacccactcaccaagttactagctattgggaaagaagatgacaatgcacaatggcatttatctggaagtattttggatgtgtatagcggtgaacaaggaatttcaccaattaacatggggcttacaagtgcttcttgtccaagtagtctaccaatgaaaagagaaattacagaaactgacactagagctttagcaaaagagagacaaaaaaaggacaaccacaacctcattgaaagaagaagaaggtataatattaattaccgaatcaaggagcttggcactcttattccaaagtctaatgatcctgatatgcgctggaacaaaggaaccattctaaaagcatcagtggagtacatcaagtggctacaaaaagaacaacagagagcccgagaattggaacacagacagaagaaattagagcaggctaacaggcgacttctacttcggattcaggaactagaaattcaggctcgtactcatggtctgccaaccctggcttcacttggcacggttgatttaggtgctcatgtcaccaaacagcagagccatcctgagcagaattcagtagactattgccaacaactgactgtgtctcaggggccaagccctgagctctgtgatcaagctatagccttttctgatcctttgtcatacttcacagatttatcatttagtgctgcattgaaagaggaacaaagattggatggcatgctattggatgacacaatctctccatttggaacagatcctctgctatctgccacttcccctgcagtttccaaagaaagcagtaggagaagtagctttagctcagatgatggtgatgaatta

SEQ ID NO: 5095 - DNA, 1041 bp, Homo sapiens
  source 1..1041: mol_type = genomic DNA
atgacccttgatcatcagatcatcaatccaactcttaaatggtcacaacctgcagtgccaagtggtgggcctcttgtgcagcatgcacacacaactctggacagtgatgctggcctcacagaaaacccactcaccaagttactagctattgggaaagaagatgacaatgcacaatggcatatggaggacgttattgaggatataatcggtatggaatcaagttttaaagaggaaggagcagactctcctctgctaatgcaaagaacattatctggaagtattttggatgtgtatagcggtgaacaaggaatttcaccaattaacatggggcttacaagtgcttcttgtccaagtagtctaccaatgaaaagagaaattacagaaactgacactagagctttagcaaaagagagacaaaaaaaggacaaccacaacctcattgaaagaagaagaaggtataatattaattaccgaatcaaggagcttggcactcttattccaaagtctaatgatcctgatatgcgctggaacaaaggaaccattctaaaagcatcagtggagtacatcaagtggctacaaaaagaacaacagagagcccgagaattggaacacagacagaagaaattagagcaggctaacaggcgacttctacttcggattcaggaactagaaattcaggctcgtactcatggtctgccaaccctggcttcacttggcacggttgatttaggtgctcatgtcaccaaacagcagagccatcctgagcagaattcagtagactattgccaacaactgactgtgtctcaggggccaagccctgagctctgtgatcaagctatagccttttctgatcctttgtcatacttcacagatttatcatttagtgctgcattgaaagaggaacaaagattggatggcatgctattggatgacacaatctctccatttggaacagatcctctgctatctgccacttcccctgcagtttccaaagaaagcagtaggagaagtagctttagctcagatgatggtgatgaatta

SEQ ID NO: 5096 - DNA, 840 bp, Homo sapiens
  source 1..840: mol_type = genomic DNA
atgatgaaggagaaagagaaaaccattgctattgtgaaggttatagacacttcaaagttaaaactgttatctggaagtattttggatgtgtatagcggtgaacaaggaatttcaccaattaacatggggcttacaagtgcttcttgtccaagtagtctaccaatgaaaagagaaattacagaaactgacactagagctttagcaaaagagagacaaaaaaaggacaaccacaacctcattgaaagaagaagaaggtataatattaattaccgaatcaaggagcttggcactcttattccaaagtctaatgatcctgatatgcgctggaacaaaggaaccattctaaaagcatcagtggagtacatcaagtggctacaaaaagaacaacagagagcccgagaattggaacacagacagaagaaattagagcaggctaacaggcgacttctacttcggattcaggaactagaaattcaggctcgtactcatggtctgccaaccctggcttcacttggcacggttgatttaggtgctcatgtcaccaaacagcagagccatcctgagcagaattcagtagactattgccaacaactgactgtgtctcaggggccaagccctgagctctgtgatcaagctatagccttttctgatcctttgtcatacttcacagatttatcatttagtgctgcattgaaagaggaacaaagattggatggcatgctattggatgacacaatctctccatttggaacagatcctctgctatctgccacttcccctgcagtttccaaagaaagcagtaggagaagtagctttagctcagatgatggtgatgaatta

SEQ ID NO: 5097 - DNA, 1173 bp, Homo sapiens
  source 1..1173: mol_type = genomic DNA
atggcgtcacgcatagggttgcgcatgcagctcatgcgggagcaggcgcagcaggaggagcagcgggagcgcatgcagcaacaggctgtcatgcattacatgcagcagcagcagcagcagcaacagcagcagctcggagggccgcccaccccggccatcaatacccccgtccacttccagtcgccaccacctgtgcctggggaggtgttgaagttggatgatgtcattgacaacattatgcgtctggacgatgtccttggctacatcaatcctgaaatgcagatgcccaacacgctacccctgtccagcagccacctgaatgtgtacagcagcgacccccaggtcacagcctccctggtgggcgtcaccagcagctcctgccctgcggacctgacccagaagcgagagctcacagatgctgagagcagggccctggccaaggagcggcagaagaaagacaatcacaacttaattgaaaggagacgaaggttcaacatcaatgaccgcatcaaggagttgggaatgctgatccccaaggccaatgacctggacgtgcgctggaacaagggcaccatcctcaaggcctctgtggattacatccggaggatgcagaaggacctgcaaaagtccagggagctggagaaccactctcgccgcctggagatgaccaacaagcagctctggctccgtatccaggagctggagatgcaggctcgagtgcacggcctccctaccacctccccgtccggcatgaacatggctgagctggcccagcaggtggtgaagcaggagctgcctagcgaagagggcccaggggaggccctgatgctgggggctgaggtccctgaccctgagccactgccagctctgcccccgcaagccccgctgcccctgcccacccagccaccatccccattccatcacctggacttcagccacagcctgagctttgggggcagggaggacgagggtcccccgggctaccccgaacccctggcgccggggcatggctccccattccccagcctgtccaagaaggatctggacctcatgctcctggacgactcactgctaccgctggcctctgatccacttctgtccaccatgtcccccgaggcctccaaggccagcagccgccggagcagcttcagcatggaggagggcgatgtgctg

SEQ ID NO: 5098 - DNA, 1470 bp, Homo sapiens
  source 1..1470: mol_type = genomic DNA
atgacagcaagctcaggctgggagccagcgccggcagccaccatggcgtcacgcatagggttgcgcatgcagctcatgcgggagcaggcgcagcaggaggagcagcgggagcgcatgcagcaacaggctgtcatgcattacatgcagcagcagcagcagcagcaacagcagcagctcggagggccgcccaccccggccatcaatacccccgtccacttccagtcgccaccacctgtgcctggggaggtgttgaaggtgcagtcctacctggagaatcccacatcctaccatctgcagcagtcgcagcatcagaaggtgcgggagtacctgtccgagacctatgggaacaagtttgctgcccacatcagcccagcccagggctctccgaaacccccaccagccgcctccccaggggtgcgagctggacacgtgctgtcctcctccgctggcaacagtgctcccaatagccccatggccatgctgcacattggctccaaccctgagagggagttggatgatgtcattgacaacattatgcgtctggacgatgtccttggctacatcaatcctgaaatgcagatgcccaacacgctacccctgtccagcagccacctgaatgtgtacagcagcgacccccaggtcacagcctccctggtgggcgtcaccagcagctcctgccctgcggacctgacccagaagcgagagctcacagatgctgagagcagggccctggccaaggagcggcagaagaaagacaatcacaacttaattgaaaggagacgaaggttcaacatcaatgaccgcatcaaggagttgggaatgctgatccccaaggccaatgacctggacgtgcgctggaacaagggcaccatcctcaaggcctctgtggattacatccggaggatgcagaaggacctgcaaaagtccagggagctggagaaccactctcgccgcctggagatgaccaacaagcagctctggctccgtatccaggagctggagatgcaggctcgagtgcacggcctccctaccacctccccgtccggcatgaacatggctgagctggcccagcaggtggtgaagcaggagctgcctagcgaagagggcccaggggaggccctgatgctgggggctgaggtccctgaccctgagccactgccagctctgcccccgcaagccccgctgcccctgcccacccagccaccatccccattccatcacctggacttcagccacagcctgagctttgggggcagggaggacgagggtcccccgggctaccccgaacccctggcgccggggcatggctccccattccccagcctgtccaagaaggatctggacctcatgctcctggacgactcactgctaccgctggcctctgatccacttctgtccaccatgtcccccgaggcctccaaggccagcagccgccggagcagcttcagcatggaggagggcgatgtgctg

SEQ ID NO: 5099 - DNA, 1146 bp, Homo sapiens
  source 1..1146: mol_type = genomic DNA
atgctggacggcctaaagatggaggagaacttccaaagcgcgatcgacacctcggcctccttctcctcgctgctgggcagagcggtgagccccaagtctgtctgcgagggctgtcagcgggtcatcttggacaggtttctgctgcggctcaacgacagcttctggcatgagcagtgcgtgcagtgcgcctcctgcaaagagcccctggagaccacctgcttctaccgggacaagaagctgtactgcaagtatgactacgagaagctgtttgctgttaaatgtgggggctgcttcgaggccatcgctcccaatgagtttgttatgcgggcccagaagagtgtataccacctgagctgcttctgctgctgtgtctgcgagcgacagcttcagaagggtgatgagtttgtcctgaaggaggggcagctgctctgcaaaggggactatgagaaggagcgggagctgctcagcctggtgagcccagcagcctcagactcaggtaaaagtgatgatgaagaaagtctctgcaagtcagcccatggggcagggaaaggaactgctgaggaaggcaaggaccataagcgccccaaacgtccgagaaccatcttgacaactcaacagaggcgagcattcaaggcctcatttgaagtatcctccaagccctgcaggaaggtgagagagactctggctgcagagacagggctgagtgtccgtgtcgtccaggtgtggttccaaaaccagagagcgaagatgaagaagctggccaggcgacagcagcagcagcagcaagatcagcagaacacccagaggctgagctctgctcagacaaacggtggtgggagtgctgggatggaaggaatcatgaacccctacacggctctgcccaccccacagcagctcctggccatcgagcagagtgtctacagctcagatcccttccgacagggtctcaccccaccccagatgcctggagaccacatgcacccttatggtgccgagccccttttccatgacctggatagcgacgacacctccctcagtaacctgggtgattgtttcctagcaacctcagaagctgggcctctgcagtccagagtgggaaaccccattgaccatctgtactccatgcagaattcttacttcacatct

SEQ ID NO: 5100 - DNA, 1206 bp, Homo sapiens
  source 1..1206: mol_type = genomic DNA
atggatatagcaacaggtcccgagtcgctggagaggtgcttccctcgcgggcagacggactgcgccaagatgttggacggcatcaagatggaggagcacgccctgcgccccgggcccgccactctgggggtgctgctgggctccgactgcccgcatcccgccgtctgcgagggctgccagcggcccatctccgaccgcttcctgatgcgagtcaacgagtcgtcctggcacgaggagtgtttgcagtgcgcggcgtgtcagcaagccctcaccaccagctgctacttccgggatcggaaactgtactgcaaacaagactaccaacagctcttcgcggccaagtgcagcggctgcatggagaagatcgcccccaccgagttcgtgatgcgggcgctggagtgcgtgtaccacctgggctgcttctgctgctgcgtgtgtgaacggcagctacgcaagggcgacgaattcgtgctcaaggagggccagctgctgtgcaagggtgactacgagaaggagaaggacctgctcagctccgtgagccccgacgagtccgactccgtgaagagcgaggatgaagatggggacatgaagccggccaaggggcagggcagtcagagcaagggcagcggggatgacgggaaggacccgcggaggcccaagcgaccccggaccatcctcaccacgcagcagcgaagagccttcaaggcctccttcgaggtctcgtcgaagccttgccgaaaggtccgagagacactggcagctgagacgggcctcagtgtgcgcgtggtccaggtctggtttcagaaccaaagagcaaagatgaagaagctggcgcggcggcaccagcagcagcaggagcagcagaactcccagcggctgggccaggaggtcctgtccagccgcatggagggcatgatggcttcctacacgccgctggccccaccacagcagcagatcgtggccatggaacagagcccctacggcagcagcgaccccttccagcagggcctcacgccgccccaaatgccaggtgaccacatgaacccctatgggaacgactccatcttccatgacatcgacagcgatacctccttaaccagcctcagcgactgcttcctcggctcctcagacgtgggctccctgcaggcccgcgtggggaaccccatcgaccggctctactccatgcagagttcctacttcgcctcc

SEQ ID NO: 5101 - DNA, 1218 bp, Homo sapiens
  source 1..1218: mol_type = genomic DNA
atggatatagcaacaggtcccgagtcgctggagaggtgcttccctcgcgggcagacggactgcgccaagatgttggacggcatcaagatggaggagcacgccctgcgccccgggcccgccactctgggggtgctgctgggctccgactgcccgcatcccgccgtctgcgagggctgccagcggcccatctccgaccgcttcctgatgcgagtcaacgagtcgtcctggcacgaggagtgtttgcagtgcgcggcgtgtcagcaagccctcaccaccagctgctacttccgggatcggaaactgtactgcaaacaagactaccaacagctcttcgcggccaagtgcagcggctgcatggagaagatcgcccccaccgagttcgtgatgcgggcgctggagtgcgtgtaccacctgggctgcttctgctgctgcgtgtgtgaacggcagctacgcaagggcgacgaattcgtgctcaaggagggccagctgctgtgcaagggtgactacgagaaggagaaggacctgctcagctccgtgagccccgacgagtccgactccgtgaagagcgaggatgaagatggggacatgaagccggccaaggggcagggcagtcagagcaagggcagcggggatgacgggaaggacccgcggaggcccaagcgaccccggaccatcctcaccacgcagcagcgaagagccttcaaggcctccttcgaggtctcgtcgaagccttgccgaaaggtccgagagacactggcagctgagacgggcctcagtgtgcgcgtggtccaggtctggtttcagaaccaaagagcaaagatgaagaagctggcgcggcggcaccagcagcagcaggagcagcagaactcccagcggctgggccagggtgagccggggccggggcagggcctgggccaggaggtcctgtccagccgcatggagggcatgatggcttcctacacgccgctggccccaccacagcagcagatcgtggccatggaacagagcccctacggcagcagcgaccccttccagcagggcctcacgccgccccaaatgccagggaacgactccatcttccatgacatcgacagcgatacctccttaaccagcctcagcgactgcttcctcggctcctcagacgtgggctccctgcaggcccgcgtggggaaccccatcgaccggctctactccatgcagagttcctacttcgcctcc

SEQ ID NO: 5102 - DNA, 1185 bp, Homo sapiens
  source 1..1185: mol_type = genomic DNA
atggatatagcaacaggtcccgagtcgctggagaggtgcttccctcgcgggcagacggactgcgccaagatgttggacggcatcaagatggaggagcacgccctgcgccccgggcccgccactctgggggtgctgctgggctccgactgcccgcatcccgccgtctgcgagggctgccagcggcccatctccgaccgcttcctgatgcgagtcaacgagtcgtcctggcacgaggagtgtttgcagtgcgcggcgtgtcagcaagccctcaccaccagctgctacttccgggatcggaaactgtactgcaaacaagactaccaacagctcttcgcggccaagtgcagcggctgcatggagaagatcgcccccaccgagttcgtgatgcgggcgctggagtgcgtgtaccacctgggctgcttctgctgctgcgtgtgtgaacggcagctacgcaagggcgacgaattcgtgctcaaggagggccagctgctgtgcaagggtgactacgagaaggagaaggacctgctcagctccgtgagccccgacgagtccgactccgtgaagagcgaggatgaagatggggacatgaagccggccaaggggcagggcagtcagagcaagggcagcggggatgacgggaaggacccgcggaggcccaagcgaccccggaccatcctcaccacgcagcagcgaagagccttcaaggcctccttcgaggtctcgtcgaagccttgccgaaaggtccgagagacactggcagctgagacgggcctcagtgtgcgcgtggtccaggtctggtttcagaaccaaagagcaaagatgaagaagctggcgcggcggcaccagcagcagcaggagcagcagaactcccagcggctgggccaggaggtcctgtccagccgcatggagggcatgatggcttcctacacgccgctggccccaccacagcagcagatcgtggccatggaacagagcccctacggcagcagcgaccccttccagcagggcctcacgccgccccaaatgccagggaacgactccatcttccatgacatcgacagcgatacctccttaaccagcctcagcgactgcttcctcggctcctcagacgtgggctccctgcaggcccgcgtggggaaccccatcgaccggctctactccatgcagagttcctacttcgcctcc

SEQ ID NO: 5103 - DNA, 2469 bp, Homo sapiens
  source 1..2469: mol_type = genomic DNA
atggagctgtggcgccaatgcacccactggctcatccagtgccgggtgctgccgcccagccaccgcgtgacctgggatggggctcaggtgtgtgaactggcccaggccctccgggatggtgtccttctgtgtcagctgcttaacaacctgctaccccatgccatcaacctgcgtgaggtcaacctgcgcccccagatgtcccagttcctgtgccttaagaacattagaaccttcctgtccacctgctgtgagaagttcggcctcaagcggagcgagctcttcgaagcctttgacctcttcgatgtgcaggattttggcaaggtcatctacaccctgtctgctctgtcctggaccccgatcgcccagaacagggggatcatgcccttccccaccgaggaggagagtgtaggtgatgaagacatctacagtggcctgtccgaccagatcgacgacacggtggaggaggatgaggacctgtatgactgcgtggagaatgaggaggcggaaggcgacgagatctatgaggacctcatgcgctcggagcccgtgtccatgccgcccaagatgacagagtatgacaagcgctgctgctgcctgcgggagatccagcagacggaggagaagtacactgacacgctgggctccatccagcagcatttcttgaagcccctgcaacggttcctgaaacctcaagacattgagatcatctttatcaacattgaggacctgcttcgtgttcatactcacttcctaaaggagatgaaggaagccctgggcacccctggcgcagccaatctctaccaggtcttcatcaaatacaaggagaggttcctcgtctatggccgctactgcagccaggtggagtcagccagcaaacacctggaccgtgtggccgcagcccgggaggacgtgcagatgaagctggaggaatgttctcagagagccaacaacgggaggttcaccctgcgggacctgctgatggtgcctatgcagcgagttctcaaatatcacctccttctccaggagctggtgaaacacacgcaggaggcgatggagaaggagaacctgcggctggccctggatgccatgagggacctggctcagtgcgtgaacgaggtcaagcgagacaacgagacactgcgacagatcaccaatttccagctgtccattgagaacctggaccagtctctggctcactatggccggcccaagatcgacggggaactcaagatcacctcggtggaacggcgctccaagatggacaggtatgccttcctgctcgacaaagctctactcatctgtaagcgcaggggagactcctatgacctcaaggactttgtaaacctgcacagcttccaggttcgggatgactcttcaggagaccgagacaacaagaagtggagccacatgttcctcctgatcgaggaccaaggtgcccagggctatgagctgttcttcaagacaagagaattgaagaagaagtggatggagcagtttgagatggccatctccaacatctatccggagaatgccaccgccaacgggcatgacttccagatgttctcctttgaggagaccacatcctgcaaggcctgtcagatgctgcttagaggtaccttctatcagggctaccgctgccatcggtgccgggcatctgcacacaaggagtgtctggggagggtccctccatgtggccgacatgggcaagatttcccaggaactatgaagaaggacaaactacatcgcagggctcaggacaaaaagaggaatgagctgggtctgcccaagatggaggtgtttcaggaatactacgggcttcctccaccccctggagccattggaccctttctacggctcaaccctggagacattgtggagctcacgaaggctgaggctgaacagaactggtgggagggccctcctcaggacctgtctgttcatctctggtacgcaggccccatggagcgggcaggggcagagagcatcctggccaaccgctcggacgggactttcttggtgcggcagagggtgaaggatgcagcagaatttgccatcagcattaaatataacgtcgaggtcaagcacattaaaatcatgacagcagaaggactgtaccggatcacagagaaaaaggctttccgggggcttacggagctggtggagttttaccagcagaactctctaaaggattgcttcaagtctctggacaccaccttgcagttccccttcaaggagcctgaaaagagaaccatcagcaggccagcagtgggaagcacaaagtattttggcacagccaaagcccgctatgacttctgcgcccgagaccgatcagagctgtcgctcaaggagggtgacatcatcaagatccttaacaagaagggacagcaaggctggtggcgaggggagatctatggccgggttggctggttccctgccaactacgtggaggaagattattctgaatactgc

SEQ ID NO: 5104 - DNA, 2439 bp, Homo sapiens
  source 1..2439: mol_type = genomic DNA
atggagctgtggcgccaatgcacccactggctcatccagtgccgggtgctgccgcccagccaccgcgtgacctgggatggggctcaggtgtgtgaactggcccaggccctccgggatggtgtccttctgtgtcagctgcttaacaacctgctaccccatgccatcaacctgcgtgaggtcaacctgcgcccccagatgtcccagttcctgtgccttaagaacattagaaccttcctgtccacctgctgtgagaagttcggcctcaagcggagcgagctcttcgaagcctttgacctcttcgatgtgcaggattttggcaaggtcatctacaccctgtctgctctgtcctggaccccgatcgcccagaacagggggatcatgcccttccccaccgaggaggagagtgtaggtgatgaagacatctacagtggcctgtccgaccagatcgacgacacggtggaggaggatgaggacctgtatgactgcgtggagaatgaggaggcggaaggcgacgagatctatgaggacctcatgcgctcggagcccgtgtccatgccgcatttcttgaagcccctgcaacggttcctgaaacctcaagacattgagatcatctttatcaacattgaggacctgcttcgtgttcatactcacttcctaaaggagatgaaggaagccctgggcacccctggcgcagccaatctctaccaggtcttcatcaaatacaaggagaggttcctcgtctatggccgctactgcagccaggtggagtcagccagcaaacacctggaccgtgtggccgcagcccgggaggacgtgcagatgaagctggaggaatgttctcagagagccaacaacgggaggttcaccctgcgggacctgctgatggtgcctatgcagcgagttctcaaatatcacctccttctccaggagctggtgaaacacacgcaggaggcgatggagaaggagaacctgcggctggccctggatgccatgagggacctggctcagtgcgtgaacgaggtcaagcgagacaacgagacactgcgacagatcaccaatttccagctgtccattgagaacctggaccagtctctggctcactatggccggcccaagatcgacggggaactcaagatcacctcggtggaacggcgctccaagatggacaggtatgccttcctgctcgacaaagctctactcatctgtaagcgcaggggagactcctatgacctcaaggactttgtaaacctgcacagcttccaggttcgggatgactcttcaggagaccgagacaacaagaagtggagccacatgttcctcctgatcgaggaccaaggtgcccagggctatgagctgttcttcaagacaagagaattgaagaagaagtggatggagcagtttgagatggccatctccaacatctatccggagaatgccaccgccaacgggcatgacttccagatgttctcctttgaggagaccacatcctgcaaggcctgtcagatgctgcttagaggtaccttctatcagggctaccgctgccatcggtgccgggcatctgcacacaaggagtgtctggggagggtccctccatgtggccgacatgggcaagatttcccaggaactatgaagaaggacaaactacatcgcagggctcaggacaaaaagaggaatgagctgggtctgcccaagatggaggtgtttcaggaatactacgggcttcctccaccccctggagccattggaccctttctacggctcaaccctggagacattgtggagctcacgaaggctgaggctgaacagaactggtgggagggcagaaatacatctactaatgaaattggctggtttccttgtaacagggtgaagccctatgtccatggccctcctcaggacctgtctgttcatctctggtacgcaggccccatggagcgggcaggggcagagagcatcctggccaaccgctcggacgggactttcttggtgcggcagagggtgaaggatgcagcagaatttgccatcagcattaaatataacgtcgaggtcaagcacattaaaatcatgacagcagaaggactgtaccggatcacagagaaaaaggctttccgggggcttacggagctggtggagttttaccagcagaactctctaaaggattgcttcaagtctctggacaccaccttgcagttccccttcaaggagcctgaaaagagaaccatcagcaggccagcagtgggaagcacaaagtattttggcacagccaaagcccgctatgacttctgcgcccgagaccgatcagagctgtcgctcaaggagggtgacatcatcaagatccttaacaagaagggacagcaaggctggtggcgaggggagatctatggccgggttggctggttccctgccaactacgtggaggaagattattctgaatactgc

SEQ ID NO: 5105 - DNA, 2535 bp, Homo sapiens
  source 1..2535: mol_type = genomic DNA
atggagctgtggcgccaatgcacccactggctcatccagtgccgggtgctgccgcccagccaccgcgtgacctgggatggggctcaggtgtgtgaactggcccaggccctccgggatggtgtccttctgtgtcagctgcttaacaacctgctaccccatgccatcaacctgcgtgaggtcaacctgcgcccccagatgtcccagttcctgtgccttaagaacattagaaccttcctgtccacctgctgtgagaagttcggcctcaagcggagcgagctcttcgaagcctttgacctcttcgatgtgcaggattttggcaaggtcatctacaccctgtctgctctgtcctggaccccgatcgcccagaacagggggatcatgcccttccccaccgaggaggagagtgtaggtgatgaagacatctacagtggcctgtccgaccagatcgacgacacggtggaggaggatgaggacctgtatgactgcgtggagaatgaggaggcggaaggcgacgagatctatgaggacctcatgcgctcggagcccgtgtccatgccgcccaagatgacagagtatgacaagcgctgctgctgcctgcgggagatccagcagacggaggagaagtacactgacacgctgggctccatccagcagcatttcttgaagcccctgcaacggttcctgaaacctcaagacattgagatcatctttatcaacattgaggacctgcttcgtgttcatactcacttcctaaaggagatgaaggaagccctgggcacccctggcgcagccaatctctaccaggtcttcatcaaatacaaggagaggttcctcgtctatggccgctactgcagccaggtggagtcagccagcaaacacctggaccgtgtggccgcagcccgggaggacgtgcagatgaagctggaggaatgttctcagagagccaacaacgggaggttcaccctgcgggacctgctgatggtgcctatgcagcgagttctcaaatatcacctccttctccaggagctggtgaaacacacgcaggaggcgatggagaaggagaacctgcggctggccctggatgccatgagggacctggctcagtgcgtgaacgaggtcaagcgagacaacgagacactgcgacagatcaccaatttccagctgtccattgagaacctggaccagtctctggctcactatggccggcccaagatcgacggggaactcaagatcacctcggtggaacggcgctccaagatggacaggtatgccttcctgctcgacaaagctctactcatctgtaagcgcaggggagactcctatgacctcaaggactttgtaaacctgcacagcttccaggttcgggatgactcttcaggagaccgagacaacaagaagtggagccacatgttcctcctgatcgaggaccaaggtgcccagggctatgagctgttcttcaagacaagagaattgaagaagaagtggatggagcagtttgagatggccatctccaacatctatccggagaatgccaccgccaacgggcatgacttccagatgttctcctttgaggagaccacatcctgcaaggcctgtcagatgctgcttagaggtaccttctatcagggctaccgctgccatcggtgccgggcatctgcacacaaggagtgtctggggagggtccctccatgtggccgacatgggcaagatttcccaggaactatgaagaaggacaaactacatcgcagggctcaggacaaaaagaggaatgagctgggtctgcccaagatggaggtgtttcaggaatactacgggcttcctccaccccctggagccattggaccctttctacggctcaaccctggagacattgtggagctcacgaaggctgaggctgaacagaactggtgggagggcagaaatacatctactaatgaaattggctggtttccttgtaacagggtgaagccctatgtccatggccctcctcaggacctgtctgttcatctctggtacgcaggccccatggagcgggcaggggcagagagcatcctggccaaccgctcggacgggactttcttggtgcggcagagggtgaaggatgcagcagaatttgccatcagcattaaatataacgtcgaggtcaagcacattaaaatcatgacagcagaaggactgtaccggatcacagagaaaaaggctttccgggggcttacggagctggtggagttttaccagcagaactctctaaaggattgcttcaagtctctggacaccaccttgcagttccccttcaaggagcctgaaaagagaaccatcagcaggccagcagtgggaagcacaaagtattttggcacagccaaagcccgctatgacttctgcgcccgagaccgatcagagctgtcgctcaaggagggtgacatcatcaagatccttaacaagaagggacagcaaggctggtggcgaggggagatctatggccgggttggctggttccctgccaactacgtggaggaagattattctgaatactgc

SEQ ID NO: 5106 - DNA, 810 bp, Homo sapiens
  source 1..810: mol_type = genomic DNA
atgtgtgagcgcagtctctacagagcgggctatgtgggctcgcttctgaatctgcagtcgccagactctttctacttctccaacctgaggccgaatggcggccagttggccgcgcttccccctatctcctacccgcgcggcgcgctgccctgggccgccacgcccgcctcctgcgcccccgcgcagcctgcgggcgccactgccttcggcggcttctcgcagccctacctggctggctccgggcctctcggcctgcagcccccaacagccaaagacggacccgaagagcaggctaagttctatgcgcccgaagcggccgctgggccagaggagcgcggtcgtacccggccgtccttcgcccccgagtctagcctggctcctgcagtggctgctctcaaagcggccaagtatgactacgctggtgtgggtcgtgccacgccgggctccacgaccctgctccagggggctccctgcgcccctggcttcaaggacgacaccaagggcccgctcaacttgaacatgacagtgcaggcggcgggcgttgcctcttgcctgcgaccttcactgcccgacggcctgccgtggggggcggccccggggagggcccgcaagaagcggaaaccctacacgaagcagcagattgcggagttggagaacgaattcctcgtcaacgaattcatcaacaggcagaaacgcaaggaattgtccaataggctgaacctcagcgaccagcaagtcaaaatctggttccagaacaggcgtatgaagaagaagcgcgtggtgcttcgggagcaggcgctggcgctctac

SEQ ID NO: 5107 - DNA, 1029 bp, Homo sapiens
  source 1..1029: mol_type = genomic DNA
atgagccgcgccgggagctgggacatggacgggctgcgggcagacggcgggggcgccggtggcgccccggcctcttcctcctcctcatcggtggcggcggcggcggcgtcaggccagtgccgcggctttctctccgcgcctgtgttcgccgggacgcattcggggcgggcggcggcggcggcagcggcggctgcggcggcggcggcggcagcctccggctttgcgtaccccgggacctctgagcgcacgggctcttcctcgtcgtcgtcctcttctgccgttgtagcggcgcgcccggaggctcccccagccaaagagtgcccagcacccacgcctgcagcggccgctgcagcgcccccgagcgctccagcgctgggctacggctaccacttcggcaacggctactacagctgccgtatgtcgcacggcgtgggcttacagcagaatgcgctcaagtcatcgccgcacgcctcgctgggaggctttcccgtggagaagtacatggacgtgtcaggcctggcgagcagcagcgtaccggccaacgaggtgccagcgcgagccaaggaggtatccttctaccagggctatacgagcccttaccagcacgtgcccggctatatcgacatggtgtccactttcggctccggggagcctcggcacgaggcctacatctccatggaggggtaccagtcctggacgctggctaacgggtggaacagccaggtgtactgcaccaaggaccagccacaggggtcccacttttggaaatcttcctttccaggggatgtggctctaaatcagccggacatgtgcgtctaccgaagagggaggaagaagagagtgccttacaccaaactgcagcttaaagaactggagaacgagtatgccattaacaaattcattaacaaggacaagcggcggcgtatctcggctgctacgaacctatctgagagacaagtgaccatttggtttcagaaccgaagagtgaaggacaagaaaattgtctccaagctcaaagatactgtctcc

SEQ ID NO: 5108 - DNA, 1014 bp, Homo sapiens
  source 1..1014: mol_type = genomic DNA
atgaacgactttgacgagtgcggccagagcgcagccagcatgtacctgccgggctgcgcctactatgtggccccgtctgacttcgctagcaagccttcgttcctttcccaaccgtcgtcctgccagatgactttcccctactcttccaacctggctccgcacgtccagcccgtgcgcgaagtggccttccgcgactacggcctggagcgcgccaagtggccgtaccgcggcggcggcggcggcggcagcgcggggggcggcagcagcgggggcggccccggcgggggcggcggcggcgcggggggctacgctccctactacgcggcggcggcggcggcggctgcggcggccgcggcggccgaggaggcggccatgcaacgcgagcttctcccgcccgcgggccgccggccggacgtgctcttcaaggcgcctgagccggtgtgcgctgcgccggggccgccgcacggccccgcgggcgccgcctccaacttctacagcgcggtgggccgcaatggcatcttgccacagggcttcgaccagttctacgaggcagcgcccgggcccccgttcgccgggccgcagcccccgccgccacccgcgccgccacagcccgagggcgcagccgacaagggcgaccccaggaccggggctggtggcggcgggggcagtccctgcaccaaggcgacccctggctcggagcccaagggggcagcagaaggcagcggtggcgacggcgagggccccccgggagaggcgggggccgagaagagcagcagcgcagttgccccccagcggtcccggaaaaagcgctgtccctataccaagtaccagatccgcgaactggaacgcgagtttttctttaacgtgtacataaacaaagagaaaagacttcaactctctcggatgctcaacctcactgaccggcaagtcaaaatctggttccagaatcgcaggatgaaagaaaagaaactgaacagagaccgtctgcagtatttcactggaaaccccttattt

SEQ ID NO: 5109 - DNA, 1728 bp, Homo sapiens
  source 1..1728: mol_type = genomic DNA
atggatgtgaggttctaccccgcggcggccggggaccctgccagcctggacttcgcgcagtgcctggggtactacggctacagcaagtttggaaataataataactatatgaatatggctgaggcgaacaatgcgttcttcgctgccagtgagcagacattccacacaccaagccttggggacgaggaattcgaaattccaccaatcacgcctcctccagagtcagaccctgccctaggcatgccggatgtactgctaccctttcaagccctcagcgatccattgccttcccagggaagtgaattcacaccccagtttccccctcaaagcctggacctcccttccattacaatctcaagaaatctcgtggaacaagatggcgtgcttcatagcagtgggttgcatatggatcagagccacacacaagtgtcccagtaccggcaggatccctccctgatcatgcggtccatcgtccacatgaccgatgctgcgcgttctggggtcatgcctcctgcccagctcaccaccatcaaccagtctcagctcagcgcccagttggggttgaatttgggaggtgccagtatgcctcacacatctccttcacctccagcaagcaaatcagccactccctccccttccagctccatcaatgaagaggatgctgatgaagccaacagagccattggagagaaaagagctgctccagactctggcaagaagcccaagactccaaagaaaaagaaaaagaaagatcccaatgagccacagaagccagtgtcagcatatgccctgtttttcagagacacacaggctgcaattaaaggtcaaaaccccaatgcaacctttggagaggtctcaaaaattgtagcatctatgtgggacagccttggagaagaacaaaagcaggtatataaaaggaaaacagaagctgccaaaaaagaatacctgaaggccctggcggcatacagggccagcctcgtttctaaggctgctgctgagtcagcagaagcccagaccatccgttctgttcagcagaccctggcgtcgaccaatctaacatcctctctccttctcaacactccactgtctcaacatggaacagtgtcagcatcacctcagactctccagcaatccctccctaggtcaatcgctcccaaacccttaaccatgagactccccatgaaccagattgtcacatcagtcaccattgcagccaacatgccctcgaacattggggctccactgataagctccatgggaacgaccatggttggctcagcaccctccacccaagtgagtccttcggtgcaaacccagcagcatcagatgcaattgcagcagcagcagcagcagcaacaacaacagatgcaacagatgcagcagcagcaactccagcagcaccaaatgcatcagcaaatccagcagcagatgcagcagcagcatttccagcaccacatgcagcagcacctgcagcagcagcagcagcatctccagcagcaaattaatcaacagcagctgcagcagcagctgcagcagcgcctccagctgcagcagctgcaacacatgcagcaccagtctcagccttctcctcggcagcactcccctgtcgcctctcagataacatcccccatccctgccatcgggagcccccagccagcctctcagcagcaccagtcgcaaatacagtctcagacacagactcaagtattatcgcaggtcagtattttc

SEQ ID NO: 5110 - DNA, 1713 bp, Homo sapiens
  source 1..1713: mol_type = genomic DNA
atgaagtgccaacctcgctcgggagccaggcgcattgaggagagacttcattacctgataactacctatctgaaatttggaaataataataactatatgaatatggctgaggcgaacaatgcgttcttcgctgccagtgagacattccacacaccaagccttggggacgaggaattcgaaattccaccaatcacgcctcctccagagtcagaccctgccctaggcatgccggatgtactgctaccctttcaagccctcagcgatccattgccttcccagggaagtgaattcacaccccagtttccccctcaaagcctggacctcccttccattacaatctcaagaaatctcgtggaacaagatggcgtgcttcatagcagtgggttgcatatggatcagagccacacacaagtgtcccagtaccggcaggatccctccctgatcatgcggtccatcgtccacatgaccgatgctgcgcgttctggggtcatgcctcctgcccagctcaccaccatcaaccagtctcagctcagcgcccagttggggttgaatttgggaggtgccagtatgcctcacacatctccttcacctccagcaagcaaatcagccactccctccccttccagctccatcaatgaagaggatgctgatgaagccaacagagccattggagagaaaagagctgctccagactctggcaagaagcccaagactccaaagaaaaagaaaaagaaagatcccaatgagccacagaagccagtgtcagcatatgccctgtttttcagagacacacaggctgcaattaaaggtcaaaaccccaatgcaacctttggagaggtctcaaaaattgtagcatctatgtgggacagccttggagaagaacaaaagcaggtatataaaaggaaaacagaagctgccaaaaaagaatacctgaaggccctggcggcatacagggccagcctcgtttctaaggctgctgctgagtcagcagaagcccagaccatccgttctgttcagcagaccctggcgtcgaccaatctaacatcctctctccttctcaacactccactgtctcaacatggaacagtgtcagcatcacctcagactctccagcaatccctccctaggtcaatcgctcccaaacccttaaccatgagactccccatgaaccagattgtcacatcagtcaccattgcagccaacatgccctcgaacattggggctccactgataagctccatgggaacgaccatggttggctcagcaccctccacccaagtgagtccttcggtgcaaacccagcagcatcagatgcaattgcagcagcagcagcagcagcaacaacaacagatgcaacagatgcagcagcagcaactccagcagcaccaaatgcatcagcaaatccagcagcagatgcagcagcagcatttccagcaccacatgcagcagcacctgcagcagcagcagcagcatctccagcagcaaattaatcaacagcagctgcagcagcagctgcagcagcgcctccagctgcagcagctgcaacacatgcagcaccagtctcagccttctcctcggcagcactcccctgtcgcctctcagataacatcccccatccctgccatcgggagcccccagccagcctctcagcagcaccagtcgcaaatacagtctcagacacagactcaagtattatcgcaggtcagtattttc

SEQ ID NO: 5111 - DNA, 1518 bp, Homo sapiens
  source 1..1518: mol_type = genomic DNA
atggacgtccgcctgtacccctcggcgcccgcggtgggcgcgcggcccggggccgagccggccggcctggcgcacctggactattaccacggcggcaagtttgatggtgacagtgcctacgtggggatgagtgacggaaacccagagctcctgtcaaccagccagacctacaacggccagagcgagaacaacgaagactatgagatccccccgataacacctcccaacctcccggagccatccctcctgcacctgggggaccacgaagccagctaccactcgctgtgccacggcctcacccccaacggtctgctccctgcctactcctatcaggccatggacctcccagccatcatggtgtccaacatgctagcacaggacagccacctgctgtcgggccagctgcccacgatccaggagatggtccactcggaagtggctgcctatgactcgggccggcccgggcccctgctgggtcgcccggcaatgctggccagccacatgagtgccctcagccagtcccagctcatctcgcagatgggcatccggagcagcatcgcccacagctccccatcaccgccggggagcaagtcagcgaccccctctccctccagctccactcaggaagaggagtcggaagtgcatttcaagatctcgggagaaaagagaccttcagccgacccaggaaaaaaggccaagaacccgaagaagaagaaaaagaaggaccccaatgagccgcagaagcctgtgtcggcctacgcactcttcttcagagacactcaggccgccatcaagggtcagaaccccagtgccactttcggtgacgtgtccaaaatcgtggcctccatgtgggacagcctgggagaggaacagaagcaggcctacaagaggaagacagaagcagcaaagaaggaatatctgaaggccctggcagcctaccgggctagcctcgtctccaagagctccccagatcaaggtgagaccaagagcactcaggcaaacccaccagccaaaatgctcccacccaagcagcccatgtatgccatgccaggcctggcctccttcctgacgccgtcggacctgcaggccttccgcagtggggcctcccctgccagcctcgcccggacgctgggctccaagtctctgctgccaggcctcagtgcgtccccgccgccgccaccctccttcccgctcagccccacactgcaccagcagctgtcactgccccctcacgcccagggcgccctcctcagtccacctgttagcatgtccccagccccccagccccctgtcctgcccacccccatggcactccaggtgcagctggcgatgagcccctcacctccagggccacaggacttcccgcacatctctgagttccccagcagctcgggatcctgctcacctggcccatccaaccccaccagcagcggggactgggacagcagctaccccagtggggagtgtggcatcagcacctgcagcctgctccccagggacaaatcgctctacctcacc

SEQ ID NO: 5112 - DNA, 1464 bp, Homo sapiens
  source 1..1464: mol_type = genomic DNA
atgcagcagactcgcacagaggctgtcgcgggcgcgttctctcgctgcctgggcttctgtggaatgagactcgggctccttctacttgcaagacactggtgcattgcaggtgtgtttccgcagaagtttgatggtgacagtgcctacgtggggatgagtgacggaaacccagagctcctgtcaaccagccagacctacaacggccagagcgagaacaacgaagactatgagatccccccgataacacctcccaacctcccggagccatccctcctgcacctgggggaccacgaagccagctaccactcgctgtgccacggcctcacccccaacggtctgctccctgcctactcctatcaggccatggacctcccagccatcatggtgtccaacatgctagcacaggacagccacctgctgtcgggccagctgcccacgatccaggagatggtccactcggaagtggctgcctatgactcgggccggcccgggcccctgctgggtcgcccggcaatgctggccagccacatgagtgccctcagccagtcccagctcatctcgcagatgggcatccggagcagcatcgcccacagctccccatcaccgccggggagcaagtcagcgaccccctctccctccagctccactcaggaagaggagtcggaagtgcatttcaagatctcgggagaaaagagaccttcagccgacccaggaaaaaaggccaagaacccgaagaagaagaaaaagaaggaccccaatgagccgcagaagcctgtgtcggcctacgcactcttcttcagagacactcaggccgccatcaagggtcagaaccccagtgccactttcggtgacgtgtccaaaatcgtggcctccatgtgggacagcctgggagaggaacagaagcagagctccccagatcaaggtgagaccaagagcactcaggcaaacccaccagccaaaatgctcccacccaagcagcccatgtatgccatgccaggcctggcctccttcctgacgccgtcggacctgcaggccttccgcagtggggcctcccctgccagcctcgcccggacgctgggctccaagtctctgctgccaggcctcagtgcgtccccgccgccgccaccctccttcccgctcagccccacactgcaccagcagctgtcactgccccctcacgcccagggcgccctcctcagtccacctgttagcatgtccccagccccccagccccctgtcctgcccacccccatggcactccaggtgcagctggcgatgagcccctcacctccagggccacaggacttcccgcacatctctgagttccccagcagctcgggatcctgctcacctggcccatccaaccccaccagcagcggggactgggacagcagctaccccagtggggagtgtggcatcagcacctgcagcctgctccccagggacaaatcgctctacctcacc

SEQ ID NO: 5113 - DNA, 1584 bp, Homo sapiens
  source 1..1584: mol_type = genomic DNA
atggaggtggtgccagctgagattgctaagaagcctcgaacgccaacctctggtccagtaatcacgaagctgatctttgcaaaaccaattaatagtaaagcagttacaggacagacaactcaagtttcaccaccagttattgcaggtagggttctttcacagtctactcccggaactccatcaaagaccataacaatatctgaaagtggtgttattggatcaactttaaattctacaacacagacaccaaataaaatagccatctcacctttgaaatcgccaaataaggcagtgaaatcaactgtgcagaccatcactgttggaggagtgagcacatcacagtttaagacaattattcctctggcaactgctcccaatgtccagcagattcaagtgcctggaagcaagtttcattatgtccgacttgttactgccacatcagccagtagctcaacccagccagttagtcagaatcccagtacaaacactcagcctcttcagcaagcaaagccagtggttgttaatacaaccccagtgcggatgtcagttccaattgtctcagctcaggctgtcaaacaagttgttccaaaaccaatcaatccaacttcacaaatagtaactactagccagccacagcaacggcttatcatgcctgccacaccactgccacagatccagcccaacctcactaacctgccaccaggcactgtcctggcaccagctccgggaacagggaatgtgggttatgcagtgcttccagctcagtatgttactcagctacagcagtcttcatatgtatcaatagcaagcaactctacctttactggaacatctggtatccagacccaggcacggcttccattcaatggcataatcccatcagagtcggccagtcggccccgaaagccctgtaattgtacaaaatcactgtgtttgaaattgtattgtgattgctttgcaaatggtgaattttgcaacaactgcaattgtactaattgttacaacaatttggaacatgaaaatgaaaggcaaaaagcaataaaggcatgccttgacagaaatccagaagcctttaagcctaagatagggaaaggaaaggagggagaatctgatcgacgtcatagcaaagggtgtaattgcaaacgatcaggatgtcttaaaaactactgtgaatgctatgaggcaaaaataatgtgttcctcaatatgcaaatgtattggctgtaagaattttgaagaaagcccggaaaggaagacattgatgcatttggcagatgcagctgaagtaagggtacagcaacaaacagcagccaagacgaagttatcctctcaaatttcagacttgcttactaggccaacaccagctttaaatagtggaggcggaaaattgccatttacatttgtaactaaggaagtagctgaagccacatgtaattgcctccttgcccaggcagagcaggcagacaagaagggaaaatcaaaggcagcagcggaacggatgatacttgaggaattcggacgatgtttgatgagtgtcatcaactctgcaggaaaggcaaaaagtgacccttgtgccatgaattgc

SEQ ID NO: 5114 - DNA, 2247 bp, Homo sapiens
  source 1..2247: mol_type = genomic DNA
atggaggtggtgccagctgaggtgaatagtttgcttccagaggaaataatggacactggtataactttagtggatgatgatagtattgaggctgttattgtttcatccccaattcccatggagacagaactggaagaaattgtcaacataaattctactggtgactctacagccacgcccatttccacggaaccaatcacagtgtacagtaaccacactaaccaagttgcagtgaataccacaattactaaagcagattctaataccacagtgaaaccagcttttccaagtggccttcaaaaacttggtgctcagactcctgtgactatatcagccaatcagattattttaaacaaagtatcacagacatctgatcttaaacttggcaatcagacccttaaaccagatggacagaagttaattttaacaactttgggcaagtctggttcaccaattgttttagcactaccccatagccaactaccccaggctcagaaagttacaactcaggcccagtcaggagatgctaagttaccaccgcagcaaattaaagtagttaccattggagggaggccagaggtgaaacctgtcattggtgtctcagcattgaccccaggaagtcaactgattaatactacaactcagccctctgtgttacagacccaacagttaaaaacagtacagattgctaagaagcctcgaacgccaacctctggtccagtaatcacgaagctgatctttgcaaaaccaattaatagtaaagcagttacaggacagacaactcaagtttcaccaccagttattgcaggtagggttctttcacagtctactcccggaactccatcaaagaccataacaatatctgaaagtggtgttattggatcaactttaaattctacaacacagacaccaaataaaatagccatctcacctttgaaatcgccaaataaggcagtgaaatcaactgtgcagaccatcactgttggaggagtgagcacatcacagtttaagacaattattcctctggcaactgctcccaatgtccagcagattcaagtgcctggaagcaagtttcattatgtccgacttgttactgccacatcagccagtagctcaacccagccagttagtcagaatcccagtacaaacactcagcctcttcagcaagcaaagccagtggttgttaatacaaccccagtgcggatgtcagttccaattgtctcagctcaggctgtcaaacaagttgttccaaaaccaatcaatccaacttcacaaatagtaactactagccagccacagcaacggcttatcatgcctgccacaccactgccacagatccagcccaacctcactaacctgccaccaggcactgtcctggcaccagctccgggaacagggaatgtgggttatgcagtgcttccagctcagtatgttactcagctacagcagtcttcatatgtatcaatagcaagcaactctacctttactggaacatctggtatccagacccaggcacggcttccattcaatggcataatcccatcagagtcggccagtcggccccgaaagccctgtaattgtacaaaatcactgtgtttgaaattgtattgtgattgctttgcaaatggtgaattttgcaacaactgcaattgtactaattgttacaacaatttggaacatgaaaatgaaaggcaaaaagcaataaaggcatgccttgacagaaatccagaagcctttaagcctaagatagggaaaggaaaggagggagaatctgatcgacgtcatagcaaagggtgtaattgcaaacgatcaggatgtcttaaaaactactgtgaatgctatgaggcaaaaataatgtgttcctcaatatgcaaatgtattggctgtaagaattttgaagaaagcccggaaaggaagacattgatgcatttggcagatgcagctgaagtaagggtacagcaacaaacagcagccaagacgaagttatcctctcaaatttcagacttgcttactaggccaacaccagctttaaatagtggaggcggaaaattgccatttacatttgtaactaaggaagtagctgaagccacatgtaattgcctccttgcccaggcagagcaggcagacaagaagggaaaatcaaaggcagcagcggaacggatgatacttgaggaattcggacgatgtttgatgagtgtcatcaactctgcaggaaaggcaaaaagtgacccttgtgccatgaattgc

SEQ ID NO: 5115 - DNA, 1980 bp, Homo sapiens
  source 1..1980: mol_type = genomic DNA
atggaggtggtgccagctgaggtgaatagtttgcttccagaggaaataatggacactggtataactttagtggatgatgatagtattgaggctgttattgtttcatccccaattcccatggagacagaactggaagaaattgtcaacataaattctactggtgactctacagccacgcccatttccacggaaccaatcacagtgtacagtaaccacactaaccaagttgcagtgaataccacaattactaaagcagattctaataccacagtgaaaccagcttttccaagtggccttcaaaaacttggtgctcagactcctgtgactatatcagccaatcagattattttaaacaaagtatcacagacatctgatcttaaacttggcaatcagacccttaaaccagatggacagaagttaattttaacaactttgggcaagtctggttcaccaattgttttagcactaccccatagccaactaccccaggctcagaaagttacaactcaggcccagtcaggagatgctaagttaccaccgcagcaaattaaagtagttaccattggagggaggccagaggtgaaacctgtcattggtgtctcagcattgaccccaggaagtcaactgattaatactacaactcagccctctgtgttacagacccaacagttaaaaacagtacaggcagtgaaatcaactgtgcagaccatcactgttggaggagtgagcacatcacagtttaagacaattattcctctggcaactgctcccaatgtccagcagattcaagtgcctggaagcaagtttcattatgtccgacttgttactgccacatcagccagtagctcaacccagccagttagtcagaatcccagtacaaacactcagcctcttcagcaagcaaagccagtggttgttaatacaaccccagtgcggatgtcagttccaattgtctcagctcaggctgtcaaacaagttgttccaaaaccaatcaatccaacttcacaaatagtaactactagccagccacagcaacggcttatcatgcctgccacaccactgccacagatccagcccaacctcactaacctgccaccaggcactgtcctggcaccagctccgggaacagggaatgtgggttatgcagtgcttccagctcagtatgttactcagctacagcagtcttcatatgtatcaatagcaagcaactctacctttactggaacatctggtatccagacccaggcacggcttccattcaatggcataatcccatcagagtcggccagtcggccccgaaagccctgtaattgtacaaaatcactgtgtttgaaattgtattgtgattgctttgcaaatggtgaattttgcaacaactgcaattgtactaattgttacaacaatttggaacatgaaaatgaaaggcaaaaagcaataaaggcatgccttgacagaaatccagaagcctttaagcctaagatagggaaaggaaaggagggagaatctgatcgacgtcatagcaaagggtgtaattgcaaacgatcaggatgtcttaaaaactactgtgaatgctatgaggcaaaaataatgtgttcctcaatatgcaaatgtattggctgtaagaattttgaagaaagcccggaaaggaagacattgatgcatttggcagatgcagctgaagtaagggtacagcaacaaacagcagccaagacgaagttatcctctcaaatttcagacttgcttactaggccaacaccagctttaaatagtggaggcggaaaattgccatttacatttgtaactaaggaagtagctgaagccacatgtaattgcctccttgcccaggcagagcaggcagacaagaagggaaaatcaaaggcagcagcggaacggatgatacttgaggaattcggacgatgtttgatgagtgtcatcaactctgcaggaaaggcaaaaagtgacccttgtgccatgaattgc

SEQ ID NO: 5116 - DNA, 558 bp, Homo sapiens
  source 1..558: mol_type = genomic DNA
atgttcgggaaaccagacaaaatggacgttcgatgccactcggacgccgaggctgcccgggtctcgaagaacgcgcacaaggagagtcgggagagcaagggcgcggaggggaacctcccagccgccttcctcaaggagccgcagggcgccttctcagcgtcgggcgctgctgaggattgtaacaaaagtaaatccaattccgcagcggacccggattactgccgccggatcctggtccgagatgccaaggggtccatccgagagatcatcctgcccaagggcctggacttggaccggcctaagaggacgcgcacgtccttcaccgcggagcagctctatcggctggagatggagttccagcgctgccagtacgtggtgggccgcgagaggaccgagctcgcccggcagcttaacctctccgagacccaggcaaatagtgaagaaaataatgaacgattcaaacgcgggataaaaaaacaaaagaagaaaaggaagaaagagccagcaaatgatgagtctcggcgtggggactccgggggcagagggtggcagccccta

SEQ ID NO: 5117 - DNA, 1002 bp, Homo sapiens
  source 1..1002: mol_type = genomic DNA
atgttcgggaaaccagacaaaatggacgttcgatgccactcggacgccgaggctgcccgggtctcgaagaacgcgcacaaggagagtcgggagagcaagggcgcggaggggaacctcccagccgccttcctcaaggagccgcagggcgccttctcagcgtcgggcgctgctgaggattgtaacaaaagtaaatccaattccgcagcggacccggattactgccgccggatcctggtccgagatgccaaggggtccatccgagagatcatcctgcccaagggcctggacttggaccggcctaagaggacgcgcacgtccttcaccgcggagcagctctatcggctggagatggagttccagcgctgccagtacgtggtgggccgcgagaggaccgagctcgcccggcagcttaacctctccgagacccaggtgaaggtctggttccagaaccggcgcaccaagcagaagaaggaccagggcaaggactcggagctacgctcggtggtgtcggagaccgcggccacgtgcagcgtgctacggctgctggagcagggccgcctgttgtcgccgcccggcctgcctgcgctgctgccgccttgcgccacgggcgctctcggctcagcgctgcgcgggcccagcttgccggccctgggcgcgggcgccgctgcaggctcggccgccgcagccgccgccgccgccccgggcccagcgggcgctgcatccccgcacccgccggctgtgggcggtgctccaggtcccgggcccgccgggccggggggattgcacgcaggcgccccggccgcgggccacagcctcttcagcctgccggtgccctcgctgctcggctccgtcgccagccgcctgtcctccgccccgttaacaatggctggttcgctagctgggaatttgcaagaactctccgcccgatatctgagctcctcggccttcgagccttactcccggaccaacaataaagaaggggccgagaaaaaagcgctggac

SEQ ID NO: 5118 - DNA, 1746 bp, Homo sapiens
  source 1..1746: mol_type = genomic DNA
atgttgtacctggaaaacaatgcccagactcaatttagtgagccacagtacacgaacctggggctcctgaacagcatggaccagcagattcagaacggctcctcgtccaccagtccctataacacagaccacgcgcagaacagcgtcacggcgccctcgccctacgcacagcccagctccaccttcgatgctctctctccatcacccgccatcccctccaacaccgactacccaggcccgcacagtttcgacgtgtccttccagcagtcgagcaccgccaagtcggccacctggacgtattccactgaactgaagaaactctactgccaaattgcaaagacatgccccatccagatcaaggtgatgaccccacctcctcagggagctgttatccgcgccatgcctgtctacaaaaaagctgagcacgtcacggaggtggtgaagcggtgccccaaccatgagctgagccgtgaattcaacgagggacagattgcccctcctagtcatttgattcgagtagaggggaacagccatgcccagtatgtagaagatcccatcacaggaagacagagtgtgctggtaccttatgagccaccccaggttggcactgaattcacgacagtcttgtacaatttcatgtgtaacagcagttgtgttggagggatgaaccgccgtccaattttaatcattgttactctggaaaccagagatgggcaagtcctgggccgacgctgctttgaggcccggatctgtgcttgcccaggaagagacaggaaggcggatgaagatagcatcagaaagcagcaagtttcggacagtacaaagaacggtgatgcgtttcgtcagaacacacatggtatccagatgacatccatcaagaaacgaagatccccagatgatgaactgttatacttaccagtgaggggccgtgagacttatgaaatgctgttgaagatcaaagagtccctggaactcatgcagtaccttcctcagcacacaattgaaacgtacaggcaacagcaacagcagcagcaccagcacttacttcagaaacagacctcaatacagtctccatcttcatatggtaacagctccccacctctgaacaaaatgaacagcatgaacaagctgccttctgtgagccagcttatcaaccctcagcagcgcaacgccctcactcctacaaccattcctgatggcatgggagccaacattcccatgatgggcacccacatgccaatggctggagacatgaatggactcagccccacccaggcactccctcccccactctccatgccatccacctcccactgcacacccccacctccgtatcccacagattgcagcattgtcagtttcttagcgaggttgggctgttcatcatgtctggactatttcacgacccaggggctgaccaccatctatcagattgagcattactccatggatgatctggcaagtctgaaaatccctgagcaatttcgacatgcgatctggaagggcatcctggaccaccggcagctccacgaattctcctccccttctcatctcctgcggaccccaagcagtgcctctacagtcagtgtgggctccagtgagacccggggtgagcgtgttattgatgctgtgcgattcaccctccgccagaccatctctttcccaccccgagatgagtggaatgacttcaactttgacatggatgctcgccgcaataagcaacagcgcatcaaagaggagggggag

SEQ ID NO: 5119 - DNA, 1758 bp, Homo sapiens
  source 1..1758: mol_type = genomic DNA
atgttgtacctggaaaacaatgcccagactcaatttagtgagccacagtacacgaacctggggctcctgaacagcatggaccagcagattcagaacggctcctcgtccaccagtccctataacacagaccacgcgcagaacagcgtcacggcgccctcgccctacgcacagcccagctccaccttcgatgctctctctccatcacccgccatcccctccaacaccgactacccaggcccgcacagtttcgacgtgtccttccagcagtcgagcaccgccaagtcggccacctggacgtattccactgaactgaagaaactctactgccaaattgcaaagacatgccccatccagatcaaggtgatgaccccacctcctcagggagctgttatccgcgccatgcctgtctacaaaaaagctgagcacgtcacggaggtggtgaagcggtgccccaaccatgagctgagccgtgaattcaacgagggacagattgcccctcctagtcatttgattcgagtagaggggaacagccatgcccagtatgtagaagatcccatcacaggaagacagagtgtgctggtaccttatgagccaccccaggttggcactgaattcacgacagtcttgtacaatttcatgtgtaacagcagttgtgttggagggatgaaccgccgtccaattttaatcattgttactctggaaaccagagatgggcaagtcctgggccgacgctgctttgaggcccggatctgtgcttgcccaggaagagacaggaaggcggatgaagatagcatcagaaagcagcaagtttcggacagtacaaagaacggtgatggtacgaagcgcccgtttcgtcagaacacacatggtatccagatgacatccatcaagaaacgaagatccccagatgatgaactgttatacttaccagtgaggggccgtgagacttatgaaatgctgttgaagatcaaagagtccctggaactcatgcagtaccttcctcagcacacaattgaaacgtacaggcaacagcaacagcagcagcaccagcacttacttcagaaacagacctcaatacagtctccatcttcatatggtaacagctccccacctctgaacaaaatgaacagcatgaacaagctgccttctgtgagccagcttatcaaccctcagcagcgcaacgccctcactcctacaaccattcctgatggcatgggagccaacattcccatgatgggcacccacatgccaatggctggagacatgaatggactcagccccacccaggcactccctcccccactctccatgccatccacctcccactgcacacccccacctccgtatcccacagattgcagcattgtcagtttcttagcgaggttgggctgttcatcatgtctggactatttcacgacccaggggctgaccaccatctatcagattgagcattactccatggatgatctggcaagtctgaaaatccctgagcaatttcgacatgcgatctggaagggcatcctggaccaccggcagctccacgaattctcctccccttctcatctcctgcggaccccaagcagtgcctctacagtcagtgtgggctccagtgagacccggggtgagcgtgttattgatgctgtgcgattcaccctccgccagaccatctctttcccaccccgagatgagtggaatgacttcaactttgacatggatgctcgccgcaataagcaacagcgcatcaaagaggagggggag

SEQ ID NO: 5120 - DNA, 1665 bp, Homo sapiens
  source 1..1665: mol_type = genomic DNA
atgaattttgaaacttcacggtgtgccaccctacagtactgccctgacccttacatccagcgtttcgtagaaaccccagctcatttctcttggaaagaaagttattaccgatccaccatgtcccagagcacacagacaaatgaattcctcagtccagaggttttccagcatatctgggattttctggaacagcctatatgttcagttcagcccattgacttgaactttgtggatgaaccatcagaagatggtgcgacaaacaagattgagattagcatggactgtatccgcatgcaggactcggacctgagtgaccccatgtggccacagtacacgaacctggggctcctgaacagcatggaccagcagattcagaacggctcctcgtccaccagtccctataacacagaccacgcgcagaacagcgtcacggcgccctcgccctacgcacagcccagctccaccttcgatgctctctctccatcacccgccatcccctccaacaccgactacccaggcccgcacagtttcgacgtgtccttccagcagtcgagcaccgccaagtcggccacctggacgtattccactgaactgaagaaactctactgccaaattgcaaagacatgccccatccagatcaaggtgatgaccccacctcctcagggagctgttatccgcgccatgcctgtctacaaaaaagctgagcacgtcacggaggtggtgaagcggtgccccaaccatgagctgagccgtgaattcaacgagggacagattgcccctcctagtcatttgattcgagtagaggggaacagccatgcccagtatgtagaagatcccatcacaggaagacagagtgtgctggtaccttatgagccaccccaggttggcactgaattcacgacagtcttgtacaatttcatgtgtaacagcagttgtgttggagggatgaaccgccgtccaattttaatcattgttactctggaaaccagagatgggcaagtcctgggccgacgctgctttgaggcccggatctgtgcttgcccaggaagagacaggaaggcggatgaagatagcatcagaaagcagcaagtttcggacagtacaaagaacggtgatggtacgaagcgcccgtttcgtcagaacacacatggtatccagatgacatccatcaagaaacgaagatccccagatgatgaactgttatacttaccagtgaggggccgtgagacttatgaaatgctgttgaagatcaaagagtccctggaactcatgcagtaccttcctcagcacacaattgaaacgtacaggcaacagcaacagcagcagcaccagcacttacttcagaaacagacctcaatacagtctccatcttcatatggtaacagctccccacctctgaacaaaatgaacagcatgaacaagctgccttctgtgagccagcttatcaaccctcagcagcgcaacgccctcactcctacaaccattcctgatggcatgggagccaacattcccatgatgggcacccacatgccaatggctggagacatgaatggactcagccccacccaggcactccctcccccactctccatgccatccacctcccactgcacacccccacctccgtatcccacagattgcagcattgtcaggatctggcaagtc

SEQ ID NO: 5121 - DNA, 1179 bp, Homo sapiens
  source 1..1179: mol_type = genomic DNA
atgttgtacctggaaaacaatgcccagactcaatttagtgagccacagtacacgaacctggggctcctgaacagcatggaccagcagattcagaacggctcctcgtccaccagtccctataacacagaccacgcgcagaacagcgtcacggcgccctcgccctacgcacagcccagctccaccttcgatgctctctctccatcacccgccatcccctccaacaccgactacccaggcccgcacagtttcgacgtgtccttccagcagtcgagcaccgccaagtcggccacctggacgtattccactgaactgaagaaactctactgccaaattgcaaagacatgccccatccagatcaaggtgatgaccccacctcctcagggagctgttatccgcgccatgcctgtctacaaaaaagctgagcacgtcacggaggtggtgaagcggtgccccaaccatgagctgagccgtgaattcaacgagggacagattgcccctcctagtcatttgattcgagtagaggggaacagccatgcccagtatgtagaagatcccatcacaggaagacagagtgtgctggtaccttatgagccaccccaggttggcactgaattcacgacagtcttgtacaatttcatgtgtaacagcagttgtgttggagggatgaaccgccgtccaattttaatcattgttactctggaaaccagagatgggcaagtcctgggccgacgctgctttgaggcccggatctgtgcttgcccaggaagagacaggaaggcggatgaagatagcatcagaaagcagcaagtttcggacagtacaaagaacggtgatggtacgaagcgcccgtttcgtcagaacacacatggtatccagatgacatccatcaagaaacgaagatccccagatgatgaactgttatacttaccagtgaggggccgtgagacttatgaaatgctgttgaagatcaaagagtccctggaactcatgcagtaccttcctcagcacacaattgaaacgtacaggcaacagcaacagcagcagcaccagcacttacttcagaaacatctcctttcagcctgcttcaggaatgagcttgtggagccccggagagaaactccaaaacaatctgacgtcttctttagacattccaagcccccaaaccgatcagtgtaccca

SEQ ID NO: 5122 - DNA, 1461 bp, Homo sapiens
  source 1..1461: mol_type = genomic DNA
atgaattttgaaacttcacggtgtgccaccctacagtactgccctgacccttacatccagcgtttcgtagaaaccccagctcatttctcttggaaagaaagttattaccgatccaccatgtcccagagcacacagacaaatgaattcctcagtccagaggttttccagcatatctgggattttctggaacagcctatatgttcagttcagcccattgacttgaactttgtggatgaaccatcagaagatggtgcgacaaacaagattgagattagcatggactgtatccgcatgcaggactcggacctgagtgaccccatgtggccacagtacacgaacctggggctcctgaacagcatggaccagcagattcagaacggctcctcgtccaccagtccctataacacagaccacgcgcagaacagcgtcacggcgccctcgccctacgcacagcccagctccaccttcgatgctctctctccatcacccgccatcccctccaacaccgactacccaggcccgcacagtttcgacgtgtccttccagcagtcgagcaccgccaagtcggccacctggacgtattccactgaactgaagaaactctactgccaaattgcaaagacatgccccatccagatcaaggtgatgaccccacctcctcagggagctgttatccgcgccatgcctgtctacaaaaaagctgagcacgtcacggaggtggtgaagcggtgccccaaccatgagctgagccgtgaattcaacgagggacagattgcccctcctagtcatttgattcgagtagaggggaacagccatgcccagtatgtagaagatcccatcacaggaagacagagtgtgctggtaccttatgagccaccccaggttggcactgaattcacgacagtcttgtacaatttcatgtgtaacagcagttgtgttggagggatgaaccgccgtccaattttaatcattgttactctggaaaccagagatgggcaagtcctgggccgacgctgctttgaggcccggatctgtgcttgcccaggaagagacaggaaggcggatgaagatagcatcagaaagcagcaagtttcggacagtacaaagaacggtgatggtacgaagcgcccgtttcgtcagaacacacatggtatccagatgacatccatcaagaaacgaagatccccagatgatgaactgttatacttaccagtgaggggccgtgagacttatgaaatgctgttgaagatcaaagagtccctggaactcatgcagtaccttcctcagcacacaattgaaacgtacaggcaacagcaacagcagcagcaccagcacttacttcagaaacatctcctttcagcctgcttcaggaatgagcttgtggagccccggagagaaactccaaaacaatctgacgtcttctttagacattccaagcccccaaaccgatcagtgtaccca

SEQ ID NO: 5123 - DNA, 1383 bp, Homo sapiens
  source 1..1383: mol_type = genomic DNA
atgttgtacctggaaaacaatgcccagactcaatttagtgagccacagtacacgaacctggggctcctgaacagcatggaccagcagattcagaacggctcctcgtccaccagtccctataacacagaccacgcgcagaacagcgtcacggcgccctcgccctacgcacagcccagctccaccttcgatgctctctctccatcacccgccatcccctccaacaccgactacccaggcccgcacagtttcgacgtgtccttccagcagtcgagcaccgccaagtcggccacctggacgtattccactgaactgaagaaactctactgccaaattgcaaagacatgccccatccagatcaaggtgatgaccccacctcctcagggagctgttatccgcgccatgcctgtctacaaaaaagctgagcacgtcacggaggtggtgaagcggtgccccaaccatgagctgagccgtgaattcaacgagggacagattgcccctcctagtcatttgattcgagtagaggggaacagccatgcccagtatgtagaagatcccatcacaggaagacagagtgtgctggtaccttatgagccaccccaggttggcactgaattcacgacagtcttgtacaatttcatgtgtaacagcagttgtgttggagggatgaaccgccgtccaattttaatcattgttactctggaaaccagagatgggcaagtcctgggccgacgctgctttgaggcccggatctgtgcttgcccaggaagagacaggaaggcggatgaagatagcatcagaaagcagcaagtttcggacagtacaaagaacggtgatggtacgaagcgcccgtttcgtcagaacacacatggtatccagatgacatccatcaagaaacgaagatccccagatgatgaactgttatacttaccagtgaggggccgtgagacttatgaaatgctgttgaagatcaaagagtccctggaactcatgcagtaccttcctcagcacacaattgaaacgtacaggcaacagcaacagcagcagcaccagcacttacttcagaaacagacctcaatacagtctccatcttcatatggtaacagctccccacctctgaacaaaatgaacagcatgaacaagctgccttctgtgagccagcttatcaaccctcagcagcgcaacgccctcactcctacaaccattcctgatggcatgggagccaacattcccatgatgggcacccacatgccaatggctggagacatgaatggactcagccccacccaggcactccctcccccactctccatgccatccacctcccactgcacacccccacctccgtatcccacagattgcagcattgtcaggatctggcaagtc

SEQ ID NO: 5124 - DNA, 2028 bp, Homo sapiens
  source 1..2028: mol_type = genomic DNA
atgaattttgaaacttcacggtgtgccaccctacagtactgccctgacccttacatccagcgtttcgtagaaaccccagctcatttctcttggaaagaaagttattaccgatccaccatgtcccagagcacacagacaaatgaattcctcagtccagaggttttccagcatatctgggattttctggaacagcctatatgttcagttcagcccattgacttgaactttgtggatgaaccatcagaagatggtgcgacaaacaagattgagattagcatggactgtatccgcatgcaggactcggacctgagtgaccccatgtggccacagtacacgaacctggggctcctgaacagcatggaccagcagattcagaacggctcctcgtccaccagtccctataacacagaccacgcgcagaacagcgtcacggcgccctcgccctacgcacagcccagctccaccttcgatgctctctctccatcacccgccatcccctccaacaccgactacccaggcccgcacagtttcgacgtgtccttccagcagtcgagcaccgccaagtcggccacctggacgtattccactgaactgaagaaactctactgccaaattgcaaagacatgccccatccagatcaaggtgatgaccccacctcctcagggagctgttatccgcgccatgcctgtctacaaaaaagctgagcacgtcacggaggtggtgaagcggtgccccaaccatgagctgagccgtgaattcaacgagggacagattgcccctcctagtcatttgattcgagtagaggggaacagccatgcccagtatgtagaagatcccatcacaggaagacagagtgtgctggtaccttatgagccaccccaggttggcactgaattcacgacagtcttgtacaatttcatgtgtaacagcagttgtgttggagggatgaaccgccgtccaattttaatcattgttactctggaaaccagagatgggcaagtcctgggccgacgctgctttgaggcccggatctgtgcttgcccaggaagagacaggaaggcggatgaagatagcatcagaaagcagcaagtttcggacagtacaaagaacggtgatgcgtttcgtcagaacacacatggtatccagatgacatccatcaagaaacgaagatccccagatgatgaactgttatacttaccagtgaggggccgtgagacttatgaaatgctgttgaagatcaaagagtccctggaactcatgcagtaccttcctcagcacacaattgaaacgtacaggcaacagcaacagcagcagcaccagcacttacttcagaaacagacctcaatacagtctccatcttcatatggtaacagctccccacctctgaacaaaatgaacagcatgaacaagctgccttctgtgagccagcttatcaaccctcagcagcgcaacgccctcactcctacaaccattcctgatggcatgggagccaacattcccatgatgggcacccacatgccaatggctggagacatgaatggactcagccccacccaggcactccctcccccactctccatgccatccacctcccactgcacacccccacctccgtatcccacagattgcagcattgtcagtttcttagcgaggttgggctgttcatcatgtctggactatttcacgacccaggggctgaccaccatctatcagattgagcattactccatggatgatctggcaagtctgaaaatccctgagcaatttcgacatgcgatctggaagggcatcctggaccaccggcagctccacgaattctcctccccttctcatctcctgcggaccccaagcagtgcctctacagtcagtgtgggctccagtgagacccggggtgagcgtgttattgatgctgtgcgattcaccctccgccagaccatctctttcccaccccgagatgagtggaatgacttcaactttgacatggatgctcgccgcaataagcaacagcgcatcaaagaggagggggag

SEQ ID NO: 5125 - DNA, 915 bp, Homo sapiens
  source 1..915: mol_type = genomic DNA
atgagtgtggatccagcttgtccccaaagcttgccttgctttgaagcatccgactgtaaagaatcttcacctatgcctgtgatttgtgggcctgaagaaaactatccatccttgcaaatgtcttctgctgagatgcctcacacggagactgtctctcctcttccttcctccatggatctgcttattcaggacagccctgattcttccaccagtcccaaaggcaaacaacccacttctgcagagaagagtgtcgcaaaaaaggaagacaaggtcccggtcaagaaacagaagaccagaactgtgttctcttccacccagctgtgtgtactcaatgatagatttcagagacagaaatacctcagcctccagcagatgcaagaactctccaacatcctgaacctcagctacaaacaggtgaagacctggttccagaaccagagaatgaaatctaagaggtggcagaaaaacaactggccgaagaatagcaatggtgtgacgcagaaggcctcagcacctacctaccccagcctttactcttcctaccaccagggatgcctggtgaacccgactgggaaccttccaatgtggagcaaccagacctggaacaattcaacctggagcaaccagacccagaacatccagtcctggagcaaccactcctggaacactcagacctggtgcacccaatcctggaacaatcaggcctggaacagtcccttctataactgtggagaggaatctctgcagtcctgcatgcagttccagccaaattctcctgccagtgacttggaggctgccttggaagctgctggggaaggccttaatgtaatacagcagaccactaggtattttagtactccacaaaccatggatttattcctaaactactccatgaacatgcaacctgaagacgtg

SEQ ID NO: 5126 - DNA, 867 bp, Homo sapiens
  source 1..867: mol_type = genomic DNA
atgagtgtggatccagcttgtccccaaagcttgccttgctttgaagcatccgactgtaaagaatcttcacctatgcctgtgatttgtgggcctgaagaaaactatccatccttgcaaatgtcttctgctgagatgcctcacacggagactgtctctcctcttccttcctccatggatctgcttattcaggacagccctgattcttccaccagtcccaaaggcaaacaacccacttctgcagagaagagtgtcgcaaaaaaggaagacaaggtcccggtcaagaaacagaagaccagaactgtgttctcttccacccagctgtgtgtactcaatgatagatttcagagacagaaatacctcagcctccagcagatgcaagaactctccaacatcctgaacctcagctacaaacaggtgaagacctggttccagaaccagagaatgaaatctaagaggtggcagaaaaacaactggccgaagaatagcaatggtgtgacgcagggatgcctggtgaacccgactgggaaccttccaatgtggagcaaccagacctggaacaattcaacctggagcaaccagacccagaacatccagtcctggagcaaccactcctggaacactcagacctggtgcacccaatcctggaacaatcaggcctggaacagtcccttctataactgtggagaggaatctctgcagtcctgcatgcagttccagccaaattctcctgccagtgacttggaggctgccttggaagctgctggggaaggccttaatgtaatacagcagaccactaggtattttagtactccacaaaccatggatttattcctaaactactccatgaacatgcaacctgaagacgtg

SEQ ID NO: 5127 - DNA, 1437 bp, Homo sapiens
  source 1..1437: mol_type = genomic DNA
atggagcgggacgaaccgccgcctagcggagggggaggcggcgggggctcggcggggttcctggagcctcccgccgcgctccctccgccgccgcgcaacggtttctgtcaggatgaattggcagagcttgacccaggcactatttctgtttcagatgatcgggctgaacaacgaacctgtctcatttgtggggaccgcgctacaggcttgcactatgggatcatctcctgtgagggctgcaaagggtttttcaagcggagcatttgcaacaaacgggtatatcgatgcagtcgtgacaagaactgtgtcatgtctcggaagcagaggaacaggtgccagtactgccgcctgctcaaatgcctccagatggggatgaaccggaaggctatcagagaagatggcatgcctggaggccggaataagagcattgggccagtccagatatcggaagaagaaatcgaaaggatcatgtctgggcaggagtttgaggaagaggccaatcactggagcaaccatggtgatagtgaccacagttcccctgggaacagggcttcggagagcaaccagccctcaccaggctccacactgtcttccaggtctgtggaactgaatggattcatggccttcagggaacagtacatgggaatgtctgtgcctccacattaccaatatataccgcacctttttagctattctggccactcaccacttctgccccaacaagctcgcagcctggatccccagtcatacagtctgattcaccagctgttatcagccgaggacctggaaccattgggcacgcccatgttgattgaagatggatacgctgtgacacaggcagaactatttgccctgctttgccgcctggccgacgagctgctctttaggcagattgcctggatcaagaaactgcctttcttctgcgagctctcaatcaaggattacacgtgcctcttgagctctacgtggcaggagctaatcctgctgtcttccctcaccgtttacagcaagcagatctttggggaactggctgatgtcactgccaagtactcgccctccgatgaagaactacacagatttagtgatgaagggatggaggtgatcgagcggctcatctacctctatcacaagttccatcagctaaaggtcagcaacgaggagtatgcttgcatgaaagcaattaacttcctaaatcaagatatcaggggtctgaccagtgcctcacagctggaacaattgaataaacgatactggtacatttgccaggattttactgaatataaatacacacatcagccgaaccgctttcctgatctcatgatgtgcttacctgagattcgatatattgcaggaaagatggtgaatgtgcccctggagcagctgcccctcctctttaaggtggtgctgcattcctgcaagaccagtgtgggcaaggaa

SEQ ID NO: 5128 - DNA, 1428 bp, Homo sapiens
  source 1..1428: mol_type = genomic DNA
atggagcgggacgaaccgccgcctagcggagggggaggcggcgggggctcggcggggttcctggagcctcccgccgcgctccctccgccgccgcgcaacggtttctgtcaggatgaattggcagagcttgacccaggcactaatgatcgggctgaacaacgaacctgtctcatttgtggggaccgcgctacaggcttgcactatgggatcatctcctgtgagggctgcaaagggtttttcaagcggagcatttgcaacaaacgggtatatcgatgcagtcgtgacaagaactgtgtcatgtctcggaagcagaggaacaggtgccagtactgccgcctgctcaaatgcctccagatggggatgaaccggaaggctatcagagaagatggcatgcctggaggccggaataagagcattgggccagtccagatatcggaagaagaaatcgaaaggatcatgtctgggcaggagtttgaggaagaggccaatcactggagcaaccatggtgatagtgaccacagttcccctgggaacagggcttcggagagcaaccagccctcaccaggctccacactgtcttccagtaggtctgtggaactgaatggattcatggccttcagggaacagtacatgggaatgtctgtgcctccacattaccaatatataccgcacctttttagctattctggccactcaccacttctgccccaacaagctcgcagcctggatccccagtcatacagtctgattcaccagctgttatcagccgaggacctggaaccattgggcacgcccatgttgattgaagatggatacgctgtgacacaggcagaactatttgccctgctttgccgcctggccgacgagctgctctttaggcagattgcctggatcaagaaactgcctttcttctgcgagctctcaatcaaggattacacgtgcctcttgagctctacgtggcaggagctaatcctgctgtcttccctcaccgtttacagcaagcagatctttggggaactggctgatgtcactgccaagtactcgccctccgatgaagaactacacagatttagtgatgaagggatggaggtgatcgagcggctcatctacctctatcacaagttccatcagctaaaggtcagcaacgaggagtatgcttgcatgaaagcaattaacttcctaaatcaagatatcaggggtctgaccagtgcctcacagctggaacaattgaataaacgatactggtacatttgccaggattttactgaatataaatacacacatcagccgaaccgctttcctgatctcatgatgtgcttacctgagattcgatatattgcaggaaagatggtgaatgtgcccctggagcagctgcccctcctctttaaggtggtgctgcattcctgcaagaccagtgtgggcaaggaa

SEQ ID NO: 5129 - DNA, 1440 bp, Homo sapiens
  source 1..1440: mol_type = genomic DNA
atggagcgggacgaaccgccgcctagcggagggggaggcggcgggggctcggcggggttcctggagcctcccgccgcgctccctccgccgccgcgcaacggtttctgtcaggatgaattggcagagcttgacccaggcactatttctgtttcagatgatcgggctgaacaacgaacctgtctcatttgtggggaccgcgctacaggcttgcactatgggatcatctcctgtgagggctgcaaagggtttttcaagcggagcatttgcaacaaacgggtatatcgatgcagtcgtgacaagaactgtgtcatgtctcggaagcagaggaacaggtgccagtactgccgcctgctcaaatgcctccagatggggatgaaccggaaggctatcagagaagatggcatgcctggaggccggaataagagcattgggccagtccagatatcggaagaagaaatcgaaaggatcatgtctgggcaggagtttgaggaagaggccaatcactggagcaaccatggtgatagtgaccacagttcccctgggaacagggcttcggagagcaaccagccctcaccaggctccacactgtcttccagtaggtctgtggaactgaatggattcatggccttcagggaacagtacatgggaatgtctgtgcctccacattaccaatatataccgcacctttttagctattctggccactcaccacttctgccccaacaagctcgcagcctggatccccagtcatacagtctgattcaccagctgttatcagccgaggacctggaaccattgggcacgcccatgttgattgaagatggatacgctgtgacacaggcagaactatttgccctgctttgccgcctggccgacgagctgctctttaggcagattgcctggatcaagaaactgcctttcttctgcgagctctcaatcaaggattacacgtgcctcttgagctctacgtggcaggagctaatcctgctgtcttccctcaccgtttacagcaagcagatctttggggaactggctgatgtcactgccaagtactcgccctccgatgaagaactacacagatttagtgatgaagggatggaggtgatcgagcggctcatctacctctatcacaagttccatcagctaaaggtcagcaacgaggagtatgcttgcatgaaagcaattaacttcctaaatcaagatatcaggggtctgaccagtgcctcacagctggaacaattgaataaacgatactggtacatttgccaggattttactgaatataaatacacacatcagccgaaccgctttcctgatctcatgatgtgcttacctgagattcgatatattgcaggaaagatggtgaatgtgcccctggagcagctgcccctcctctttaaggtggtgctgcattcctgcaagaccagtgtgggcaaggaa

SEQ ID NO: 5130 - DNA, 1425 bp, Homo sapiens
  source 1..1425: mol_type = genomic DNA
atggagcgggacgaaccgccgcctagcggagggggaggcggcgggggctcggcggggttcctggagcctcccgccgcgctccctccgccgccgcgcaacggtttctgtcaggatgaattggcagagcttgacccaggcactaatgatcgggctgaacaacgaacctgtctcatttgtggggaccgcgctacaggcttgcactatgggatcatctcctgtgagggctgcaaagggtttttcaagcggagcatttgcaacaaacgggtatatcgatgcagtcgtgacaagaactgtgtcatgtctcggaagcagaggaacaggtgccagtactgccgcctgctcaaatgcctccagatggggatgaaccggaaggctatcagagaagatggcatgcctggaggccggaataagagcattgggccagtccagatatcggaagaagaaatcgaaaggatcatgtctgggcaggagtttgaggaagaggccaatcactggagcaaccatggtgatagtgaccacagttcccctgggaacagggcttcggagagcaaccagccctcaccaggctccacactgtcttccaggtctgtggaactgaatggattcatggccttcagggaacagtacatgggaatgtctgtgcctccacattaccaatatataccgcacctttttagctattctggccactcaccacttctgccccaacaagctcgcagcctggatccccagtcatacagtctgattcaccagctgttatcagccgaggacctggaaccattgggcacgcccatgttgattgaagatggatacgctgtgacacaggcagaactatttgccctgctttgccgcctggccgacgagctgctctttaggcagattgcctggatcaagaaactgcctttcttctgcgagctctcaatcaaggattacacgtgcctcttgagctctacgtggcaggagctaatcctgctgtcttccctcaccgtttacagcaagcagatctttggggaactggctgatgtcactgccaagtactcgccctccgatgaagaactacacagatttagtgatgaagggatggaggtgatcgagcggctcatctacctctatcacaagttccatcagctaaaggtcagcaacgaggagtatgcttgcatgaaagcaattaacttcctaaatcaagatatcaggggtctgaccagtgcctcacagctggaacaattgaataaacgatactggtacatttgccaggattttactgaatataaatacacacatcagccgaaccgctttcctgatctcatgatgtgcttacctgagattcgatatattgcaggaaagatggtgaatgtgcccctggagcagctgcccctcctctttaaggtggtgctgcattcctgcaagaccagtgtgggcaaggaa

SEQ ID NO: 5131 - DNA, 1569 bp, Homo sapiens
  source 1..1569: mol_type = genomic DNA
atgctggagaccttccggaacctggcctcagtagatgatgggactcaatttaaagccaatgggtcagtttctctgcaggatatgtacgggcaagaaaaatctaaggaacagacaataccaaacttcacaggaaataattcctgtgcctacactttagaaaaaaattgtgaaggctatggcactgaagaccaccacaaaaatctgagaaatcatatggtggacagattctgtacacataatgaaggtaatcaatatggagaagccatccatcaaatgccagatcttaccctgcacaagaaagtttctgctggagaaaaaccatatgaatgcaccaagtgcaggacagtcttcacgcatctttcttctcttaaaaggcacgtcaagtctcactgtggacgaaaagcacctccaggtgaggaatgtaagcaggcctgcatttgtccctcacacctacacagtcacggaagaactgacactgaggagaagccgtataagtgtcaagcatgtgggcaaactttccaacatcctcgttacctctcccaccacgtaaagactcacacagcagagaaaacctacaaatgcgagcagtgtcggatggcgtttaatgggttcgcaagcttcactagacatgtgagaactcacacaaaagacaggccatataaatgtcaggaatgtgggagagccttcatttatccctcgacatttcaaagacacatgacaacacacactggagagaagccctataaatgtcagcactgtgggaaagccttcacttacccccaggcttttcaaagacatgagaagacgcacacgggagagaagccctatgaatgcaagcagtgtgggaaaacattcagttggtctgaaaccttgcgagtccacatgaggatccacactggggacaaactctataaatgtgaacactgtgggaaggcttttacctcttccagatcattccaaggtcatttgaggacgcacactggagagaaaccttatgagtgtaaacaatgtgggaaagccttcacttggtcctcaacgtttagagaacatgtgagaattcacacgcaagagcagctctataaatgtgaacaatgtgggaaggcttttacctcttccagatcattccgaggtcatttgaggacgcacactggagagaagccttatgagtgtaaacaatgtggaaaaaccttcacttggtcctcaacgtttagagaacatgtgagaattcacacgcaagagcagctccataaatgtgaacactgtgggaaggcctttacctcttccagagcattccaaggtcatttgaggatgcacactggagagaagccttatgagtgtaaacaatgtggaaaaaccttcacttggtcctcaaccttacataatcatgtgaggatgcacactggagagaaacctcacaaatgtaaacaatgtgggatgtccttcaagtggcactcctccttccggaaccatctgaggatgcacacaggacagaaatcccacgaatgtcagtcatactcaaaagccttcagttgccaagtcattctttctaaaaccagtgagagcacacac

SEQ ID NO: 5132 - DNA, 405 bp, Homo sapiens
  source 1..405: mol_type = genomic DNA
atgttccgagacttcggggaacccggcccgagctccgggaacggcggcgggtacggcggccccgcgcagcccccggccgcagcgcaggcagcccagcagaagttccacctggtgccaagcatcaacaccatgagtggcagtcaggagctgcagtggatggtacagcctcatttcctggggcccagcagttaccccaggcctctgacctaccctcagtacagccccccacaaccccggccaggagtcatccgggccctggggccgcctccaggggtacgtcgaaggccttgtgaacagcccggaggaagaggagcgccgccgagtaaggcgcgagcggaacaagctggctgcggccaagtgcaggaaccggaggaaggaactgaccgacttcctgcaggcggagac

SEQ ID NO: 5133 - DNA, 705 bp, Homo sapiens
  source 1..705: mol_type = genomic DNA
atgttccgagacttcggggaacccggcccgagctccgggaacggcggcgggtacggcggccccgcgcagcccccggccgcagcgcaggcagcccagcagaagttccacctggtgccaagcatcaacaccatgagtggcagtcaggagctgcagtggatggtacagcctcatttcctggggcccagcagttaccccaggcctctgacctaccctcagtacagccccccacaaccccggccaggagtcatccgggccctggggccgcctccaggggtacgtcgaaggccttgtgaacaggagactgacaaactggaagatgagaaatctgggctgcagcgagagattgaggagctgcagaagcagaaggagcgcctagagctggtgctggaagcccaccgacccatctgcaaaatcccggaaggagccaaggagggggacacaggcagtaccagtggcaccagcagcccaccagccccctgccgccctgtaccttgtatctccctttccccagggcctgtgcttgaacctgaggcactgcacacccccacactcatgaccacaccctccctaactcctttcacccccagcctggtcttcacctaccccagcactcctgagccttgtgcctcagctcatcgcaagagtagcagcagcagcggagacccatcctctgacccccttggctctccaaccctcctcgctttg

SEQ ID NO: 5134 - DNA, 507 bp, Homo sapiens
  source 1..507: mol_type = genomic DNA
atgttccgagacttcggggaacccggcccgagctccgggaacggcggcgggtacggcggccccgcgcagcccccggccgcagcgcaggcagcccagcaggagactgacaaactggaagatgagaaatctgggctgcagcgagagattgaggagctgcagaagcagaaggagcgcctagagctggtgctggaagcccaccgacccatctgcaaaatcccggaaggagccaaggagggggacacaggcagtaccagtggcaccagcagcccaccagccccctgccgccctgtaccttgtatctccctttccccagggcctgtgcttgaacctgaggcactgcacacccccacactcatgaccacaccctccctaactcctttcacccccagcctggtcttcacctaccccagcactcctgagccttgtgcctcagctcatcgcaagagtagcagcagcagcggagacccatcctctgacccccttggctctccaaccctcctcgctttg

SEQ ID NO: 5135 - DNA, 1470 bp, Homo sapiens
  source 1..1470: mol_type = genomic DNA
atgggtccagtcatgcctcccagtaagaagccagaaagctcaggaattagtgtctccagtggactgagtcagtgttacgggggcagcggtttctccaaggcccttcaggaagacgatgacctcgacttttctctgcctgacatccgattagaagagggggccatggaagatgaagagctgaccaacctgaactggctgcacgagagcaagaacttgctgaagagctttggggagtcggtcctcaggagtgtcagccccgtccaggacctggacgatgacacccccccatcccctgcccactctgacatgccctacgatgccaggcagaaccccaactgcaaacccccctactccttcagctgcctcatatttatggccatcgaggactctccaaccaagcgcctgccagtgaaggatatctacaactggatcttggaacattttccgtattttgcaaatgcacctactgggtggaaaaactcagtgagacacaatttatcattgaataagtgttttaagaaagtggacaaagagaggagtcagagtattgggaaagggtcgttgtggtgcatagacccagagtatagacaaaatctaattcaggctttgaaaaagacaccttatcacccacacccacacgtgttcaatacacctcccacctgtcctcaggcatatcaaagcacatcaggtccacccatctggccgggcagtaccttcttcaagagaaatggagcccttctccaagatcctgacattgatgctgccagtgccatgatgcttttgaatactccccctgagatacaagcaggttttcctccaggagtgatccaaaatggagcgcgggtcctgagccgagggctgtttcctggcgtgcggccgctgccaatcactcccattggggtgacagcggccatgaggaatggcatcaccagctgccggatgcggactgagagtgagccatcttgtggctccccagtggtcagcggagaccccaaggaggatcacaactacagcagtgccaagtcctccaacgcccggagcacctcgcccaccagcgactccatctcctcctcctcctcctcagccgacgaccactatgagtttgccaccaaggggagccaggagggcagcgagggcagcgaggggagcttccggagccacgagagccccagcgacacggaagaggacgacaggaagcacagccagaaggagcccaaggattctctgggggacagcgggtacgcatcccagcacaagaagcgccagcacttcgccaaggccaggaaggtccccagcgacacactgcccctcaaaaagagacgcaccgaaaagccccccgagagcgatgatgaggagatgaaagaagcggcagggtccctcctgcacttagcagggatccggtcctgtttgaataacatcaccaatcggacggcaaaggggcagaaagagcaaaaggaaaccacaaaaaat

SEQ ID NO: 5136 - DNA, 810 bp, Homo sapiens
  source 1..810: mol_type = genomic DNA
atgcagtacccgcaccccgggccggcggcgggcgccgtgggggtgccgctgtacgcgcccacgccgctgctgcaacccgcacacccgacgcccttttacatcgaggacatcctgggccgcgggcccgccgcgcccacgcccgcccccacgctgccgtcccccaactcctccttcaccagcctcgtgtccccctaccggaccccggtgtacgagcccacgccgatccatccagccttctcgcaccactccgccgccgcgctggccgctgcctacggacccggcggcttcgggggccctctgtaccccttcccgcggacggtgaacgactacacgcacgccctgctccgccacgaccccctgggcaaacctctactctggagccccttcttgcagaggcctctgcataaaaggaaaggcggccaggtgagattctccaacgaccagaccatcgagctggagaagaaattcgagacgcagaaatatctctctccgcccgagaggaagcgtctggccaagatgctgcagctcagcgagagacaggtcaaaacctggtttcagaatcgacgcgctaaatggaggagactaaaacaggagaaccctcaaagcaataaaaaagaagaactggaaagtttggacagttcctgtgatcagaggcaagatttgcccagtgaacagaataaaggtgcttctttggatagctctcaatgttcgccctcccctgcctcccaggaagaccttgaatcagagatttcagaggattctgatcaggaagtggacattgagggcgataaaagctattttaatgctgga

SEQ ID NO: 5137 - DNA, 840 bp, Homo sapiens
  source 1..840: mol_type = genomic DNA
atgtgcccgcctcaggcacaggcagaggtgggccccaccatgactgagaaggcagagatggtgtgtgcccccagcccagcgcctgccccaccccctaagcctgcctcgcctgggcccccgcaggtggaggaggtgggccaccgaggaggctcctcgccccccaggctgccacctggtgtaccagtgatcagcctgggccacagcaggcccccaggggtagccatgcccaccacagagctgggcactctgcggcccccgctgctgcaactctccaccctgggaactgccccgcccactttggccctgcactaccaccctcaccccttcctcaacagtgtctacattgggccagcaggaccttttagcatcttccctagcagccggttgaagcggagaccaagccactgtgagctggacctggctgaggggcaccagccccagaaggtggcccggcgcgtgttcaccaacagccgggagcgctggcggcagcagaacgttaacggcgccttcgccgagctgaggaagctgctgccgacgcacccgcccgaccggaagctgagcaagaacgaggtgctccgcctagccatgaagtacatcggcttcctggtgcggctgctgcgcgaccaagccgcagctctggccgcaggccccacccctcccgggcctcgcaaacggccggtgcaccgggtcccagacgacggcgcccgccggggatccggacgcagggccgaggcggcagcgcgctcgcagcccgcgcccccggccgaccccgacggcagccccggtggagcggcccggcccatcaagatggagcaaaccgctttgagcccagaggtgcgg

SEQ ID NO: 5138 - DNA, 3204 bp, Homo sapiens
  source 1..3204: mol_type = genomic DNA
atgttcgaggacaagccccacgctgagggggcggcggtggtcgccgcagccggggaggcgctacaggccctgtgccaggagctgaacctggacgaggggagcgcggccgaagccctggacgactttactgccatccgaggcaactacagcctagagggagaagttacacactggttggcatgttcattatatgttgcatgccgcaaaagcattattcccacggttggaaagggtatcatggaaggcaactgtgtttcacttaccagaatactacgttcagctaaattaagtttaatacaattttttagtaaaatgaagaaatggatggacatgtcaaatctaccacaagaatttcgtgaacgtatagaaaggctagagagaaattttgaggtgtctactgtaatattcaaaaaatatgagccaatttttttagatatatttcaaaatccatatgaagaaccaccaaagttaccacgaagccggaagcagaggaggattccttgcagtgttaaggatctgtttaatttctgttggacactttttgtttatactaagggtaattttcggatgattggggatgacttagtaaactcttatcatttacttctatgctgcttggatctgatttttgccaatgcgattatgtgcccaaatagacaagacttgctaaatccatcatttaaaggtttaccatctgattttcatactgctgactttacggcttctgaagagccaccctgcatcattgctgtactgtgtgaactgcatgatggacttctcgtagaagcaaaaggaataaaggagcactactttaagccatatatttcaaaactctttgacaggaagatattaaaaggagaatgcctcctggacctttcaagttttactgataatagcaaagcagtgaataaggagtatgaagagtatgttctaactgttggtgattttgatgagaggatctttttgggagcagacgcagaagaggaaattggaacacctcgaaagttcactcgtgacaccccattagggaaactgacagcacaggctaatgtggagtataaccttcaacagcactttgaaaaaaaaaggtcatttgcaccttctaccccactgaccggacggagatatttacgagaaaaagaagcagtcattactcctgttgcatcagccacccaaagtgtgagccggttacagagtattgtggctggtctgaaaaatgcaccaagtgaccaacttataaatatttttgaatcttgtgtgcgtaatcctgtggaaaacattatgaaaatactaaaaggaataggagagactttctgtcaacactatactcaatcaacagatgaacagccaggatctcacatagactttgctgtaaacagactaaagctggcagaaattttgtattataaaatactagagactgtaatggttcaggaaacacgaagacttcatggaatggacatgtcagttcttttagagcaagatatatttcatcgttccttgatggcttgttgtttggaaattgtgctctttgcctatagctcacctcgtacttttccttggattattgaagttctcaacttgcaaccattttacttttataaggttattgaggtggtgatccgctcagaagaggggctctcaagggacatggtgaaacacctaaacagcattgaagaacagattttggagagtttagcatggagtcacgattctgcactgtgggaggctctccaggtttctgcaaacaaagttcctacctgtgaagaagttatattcccaaataactttgaaacaggaaatggaggaaatgtgcagggacatcttcccctgatgccaatgtctcctctaatgcacccaagagtcaaggaagttcgaactgacagtgggagtcttcgaagagatatgcaaccattgtctccaatttctgtccatgaacgctacagttctcctaccgcagggagtgctaagagaagactctttggagaggaccccccaaaggaaatgcttatggacaagatcataacagaaggaacaaaattgaaaatcgctccttcttcaagcattactgctgaaaatgtatcaattttacctggtcaaactcttctaacaatggccacagccccagtaacaggaacaacaggacataaagttacaattccattacatggtgtcgcaaatgatgctggagagatcacactgatacctctttccatgaatacaaatcaggagtccaaagtcaagagtcctgtatcacttactgctcattcattaattggtgcttctccaaaacagaccaatctgactaaagcacaagaggtacattcaactggaataaacaggccaaagagaactgggtccttagcactattttacagaaaggtctatcatttggcaagtgtacgcttacgtgatctatgtctaaaactggatgtttcaaatgagttacgaaggaagatatggacgtgttttgaattcactttagttcactgtcctgatctaatgaaagacaggcatttggatcagctcctcctttgtgccttttatatcatggcaaaggtaacaaaagaagaaagaacttttcaagaaattatgaaaagttataggaatcagccccaagctaatagtcacgtatatagaagtgttctgctgaaaagtattccaagagaagttgtggcatataataaaaatataaatgatgactttgaaatgatagattgtgacttagaagatgctacaaaaacacctgactgttccagtggaccagtgaaagaggaaagaggtgatcttataaaattttacaatacaatatatgtaggaagagtgaagtcatttgcactgaaatacgacttggcgaatcaggaccatatgatggatgctccaccactctctccttttccacatattaaacaacagccaggctcaccacgccgcatttcccagcagcactccatttatatttccccgcacaagaatgggtcaggccttacaccaagaagcgctctgctgtacaagttcaatggcagcccttctaagagtttgaaagatatcaacaacatgataaggcaaggtgagcagagaaccaagaagcgagtaatagccatcgatagtgatgcagaatcccctgccaaacgcgtctgtcaagaaaatgatgacgttttactgaaacgactacaggatgttgtcagtgaaagagcaaatcat

SEQ ID NO: 5139 - DNA, 3042 bp, Homo sapiens
  source 1..3042: mol_type = genomic DNA
atgttcgaggacaagccccacgctgagggggcggcggtggtcgccgcagccggggaggcgctacaggccctgtgccaggagctgaacctggacgaggggagcgcggccgaagccctggacgactttactgccatccgaggcaactacagcctagagggagaagttacacactggttggcatgttcattatatgttgcatgccgcaaaagcattattcccacggttggaaagggtatcatggaaggcaactgtgtttcacttaccagaatactacgttcagctaaattaagtttaatacaattttttagtaaaatgaagaaatggatggacatgtcaaatctaccacaagaatttcgtgaacgtatagaaaggctagagagaaattttgaggtgtctactgtaatattcaaaaaatatgagccaatttttttagatatatttcaaaatccatatgaagaaccaccaaagttaccacgaagccggaagcagaggaggattccttgcagtgttaaggatctgtttaatttctgttggacactttttgtttatactaagggtaattttcggatgattggggatgacttagtaaactcttatcatttacttctatgctgcttggatctgatttttgccaatgcgattatgtgcccaaatagacaagacttgctaaatccatcatttaaaggtttaccatctgattttcatactgctgactttacggcttctgaagagccaccctgcatcattgctgtactgtgtgaactgcatgatggacttctcgtagaagcaaaaggaataaaggagcactactttaagccatatatttcaaaactctttgacaggaagatattaaaaggagaatgcctcctggacctttcaagttttactgataatagcaaagcagtgaataaggagtatgaagagtatgttctaactgttggtgattttgatgagaggatctttttgggagcagacgcagaagaggaaattggaacacctcgaaagttcactcgtgacaccccattagggaaactgacagcacaggctaatgtggagtataaccttcaacagcactttgaaaaaaaaaggtcatttgcaccttctaccccactgaccggacggagatatttacgagaaaaagaagcagtcattactcctgttgcatcagccacccaaagtgtgagccggttacagagtattgtggctggtctgaaaaatgcaccaagtgaccaacttataaatatttttgaatcttgtgtgcgtaatcctgtggaaaacattatgaaaatactaaaaggaataggagagactttctgtcaacactatactcaatcaacagatgaacagccaggatctcacatagactttgctgtaaacagactaaagctggcagaaattttgtattataaaatactagagactgtaatggttcaggaaacacgaagacttcatggaatggacatgtcagttcttttagagcaagatatatttcatcgttccttgatggcttgttgtttggaaattgtgctctttgcctatagctcacctcgtacttttccttggattattgaagttctcaacttgcaaccattttacttttataaggttattgaggtggtgatccgctcagaagaggggctctcaagggacatggtgaaacacctaaacagcattgaagaacagattttggagagtttagcatggagtcacgattctgcactgtgggaggctctccaggtttctgcaaacaaagttcctacctgtgaagaagttatattcccaaataactttgaaacaggaaatggaggaaatgtgcagggacatcttcccctgatgccaatgtctcctctaatgcacccaagagtcaaggaagttcgaactgacagtgggagtcttcgaagagatatgcaaccattgtctccaatttctgtccatgaacgctacagttctcctaccgcagggagtgctaagagaagactctttggagaggaccccccaaaggaaatgcttatggacaagatcataacagaaggaacaaaattgaaaatcgctccttcttcaagcattactgctgaaaatgtatcaattttacctggtcaaactcttctaacaatggccacagccccagtaacaggaacaacaggacataaagttacaattccattacatggtgtcgcaaatgatgctggagagatcacactgatacctctttccatgaatacaaatcaggagtccaaagtcaagagtcctgtatcacttactgctcattcattaattggtgcttctccaaaacagaccaatctgactaaagcacaagaggtacattcaactggaataaacaggccaaagagaactgggtccttagcactattttacagaaaggtctatcatttggcaagtgtacgcttacgtgatctatgtctaaaactggatgtttcaaatgagttacgaaggaagatatggacgtgttttgaattcactttagttcactgtcctgatctaatgaaagacaggcatttggatcagctcctcctttgtgccttttatatcatggcaaaggtaacaaaagaagaaagaacttttcaagaaattatgaaaagttataggaatcagccccaagctaatagtcacgtatatagaagtgttctgctgaaaagtattccaagagaagttgtggcatataataaaaatataaatgatgactttgaaatgatagattgtgacttagaagatgctacaaaaacacctgactgttccagtggaccagtgaaagaggaaagaggtgatcttataaaattttacaatacaatatatgtaggaagagtgaagtcatttgcactgaaatacgacttggcgaatcaggaccatatgatggatgctccaccactctctccttttccacatattaaacaacagccaggctcaccacgccgcatttcccagcagcactccatttatatttccccgcacaagaatgggtcaggccttacaccaagaagcgctctgctgtacaagttcaatggcagcccttctaaggtaagg

SEQ ID NO: 5140 - DNA, 3417 bp, Homo sapiens
  source 1..3417: mol_type = genomic DNA
atgccgtcgggaggtgaccagtcgccaccgcccccgcctccccctccggcggcggcagcctcggatgaggaggaggaggacgacggcgaggcggaagacgccgcgccgcctgccgagtcgcccacccctcagatccagcagcggttcgacgagctgtgcagccgcctcaacatggacgaggcggcgcgggccgaggcctgggacagctaccgcagcatgagcgaaagctacacgctggagggaaatgatcttcattggttagcatgtgccttatatgtggcttgcagaaaatctgttccaactgtaagcaaagggacagtggaaggaaactatgtatctttaactagaatcctgaaatgttcagagcagagcttaatcgaattttttaataagatgaagaagtgggaagacatggcaaatctacccccacatttcagagaacgtactgagagattagaaagaaacttcactgtttctgctgtaatttttaagaaatatgaacccatttttcaggacatctttaaataccctcaagaggagcaacctcgtcagcagcgaggaaggaaacagcggcgacagccctgtactgtgtctgaaattttccatttttgttgggtgctttttatatatgcaaaaggtaatttccccatgattagtgatgatttggtcaattcttatcacctgctgctgtgtgctttggacttagtttatggaaatgcacttcagtgttctaatcgtaaagaacttgtgaaccctaattttaaaggcttatctgaagattttcatgctaaagattctaaaccttcctctgaccccccttgtatcattgagaaactgtgttccttacatgatggcctagttttggaagcaaaggggataaaggaacatttctggaaaccctatattaggaaactttatgaaaaaaagctccttaagggaaaagaagaaaatctcactgggtttctagaacctgggaactttggagagagttttaaagccatcaataaggcctatgaggagtatgttttatctgttgggaatttagatgagcggatatttcttggagaggatgctgaggaggaaattgggactctctcaaggtgtctgaacgctggttcaggaacagagactgctgaaagggtgcagatgaaaaacatcttacagcagcattttgacaagtccaaagcacttagaatctccacaccactaactggtgttaggtacattaaggagaatagcccttgtgtgactccagtttctacagctacgcatagcttgagtcgtcttcacaccatgctgacaggcctcaggaatgcaccaagtgagaaactggaacagattctcaggacatgttccagagatccaacccaggctattgctaacagactgaaagaaatgtttgaaatatattctcagcatttccagccagacgaggatttcagtaattgtgctaaagaaattgccagcaaacattttcgttttgcggagatgctttactataaagtattagaatctgttattgagcaggaacaaaaaagactaggagacatggatttatctggtattctggaacaagatgcgttccacagatctctcttggcctgctgccttgaggtcgtcactttttcttataagcctcctgggaattttccatttattactgaaatatttgatgtgcctctttatcatttttataaggtgatagaagtattcattagagcagaagatggcctttgtagagaggtggtaaaacaccttaatcagattgaagaacagatcttagatcatttggcatggaaaccagagtctccactctgggaaaaaattagagacaatgaaaacagagttcctacatgtgaagaggtcatgccacctcagaacctggaaagggcagatgaaatttgcattgctggctcccctttgactcccagaagggtgactgaagttcgtgctgatactggaggacttggaaggagcataacatctccaaccacattatacgataggtacagctccccaccagccagcactaccagaaggcggctatttgttgagaatgatagcccctctgatggagggacgcctgggcgcatgcccccacagcccctagtcaatgctgtccctgtgcagaatgtatctggggagactgtttctgtcacaccagttcctggacagactttggtcaccatggcaaccgccactgtcacagccaacaatgggcaaacggtaaccattcctgtgcaaggtattgccaatgaaaatggagggataacattcttccctgtccaagtcaatgttggggggcaggcacaagctgtgacaggctccatccagcccctcagtgctcaggccctggctggaagtctgagctctcaacaggtgacaggaacaactttgcaagtccctggtcaagtggccattcaacagatttccccaggtggccaacagcagaagcaaggccagtctgtaaccagcagtagtaatagacccaggaagaccagctctttatcgcttttctttagaaaggtataccatttagcagctgtccgccttcgggatctctgtgccaaactagatatttcagatgaattgaggaaaaaaatctggacctgctttgaattctccataattcagtgtcctgaacttatgatggacagacatctggaccagttattaatgtgtgccatttatgtgatggcaaaggtcacaaaagaagataagtccttccagaacattatgcgttgttataggactcagccgcaggcccggagccaggtgtatagaagtgttttgataaaagggaaaagaaaaagaagaaattctggcagcagtgatagcagaagccatcagaattctccaacagaactaaacaaagatagaaccagtagagactccagtccagttatgaggtcaagcagcaccttgccagttccacagcccagcagtgctcctcccacacctactcgcctcacaggtgccaacagtgacatggaagaagaggagaggggagacctcattcagttctacaacaacatctacatcaaacagattaagacatttgccatgaagtactcacaggcaaatatggatgctcctccactctctccctatccatttgtaagaacaggctcccctcgccgaatacagttgtctcaaaatcatcctgtctacatttccccacataaaaatgaaacaatgctttctcctcgagaaaagattttctattacttcagcaacagtccttcaaagagactgagagaaattaatagtatgatacgcacaggagaaactcctactaaaaagagaggaattcttttggaagatggaagtgaatcacctgcaaaaagaatttgcccagaaaatcattctgccttattacgccgtctccaagatgtagctaatgaccgtggttcccac

SEQ ID NO: 5141 - DNA, 2778 bp, Homo sapiens
  source 1..2778: mol_type = genomic DNA
atgaagaagacccggagcacaaccttgcggcgagcctggcctagctcggatttctcggaccgggcctcggaccgcatgaggtcccgcagcgagaaggactaccgcctgcacaagcgtttccccgcggccttcgcgccccaggcttcgcggggctacatgacatcaggtgatgtatcacccatcagtatgtctcccatcagtcagtctcagtttattccactcggggagatcctctgcttggccatctcagcaatgaactcggcaagaaagcctgtcacccaagaagcactgatggagcacctgaccacgtgcttcccaggtgttccaacgccaagccaagaaattctgcggcacacgctgaacacgctggtacgggagaggaagatctacccaactccagatggctacttcatcgtgaccccacagacttatttcataactccttccctcataagaactaacagtaaatggtaccatttggacgagaggatacctgaccggtctcagtgcacctctccgcaacccgggaccatcacgccctctgcctcaggctgtgtcagggaaaggacattgccccgaaaccactgcgactcttgccactgctgcagagaagacgtgcacagcacgcatgcacccaccctgcaaaggaagtctgccaaggactgcaaagacccttactgtcccccttctctgtgccaggtgccacccactgaaaagagcaaaagtactgtaaatttttcctataagacagaaactctctcaaaacctaaagatagtgaaaagcagtcaaaaaaattcgggctaaagttattccggttaagttttaaaaaagacaagaccaaacagctggccaatttttctgcccagtttcctcctgaagagtggcccctgcgagacgaggacacgccagctacgatccctcgggaagtagagatggaaatcattaggcgcattaacccagacctgaccgtggaaaatgtcatgcggcacaccgcgctcatgaagaaactggaagaagaaaaggcccagaggagtaaagccgggtcctctgcccatcacagcggaaggagtaaaaagagtaggactcatcggaagtcccatggaaagtctcggtctcacagcaagacacgggtgtctaaaggagacccttccgacggttcacatctggatatcccagctgaaagagagtatgacttttgtgatcctcttaccagggtgcccagggagggctgcttcatcattgaacacaaaggagataacttcatcatgcacagcaacacaaacgtgctcgagtcccacttccccatgacaccagaatgggatgtgtctggtgaattggctaaaaggagaactgagatgccttttcctgaaccttctaggggaagctcccactcaaaagtgcaccgaagccacagccatacacaggaccggaggtccaggaatgagagatccaacaaagccaaggagagatccaggtcgatggataactccaaaggccctctgggtgcttcttctctagggacgccggaagaccttgctgaaggctgcagccaagacgaccagacccccagccaatcctacattgacgacagtactttaaggcctgcacagaccgttagtctccaaagggctcacatttcgtccacaagctataaagaggtgtgtattccagagatagtcagtggcagcaaggaaccgtccagcgcttgcagccttttggagccaggaaaaccacccgagagtttgccatcctatggcgaactcaactcttgtccaacaaaaacagccacagatgactatttccagtgcaacacctctagtgagacggtgctcacggcaccatcacctctgggaaagaataaggaggaccatgacactctgactttggcagaaggggtgaaaaagctctccccttctgataggcaggtcccccactcctccagggagcctgtggggcacaaggaggagtcaccaaaagggccgggtgggggccccgctgcttcgggaggagtggctgaagggatcgccaacggacgcctcgtccagcaccatggtgccgagcccagcagcttggacaagaggaaagagatatttagcaaagacacactgttcaaacctcttcacagcaccttgtctgtaaacagctatcacaagtcgagcctgtccctcctcaaatctcacccgaagacacctgctgacacattgccaggccgatgtgagaaactggaaccgtccctggggacctcggcggcacaagccatgcctgcttcccagcgtcagcaggagtcaggagggaaccaggaagcctcttttgactattacaacgtctctgatgatgacgactctgaggaaggggcaaacaagaacacagaggaggagaaaaatagagaggacgtaggcaccatgcagtggctcctcgagcgggagaaggaaagagacttgcagaggaaatttgaaaagaacctcacccttcttgctccaaaagaaaccgacagcagcagcaaccagagagccacccattcagcccggctcgacagcatggacagcagcagcatcacagtggacagtggattcaactccccacgtactcgggagagcctggcttccaacacatcaagcattgttgaaagtaaccgtcgtcagaaccccgctttgagcccggcccatggtggagctggtccagccttcaacttccgagcgagcgcggagcccccgacaaatgaagctgagaagctacagaaaccttccaactgcttgcaagcttctgttactagcgtg

SEQ ID NO: 5142 - DNA, 1149 bp, Homo sapiens
  source 1..1149: mol_type = genomic DNA
atgtccctggtagatttgggaaagaagcttttagaagcggcacgagcaggtcaagatgatgaagttcgtattttgatggcaaatggagctccctttactacagactggctgggaacttctccacttcatctagcagcacagtatggtcattattccaccacagaggtactgctgcgagctggtgtgagcagagatgccagaaccaaagtggaccgaacaccattacatatggcagcttctgagggccatgccagcatagtagaggttttacttaagcatggtgctgatgtcaatgcaaaggacatgttaaagatgacagctctccattgggccacagaacacaatcatcaagaggtggtggaacttttaatcaaatatggtgctgatgtacacacgcaaagtaaattttgtaaaactgcatttgatatttcaatagacaatggaaatgaagatttagcagagatattacagattgctatgcagaaccaaatcaacacaaacccagagagtcctgacactgtgacaatacatgctgcaacaccacagtttatcattggacctggaggggtggtgaacctaacagatgaaacgggtgtatctgctgttcagtttggaaactcttctacatcagtattagctacattagctgccttagctgaagcatctgctccattgtccaattcttcagaaactccagtagtggccacagaagaagtagttactgcagaatctgtggatggtgccattcagcaagtagttagttcagggggtcagcaagtcatcacaatagttacagatggaattcagcttggaaatttgcactctattccaaccagtggaattggtcagcccatcattgtgaccatgccagatggacaacaagtattaacagtaccagcaacagacattgctgaagaaactgttataagtgaagaaccaccagctaagagacaatgtatcgaaataattgaaaaccgggtggaatctgcagaaatagaagagagagaagctcttcagaaacagctggatgaagcaaatcgagaagcacaaaaatatcgacagcagctcctaaagaaagaacaggaagcagaggcctacagacagaagttggaagctatgactcgtcttcagactaataaagaagctgtt

SEQ ID NO: 5143 - DNA, 1044 bp, Homo sapiens
  source 1..1044: mol_type = genomic DNA
atgtccctggtagatttgggaaagaagcttttagaagcggcacgagcaggtcaagatgatgaagttcgtattttgatggcaaatggagctccctttactacagactggctgggaacttctccacttcatctagcagcacagtatggtcattattccaccacagaggtactgctgcgagctggtgtgagcagagatgccagaaccaaagtggaccgaacaccattacatatggcagcttctgagggccatgccagcatagtagaggttttacttaagcatggtgctgatgtcaatgcaaaggacatgttaaagatgacagctctccattgggccacagaacacaatcatcaagaggtggtggaacttttaatcaaatatggtgctgatgtacacacgcaaagtaaattttgtaaaactgcatttgatatttcaatagacaatggaaatgaagatttagcagagatattacagattgctatgcagaaccaaatcaacacaaacccagagagtcctgacactgtgacaatacatgctgcaacaccacagtttatcattggacctggaggggtggtgaacctaacagatgaaacgggtgtatctgctgttcagtttggaaactcttctacatcagtattagctacattagctgccttagctgaagcatctgctccattgtccaattcttcagaaactccagtagtggccacagaagaagtagttactgcagaatctgtggatggtgccattcagcaagtagttagttcagggggtcagcaagtcatcacaatagttacagatggaattcagcttggaaatttgcactctattccaaccagtggaattggtcagcccatcattgtgaccatgccagatggacaacaagtattaacagtaccagcaacagacattgctgaagaaactgttataagtgaagaaccaccagctaagagacaatgtatcgaaataattgaaaaccgggtggaatctgcagaaatagaagtaaggagtcttttacccggtgtgctttgccgcagtcatccaaaa

SEQ ID NO: 5144 - DNA, 1080 bp, Homo sapiens
  source 1..1080: mol_type = genomic DNA
atgtccctggtagatttgggaaagaagcttttagaagcggcacgagcaggtcaagatgatgaagttcgtattttgatggcaaatggagctccctttactacagactggctgggaacttctccacttcatctagcagcacagtatggtcattattccaccacagaggtactgctgcgagctggtgtgagcagagatgccagaaccaaagtggaccgaacaccattacatatggcagcttctgagggccatgccagcatagtagaggttttacttaagcatggtgctgatgtcaatgcaaaggacatgttaaagatgacagctctccattgggccacagaacacaatcatcaagaggtggtggaacttttaatcaaatatggtgctgatgtacacacgcaaagtaaattttgtaaaactgcatttgatatttcaatagacaatggaaatgaagatttagcagagatattacagattgctatgcagaaccaaatcaacacaaacccagagagtcctgacactgtgacaatacatgctgcaacaccacagtttatcattggacctggaggggtggtgaacctaacaggtctggtatcttcagaaaattcatccaaggcaacagatgaaacgggtgtatctgctgttcagtttggaaactcttctacatcagtattagctacattagctgccttagctgaagcatctgctccattgtccaattcttcagaaactccagtagtggccacagaagaagtagttactgcagaatctgtggatggtgccattcagcaagtagttagttcagggggtcagcaagtcatcacaatagttacagatggaattcagcttggaaatttgcactctattccaaccagtggaattggtcagcccatcattgtgaccatgccagatggacaacaagtattaacagtaccagcaacagacattgctgaagaaactgttataagtgaagaaccaccagctaagagacaatgtatcgaaataattgaaaaccgggtggaatctgcagaaatagaagtaaggagtcttttacccggtgtgctttgccgcagtcatccaaaa

SEQ ID NO: 5145 - DNA, 1122 bp, Homo sapiens
  source 1..1122: mol_type = genomic DNA
atggagccaggaggagagcccacaggtgctaaagagagcagtaccctgatggagtcccttgcagctgtgaaggctgctttcctggcgcaggccccgagtggcagccggtcagccgaggtgcaggcagctcagagcacggagcctgccgcagaggcaggcgctcccgagggagagggccacagaggggggcctccccgggcgttggggtctcttggcctttgtgaaaaccaggaagccagagagaggcccggaggttcccctcgaggcccggtcacttctgagaaaactggaggacagagtggcctcgagtcagacgtccctccgaacgcaggccccggcgcagagggcgggggcagctggaaggggcggcctttcccgtgcggcgcctgtggccgcagcttcaagtgctcctcggacgcggcaaagcaccggagcatccactcgggggagaaaccgtacgagtgcagcgactgcgggaaggccttcatccacagctcgcacgtggtccggcaccagcgggcgcacagcggggagaggccctacgcgtgcgccgagtgcggcaaggccttcggccagagcttcaacctcctccggcaccagcgcgtgcacacgggcgagaagccctacgcgtgcgccgactgcggcaaggccttcggccagaggtcggacgccgccaagcaccgccgcacccacaccggggagaggctgtacgcgtgcggcgagtgcgggaagcgcttcctgcacagctcgaacgtggtccggcaccggcggacccaccacggggagaacccgtacgagtgccgggagtgcggccaggccttcagccagagctccaacctcctccagcaccagcgcgtgcacacgggggagcggcccttcgcctgccaggactgcggccgcgccttcagccgcagctccttcctccgcgagcaccgccgcatccacaccggggagaagccccaccagtgcggccactgcgggcgcgcgttccgggcgctgtcgggcttcttccggcaccagcgactccacacgggcgagaagccgttccgctgcaccgagtgcggccgcgccttccgcctgagcttccacctcatccagcaccggcgggtgcatggcgccgag

SEQ ID NO: 5146 - DNA, 873 bp, Homo sapiens
  source 1..873: mol_type = genomic DNA
atggcaagaaagaaaaggagagggattatagagaaaaggcgtcgggatcggataaataacagtttatctgagttgagaagacttgtgccaactgcttttgaaaaacaaggatctgcaaagttagaaaaagctgaaatattgcaaatgacagtggatcatttgaagatgcttcaggcaacagggggtaaaggctactttgacgcacacgctcttgccatggacttcatgagcataggattccgagagtgcctaacagaagttgcgcggtacctgagctccgtggaaggcctggactcctcggatccgctgcgggtgcggcttgtgtctcatctcagcacttgcgccacccagcgggaggcggcggccatgacatcctccatggcccaccaccatcatccgctccacccgcatcactgggccgccgccttccaccacctgcccgcagccctgctccagcccaacggcctccatgcctcagagtcaaccccttgtcgcctctccacaacttcagaagtgcctcctgcccacggctctgctctcctcacggccacgtttgcccatgcggattcagccctccgaatgccatccacgggcagcgtcgccccctgcgtgccacctctctccacctctctcttgtccctctctgccaccgtccacgccgcagccgcagcagccaccgcggctgcacacagcttccctctgtccttcgcgggggcattccccatgcttcccccaaacgcagcagcagcagtggccgcggccacagccatcagcccgcccttgtcagtatcagccacgtccagtcctcagcagaccagcagtggaacaaacaataaaccttaccgaccctgggggacagaagttggagctttt

SEQ ID NO: 5147 - DNA, 642 bp, Homo sapiens
  source 1..642: mol_type = genomic DNA
atgcctcttgaggaaagaaatgtattctggttaagtaaaggaaacctaacgggagaccaaggttactttgacgcgcacgcccttgctatggactatcggagtttgggatttcgggaatgcctggcagaagttgcgcgttatctgagcatcattgaaggactagatgcctctgacccgcttcgagttcgactggtttcgcatctcaacaactacgcttcccagcgggaagccgcgagcggcgcccacgcgggcctcggacacattccctgggggaccgtcttcggacatcacccgcacatcgcgcacccgctgttgctgccccagaacggccacgggaacgcgggcaccacggcctcacccacggaaccgcaccaccagggcaggctgggctcggcacatccggaggcgcctgctttgcgagcgccccctagcggcagcctcggaccggtgctccctgtggtcacctccgcctccaaactgtcgccgcctctgctctcctcagtggcctccctgtcggccttccccttctctttcggctccttccacttactgtctcccaatgcactgagcccttcagcacccacgcaggctgcaaaccttggcaagccctatagaccttgggggacggagatcggagctttt

SEQ ID NO: 5148 - DNA, 2259 bp, Homo sapiens
  source 1..2259: mol_type = genomic DNA
atgggggaacacagtccagacaacaacatcatctactttgaggcagaggaagatgagctgacccccgatgataaaatgctcaggtttgtggataaaaacggactggtgccttcctcatctggaactgtttatgataggaccactgttcttattgagcaggaccctggcactttggaggatgaagatgacgacggacagtgcggagaacacttgccttttctagtagggggtgaagagggctttcacctgatagatcatgaagcaatgtcccagggttatgtgcagcacattatctcaccagatcagattcatttgacaataaaccctggttccacacccatgccaagaaatattgaaggtgcaaccctcactctgcagtcggaatgtccggaaacaaaacgtaaagaagtaaagcggtaccaatgtacctttgagggctgtccccgcacctacagcacagcaggcaacctgcgaacccaccagaagactcaccgaggagagtacacctttgtctgtaatcaggagggctgtggcaaagccttccttacctcttacagcctcaggatccacgtgcgagtgcacacgaaggagaagccatttgagtgtgacgtgcagggctgtgagaaggcattcaacacactgtacaggctgaaagcacatcagaggcttcacacagggaaaacgtttaactgtgaatctgaaggctgcagcaaatacttcaccacactcagtgatctgaggaagcacattcgaactcatacaggggaaaagccatttcggtgcgatcacgatggctgtggaaaagcatttgcagcaagccaccaccttaaaactcacgttcgtacacatactggtgaaagacccttcttctgccccagtaatggctgtgagaaaacattcagcactcaatacagtctcaaaagtcacatgaaaggtcatgataacaaaggacactcatacaatgcacttccacaacacaatggatcagaggatacaaatcactcactttgtctaagtgacttgagccttctgtccacagattctgaattgcgagaaaattccagtacgacccagggccaggacctcagcacaatttcaccagcaatcatctttgaatcaatgttccagaattcagatgatacggcaattcaggaagatcctcaacagacagcttccttgactgaaagttttaatggtgatgcagagtcagtcagtgatgttccgccatccacaggaaattcagcatctttatctcttccacttgtactgcaacctggcctctccgagccaccccagcctctactacctgcctcagctccgtctgctcctccgcctgctccctccctaggacctggctcccagcaagctgcatttggcaacccccctgctctcttacaacctccagaagtgcctgttccccacagcacacagtttgctgctaatcatcaagagtttcttccgcacccccaggcaccgcagcccattgtaccaggactttctgttgttgctggggcttctgcatcagcagcggcagtggcatcagctgtggcagcaccagccccaccacaaagtactactgagcccctgccagccatggtccagactctgcccctgggtgccaactctgtcctaactaataatcccacaataaccatcaccccaactcccaacacagctatcctgcagtccagcctagtcatgggagaacagaacttacaatggatattaaatggtgccaccagttctccacaaaaccaagaacaaattcagcaagcatctaaagttgagaaggtgttttttaccactgcagtaccagtagccagtagcccagggagctctgtccagcagattggcctcagtgttcctgtgatcatcatcaaacaagaagaggcatgtcagtgtcagtgtgcatgccgggactctgcaaaggagcgggcatccagcaggagaaagggctgctcctccccaccccctccagagccgagcccccaggctcctgatgggcccagcctgcagctcccagcgcagactttctcttcagcccctgttcccgggtcatcatcctctaccttgccctcctcctgtgagcaaagccgacaagcagagactccttcagaccctcagacagaaacattaagtgccatggatgtgtcagagtttctatccctccagagcctggacaccccgtccaatctgattcccattgaagcactactgcagggggaggaggagatgggcctcaccagcagcttctccaag

SEQ ID NO: 5149 - DNA, 2361 bp, Homo sapiens
  source 1..2361: mol_type = genomic DNA
atggctgtgtggatacaagctcagcagctccaaggagaagcccttcatcagatgcaagcgttatatggccagcattttcccattgaggtgcggcattatttatcccagtggattgaaagccaagcatgggactcagtagatcttgataatccacaggagaacattaaggccacccagctcctggagggcctggtgcaggagctgcagaagaaggcagagcaccaggtgggggaagatgggtttttactgaagatcaagctggggcactatgccacacagctccagaacacgtatgaccgctgccccatggagctggtccgctgcatccgccatatattgtacaatgaacagaggttggtccgagaagccaacaatggtagctctccagctggaagccttgctgatgccatgtcccagaaacacctccagatcaaccagacgtttgaggagctgcgactggtcacgcaggacacagagaatgagttaaaaaagctgcagcagactcaggagtacttcatcatccagtaccaggagagcctgaggatccaagctcagtttggcccgctggcccagctgagcccccaggagcgtctgagccgggagacggccctccagcagaagcaggtgtctctggaggcctggttgcagcgtgaggcacagacactgcagcagtaccgcgtggagctggccgagaagcaccagaagaccctgcagctgctgcggaagcagcagaccatcatcctggatgacgagctgatccagtggaagcggcggcagcagctggccgggaacggcgggccccccgagggcagcctggacgtgctacagtcctggtgtgagaagttggccgagatcatctggcagaaccggcagcagatccgcagggctgagcacctctgccagcagctgcccatccccggcccagtggaggagatgctggccgaggtcaacgccaccatcacggacattatctcagccctggtgaccagcacgttcatcattgagaagcagcctcctcaggtcctgaagacccagaccaagtttgcagccactgtgcgcctgctggtgggcgggaagctgaacgtgcacatgaaccccccccaggtgaaggccaccatcatcagtgagcagcaggccaagtctctgctcaagaacgagaacacccgcaatgattacagtggcgagatcttgaacaactgctgcgtcatggagtaccaccaagccacaggcacccttagtgcccacttcaggaatatgtccctgaaacgaattaagaggtcagaccgtcgtggggcagagtcggtgacagaagaaaaatttacaatcctgtttgaatcccagttcagtgttggtggaaatgagctggtttttcaagtcaagaccctgtccctgccagtggtggtgatcgttcatggcagccaggacaacaatgcgacggccactgttctctgggacaatgcttttgcagagcctggcagggtgccatttgccgtgcctgacaaagtgctgtggccacagctgtgtgaggcgctcaacatgaaattcaaggccgaagtgcagagcaaccggggcctgaccaaggagaacctcgtgttcctggcgcagaaactgttcaacaacagcagcagccacctggaggactacagtggcctgtctgtgtcctggtcccagttcaacagggagaatttaccaggacggaattacactttctggcaatggtttgacggtgtgatggaagtgttaaaaaaacatctcaagcctcattggaatgatggggccattttggggtttgtaaacaagcaacaggcccatgacctactcattaacaagccagatgggaccttcctcctgagattcagtgactcagaaattggcggcatcaccattgcttggaagtttgattctcaggaaagaatgttttggaatctgatgccttttaccaccagagacttctccattcggtccctagccgaccgcttgggagacttgaattaccttatctacgtgtttcctgatcggccaaaagatgaagtatactccaaatactacacaccagttccctgcgagtctgctactgctaaagctgttgatggatacgtgaagccacagatcaagcaagtggtccctgagtttgtgaacgcatctgcagatgccgggggcggcagcgccacgtacatggaccaggccccctccccagctgtgtgtccccaggctcactataacatgtacccacagaaccctgactcagtccttgacaccgatggggacttcgatctggaggacacaatggacgtagcgcggcgtgtggaggagctcctgggccggccaatggacagtcagtggatcccgcacgcacaatcg

SEQ ID NO: 5150 - DNA, 2292 bp, Homo sapiens
  source 1..2292: mol_type = genomic DNA
atggcgggctggatccaggcccagcagctgcagggagacgcgctgcgccagatgcaggtgctgtacggccagcacttccccatcgaggtccggcactacttggcccagtggattgagagccagccatgggatgccattgacttggacaatccccaggacagagcccaagccacccagctcctggagggcctggtgcaggagctgcagaagaaggcggagcaccaggtgggggaagatgggtttttactgaagatcaagctggggcactacgccacgcagctccagtgcagctctccggctgggatcctggttgacgccatgtcccagaagcaccttcagatcaaccagacatttgaggagctgcgactggtcacgcaggacacagagaatgagctgaagaaactgcagcagactcaggagtacttcatcatccagtaccaggagagcctgaggatccaagctcagtttgcccagctggcccagctgagcccccaggagcgtctgagccgggagacggccctccagcagaagcaggtgtctctggaggcctggttgcagcgtgaggcacagacactgcagcagtaccgcgtggagctggccgagaagcaccagaagaccctgcagctgctgcggaagcagcagaccatcatcctggatgacgagctgatccagtggaagcggcggcagcagctggccgggaacggcgggccccccgagggcagcctggacgtgctacagtcctggtgtgagaagttggccgagatcatctggcagaaccggcagcagatccgcagggctgagcacctctgccagcagctgcccatccccggcccagtggaggagatgctggccgaggtcaacgccaccatcacggacattatctcagccctggtgaccagcacattcatcattgagaagcagcctcctcaggtcctgaagacccagaccaagtttgcagccaccgtacgcctgctggtgggcgggaagctgaacgtgcacatgaatcccccccaggtgaaggccaccatcatcagtgagcagcaggccaagtctctgcttaaaaatgagaacacccgcaacgagtgcagtggtgagatcctgaacaactgctgcgtgatggagtaccaccaagccacgggcaccctcagtgcccacttcaggaacatgtcactgaagaggatcaagcgtgctgaccggcggggtgcagagtccgtgacagaggagaagttcacagtcctgtttgagtctcagttcagtgttggcagcaatgagcttgtgttccaggtgaagactctgtccctacctgtggttgtcatcgtccacggcagccaggaccacaatgccacggctactgtgctgtgggacaatgcctttgctgagccgggcagggtgccatttgccgtgcctgacaaagtgctgtggccgcagctgtgtgaggcgctcaacatgaaattcaaggccgaagtgcagagcaaccggggcctgaccaaggagaacctcgtgttcctggcgcagaaactgttcaacaacagcagcagccacctggaggactacagtggcctgtccgtgtcctggtcccagttcaacagggagaacttgccgggctggaactacaccttctggcagtggtttgacggggtgatggaggtgttgaagaagcaccacaagccccactggaatgatggggccatcctaggttttgtgaataagcaacaggcccacgacctgctcatcaacaagcccgacgggaccttcttgttgcgctttagtgactcagaaatcgggggcatcaccatcgcctggaagtttgactccccggaacgcaacctgtggaacctgaaaccattcaccacgcgggatttctccatcaggtccctggctgaccggctgggggacctgagctatctcatctatgtgtttcctgaccgccccaaggatgaggtcttctccaagtactacactcctgtgctggctaaagctgttgatggatatgtgaaaccacagatcaagcaagtggtccctgagtttgtgaatgcatctgcagatgctgggggcagcagcgccacgtacatggaccaggccccctccccagctgtgtgcccccaggctccctataacatgtacccacagaaccctgaccatgtactcgatcaggatggagaattcgacctggatgagaccatggatgtggccaggcacgtggaggaactcttacgccgaccaatggacagtcttgactcccgcctctcgccccctgccggtcttttcacctctgccagaggctccctctca

SEQ ID NO: 5151 - DNA, 2289 bp, Homo sapiens
  source 1..2289: mol_type = genomic DNA
atggcgggctggatccaggcccagcagctgcagggagacgcgctgcgccagatgcaggtgctgtacggccagcacttccccatcgaggtccggcactacttggcccagtggattgagagccagccatgggatgccattgacttggacaatccccaggacagagcccaagccacccagctcctggagggcctggtgcaggagctgcagaagaaggcggagcaccaggtgggggaagatgggtttttactgaagatcaagctggggcactacgccacgcagctccagaaaacatatgaccgctgccccctggagctggtccgctgcatccggcacattctgtacaatgaacagaggctggtccgagaagccaacaattgcagctctccggctgggatcctggttgacgccatgtcccagaagcaccttcagatcaaccagacatttgaggagctgcgactggtcacgcaggacacagagaatgagctgaagaaactgcagcagactcaggagtacttcatcatccagtaccaggagagcctgaggatccaagctcagtttgcccagctggcccagctgagcccccaggagcgtctgagccgggagacggccctccagcagaagcaggtgtctctggaggcctggttgcagcgtgaggcacagacactgcagcagtaccgcgtggagctggccgagaagcaccagaagaccctgcagctgctgcggaagcagcagaccatcatcctggatgacgagctgatccagtggaagcggcggcagcagctggccgggaacggcgggccccccgagggcagcctggacgtgctacagtcctggtgtgagaagttggccgagatcatctggcagaaccggcagcagatccgcagggctgagcacctctgccagcagctgcccatccccggcccagtggaggagatgctggccgaggtcaacgccaccatcacggacattatctcagccctggtgaccagcacattcatcattgagaagcagcctcctcaggtcctgaagacccagaccaagtttgcagccaccgtacgcctgctggtgggcgggaagctgaacgtgcacatgaatcccccccaggtgaaggccaccatcatcagtgagcagcaggccaagtctctgcttaaaaatgagaacacccgcaacgagtgcagtggtgagatcctgaacaactgctgcgtgatggagtaccaccaagccacgggcaccctcagtgcccacttcaggaacatgtcactgaagaggatcaagcgtgctgaccggcggggtgcagagtccgtgacagaggagaagttcacagtcctgtttgagtctcagttcagtgttggcagcaatgagcttgtgttccaggtgaagggcagggtgccatttgccgtgcctgacaaagtgctgtggccgcagctgtgtgaggcgctcaacatgaaattcaaggccgaagtgcagagcaaccggggcctgaccaaggagaacctcgtgttcctggcgcagaaactgttcaacaacagcagcagccacctggaggactacagtggcctgtccgtgtcctggtcccagttcaacagggagaacttgccgggctggaactacaccttctggcagtggtttgacggggtgatggaggtgttgaagaagcaccacaagccccactggaatgatggggccatcctaggttttgtgaataagcaacaggcccacgacctgctcatcaacaagcccgacgggaccttcttgttgcgctttagtgactcagaaatcgggggcatcaccatcgcctggaagtttgactccccggaacgcaacctgtggaacctgaaaccattcaccacgcgggatttctccatcaggtccctggctgaccggctgggggacctgagctatctcatctatgtgtttcctgaccgccccaaggatgaggtcttctccaagtactacactcctgtgctggctaaagctgttgatggatatgtgaaaccacagatcaagcaagtggtccctgagtttgtgaatgcatctgcagatgctgggggcagcagcgccacgtacatggaccaggccccctccccagctgtgtgcccccaggctccctataacatgtacccacagaaccctgaccatgtactcgatcaggatggagaattcgacctggatgagaccatggatgtggccaggcacgtggaggaactcttacgccgaccaatggacagtcttgactcccgcctctcgccccctgccggtcttttcacctctgccagaggctccctctca

SEQ ID NO: 5152 - DNA, 999 bp, Homo sapiens
  source 1..999: mol_type = genomic DNA
atggctgtgcgcggcgccaacaccttgacgtccttctccatccaggcgatcctcaacaagaaagaggagcgcggcgggctggccgcgccagaggggcgcccggcgcccgggggcacagcggcatcggtggccgcggctcccgctgtctgctgttggcggctctttggggagagggacgcgggcgcgttggggggcgccgaggactctctgctggcgtctcctgccggtaccagaacagctgcggggcggactgcggagagcccggaaggctgggactcggactccgcgctcagcgaggagaacgagagcaggcggcgctgcgcggacgcgcggggggccagcggggccggccttgcggggggatccttgagcctcggccagccggtctgtgagctggccgcttccaaagacctagaggaggaagccgcgggccggagcgacagcgagatgtccgccagcgtctcaggcgaccgcagcccaaggaccgaggacgacggtgttggccccagaggtgcacacgtgtccgcgctgtgcagcggggccggcggcgggggcggcagcgggccggcaggcgtcgcggaggaggaggaggagccggcggcgcccaagccacgcaagaagcgctcgcgggccgctttctcccacgcgcaggtcttcgagctggagcgccgctttaaccaccagcgctacctgtccgggcccgagcgcgcagacctggccgcgtcgctgaagctcaccgagacgcaggtgaaaatctggttccagaaccgtcgctacaagacaaagcgccggcagatggcagccgacctgctggcctcggcgcccgccgccaagaaggtggccgtaaaggtgctggtgcgcgacgaccagagacaatacctgcccggcgaagtgctgcggccaccctcgcttctgccactgcagccctcctactattacccgtactactgcctcccaggctgggcgctctccacctgcgcagctgccgcaggcacccag

SEQ ID NO: 5153 - DNA, 702 bp, Homo sapiens
  source 1..702: mol_type = genomic DNA
atgctcagggttccggagccgcggcccggggaggcgaaagcggagggggccgcgccgccgaccccgtccaagccgctcacgtccttcctcatccaggacatcctgcgggacggcgcgcagcggcaaggcggccgcacgagcagccagagacagcgcgacccggagccggagccagagccagagccagagggaggacgcagccgcgccggggcgcagaacgaccagctgagcaccgggccccgcgccgcgccggaggaggccgagacgctggcagagaccgagccagaaaggcacttggggtcttatctgttggactctgaaaacacttcaggcgcccttccaaggcttccccaaacccctaagcagccgcagaagcgctcccgagctgccttctcccacactcaggtgatcgagttggagaggaagttcagccatcagaagtacctgtcggcccctgaacgggcccacctggccaagaacctcaagctcacggagacccaagtgaagatatggttccagaacagacgctataagactaagcgaaagcagctctcctcggagctgggagacttggagaagcactcctctttgccggccctgaaagaggaggccttctcccgggcctccctggtctccgtgtataacagctatccttactacccatacctgtactgcgtgggcagctggagcccagctttttgg

SEQ ID NO: 5154 - DNA, 477 bp, Homo sapiens
  source 1..477: mol_type = genomic DNA
atgctcagggttccggagccgcggcccggggaggccgagacgctggcagagaccgagccagaaaggcacttggggtcttatctgttggactctgaaaacacttcaggcgcccttccaaggcttccccaaacccctaagcagccgcagaagcgctcccgagctgccttctcccacactcaggtgatcgagttggagaggaagttcagccatcagaagtacctgtcggcccctgaacgggcccacctggccaagaacctcaagctcacggagacccaagtgaagatatggttccagaacagacgctataagactaagcgaaagcagctctcctcggagctgggagacttggagaagcactcctctttgccggccctgaaagaggaggccttctcccgggcctccctggtctccgtgtataacagctatccttactacccatacctgtactgcgtgggcagctggagcccagctttttgg

SEQ ID NO: 5155 - DNA, 564 bp, Homo sapiens
  source 1..564: mol_type = genomic DNA
atgcaccgggcgcggtggctcacgcctgtaatcccagcactttgggaggccgaggcgggcagatcacgaggtcaggaaatcgagaccatcttggctaacaagaaacaatcagctatgccttgggatcaagatccagaacaatcaactggaaattacagtgaagatgaacaaaatggaaagcagaaatggagagaagaaggagaagcaggcagaaagagagaacgagaaaaagaagaaaaaaacgaaaaggagctgcaagatgaacaggaaaacaaaaggaaaagggaaaatgagaaacagaaacagtatcccgagaaaagattagtcagcaaatccctcatgcatactctctgggcaaagtttaagttaaacaggtgccccactatacaagagagtctatcactgtcatttgaatttgacatgacacataaacagataagtcaatggttttgtaaaacgaggaagaaatataataaagaaatgtccaagagaaagcataagaaaaaacatatgagatggagatctctgtgttgccaaggctggtctcgaactcctgccctcaag

SEQ ID NO: 5156 - DNA, 1608 bp, Homo sapiens
  source 1..1608: mol_type = genomic DNA
atggggccattgcaatttagagacgtggccatagaattctctctggaggagtggcattgcctggacactgcacagcggaatttatataggaatgtgatgttagagaactacagaaacctggtcttccttggtattgttgtctctaagccagacctcatcacctgtctggagcaaggaaaaaaacctttgaccatgaagaaacatgagatggtagccaacccctcagttacgtgttctcattttgcccgagatctttggccagagcagagcataaaagattctttccaaaaagtgacactgagaagatatgaaaactatggacatgacaatttacagtttaaaaagggctgtgaaagtgtagatgagtgtaaggtgcacaaaagaggttataatggacttaaccaatatttgacaactactcaaagcaaaatatttcagtgtgataaatatgtgaaagtcattcataaattttcaaattcaaacagacataagataagacatactggaaaaaaacctttcaaatgtatagaatgtggcaaagcttttaaccagtcttcaacccttactacacataagaaaattcatactggggagaaacccttcaaatgtgaagaatgtggcaaagccttcaactggtcctcacaccttactacacataagagaattcatactggagagaaacggtacaaatgtgaagactgtggcaaagcctttagccggttttcataccttactgcacataagataattcatagtggagagaaaccctacaaatgtgaagaatgtggcaaggcctttaagcgctcctctaaccttactacacataagataattcatactggagagaaaccctacaaatgtgaagaatgtggcaaggcctttaagcgctcctctatccttactgcgcataagataattcatagcggagagaaaccctacaaatgtgaagaatgtggcaaagcctttaagcacccctctgtccttactacacataaaagaattcatactggagagaaaccctacaaatgtgaagaatgtggcagagcctttaagtacttctcatcccttactacacacaagataattcatagtggagagaaaccctacaaatgtgaagaatgtggcaaagccttcaactggtcctcacaccttactacacataagagaattcatactggagagaaaccctacaaatgtgaagaatgtggcgaagcctttaagtactcctcttcccttactacacataagataatccatactggacagcaacccttcaagtgtgaagaatgtggcaaggcctttaagtgcttctctatccttactacacataagagaattcatactggagagaaaccctacaaatgtgaagaatgtggcaaagccttcaactcgtcctcacaccttactgcacataagagaattcatactggagagaaaccctacaaatgtgaacgatgtggcaaggcttttaagcgctcctttatccttactagacataagagaattcatactggagagaaaccctacaaatgtgaagaatgtggcaaaggctttaagtgcccctctacccttactacacataaggtaattcatactggagagaaacta

SEQ ID NO: 5157 - DNA, 1248 bp, Homo sapiens
  source 1..1248: mol_type = genomic DNA
atgaacctgccaagagctgagcgccctcgctccacaccgcagcgcagcctccgggactccgatggggaagacggtaaaatcgatgtcctgggagaggaggaagatgaagacgaggtggaagacgaggaggaggaggcgagacagcagttcctagagcagtcgctccagccggggctgcaggtggcccggtggggcggggttgcgcttccccgagagcacatcgagggcggcggcggcccgagtgacccttcagagtttggcaccaagttcagggcaccgccaaggtctgcggcggcctctgaagatgcccggcagccggcaaagcccccctactcgtacatcgcgctcatcaccatggccatcctgcaaaacccgcacaagcgcctcacgctcagcggcatctgcgccttcattagtggccgcttcccatactaccgccgcaagttccccgcctggcagaacagcatccgccacaacctctcgctgaacgactgcttcgttaagatcccccgcgagccgggccacccaggcaagggcaactactggagcctggaccccgcctcccaggacatgttcgacaatggcagctttctccggcgtaggaagcgtttcaagcgccaccaactgaccccgggagcccacctgccccaccccttccctctacctgctgcacacgccgccctgcacaacccccacccaggccctctgcttggggcccctgccccgccgcagccagtcccgggggcctaccccaacaccgcccccgggagacgcccttacgctctgctgcacccgcatcctcttcgctacctactgctctcggcccgcgtctatgccggggcaccgaagaaagcagaaggcgcggacctggcgaccccggcacccttcccgtgctgcagccctcacttggtcctcagccttgggaggagggcaagggtctggcgtcgccaccgggaggcggatgcttctctttcagcattgagagtattatgcaaggggtcaggggagcgggtacaggggctgcgcagagtttgtccccgaccgcgtggagctactgccacctgctccagcgaccatcaagcctgttgcatccccaaaccgctgcccctttgctgcaagtgtccgccgccgctgctgctcggacaattttgcagcaatagcagcagcatcaggaggactgcgccaacggctgcgctcccaccaagggcgcggtgctgggcgggcacctgtcggcctcgtcggcgctgc

SEQ ID NO: 5158 - DNA, 1248 bp, Homo sapiens
  source 1..1248: mol_type = genomic DNA
atgaacctgccaagagctgagcgccctcgctccacaccgcagcgcagcctccgggactccgatggggaagacggtaaaatcgatgtcctgggagaggaggaagatgaagacgaggtggaagacgaggaggaggaggcgagacagcagttcctagagcagtcactccagccggggctgcaggtggcccggtggggcggggttgcgcttccccgagagcacatcgagggcggcggcggcccgagtgacccctcagagtttggcaccaagttcagggcaccgccaaggtctgcggcggcctctgaagatgcccggcagccggcaaagcccccctactcgtacatcgcgctcatcaccatggccatcctgcaaaacccgcacaagcgcctcacgctcagcggcatctgcgccttcattagtggccgcttcccatactaccgccgcaagttccccgcctggcagaacagcatccgccacaacctctcgctgaacgactgcttcgttaagatcccccgcgagccgggccacccaggcaagggcaactactggagcctggaccccgcctcccaggacatgttcgacaatggcagctttctccggcgtaggaagcgtttcaagcgccaccaactgaccccgggagcccacctgccccaccccttccctctacctgctgcgcacgccgccctgcacaacccccacccaggccctctgcttggggcccctgccccgccgcagccagtcccgggggcctaccccaacaccgcccccgggagatgcccttacgctctgctgcacccgcatcctcttcgctacctactgctctcggcccccgtctatgccggggcaccgaagaaagcagaaggcgcggacctggcgaccccggcacccttcccgtgctgcagccctcacttggtcctcagccttgggaggagggcaagggtctggcgtcgccaccgggaggcggatgcatctctttcagcattgagagtattatgcaaggggtcaggggagcgggtacaggggctgcgcagagtttgtccccgaccgcgtggagctactgccacctgctccagcgaccatcaagcctgttgcatccccaaaccgctgcccctttgctgcaagtgtccgccgccgctgctgctcggacaattttgcagcaatagcagcagcatcaggaggactgcgccaacggctgcgctcccaccaagggcgcggtgctgggcgggcacctgtcggcctcgtcggcgctgc

SEQ ID NO: 5159 - DNA, 1251 bp, Homo sapiens
  source 1..1251: mol_type = genomic DNA
atgaacctgccaagagctgagcgccttcgctccacaccgcagcgcagcctccgggactccgatggggaagacggtaaaatcgatgtcctgggagaggaggaagatgaagacgaggtggaagacgaggaggaggcggcgagccagcagttcctagagcagtcgctccagccggggctgcaggtggcccggtggggcggggttgcgcttccccgagagcacatcgagggcggcggcggcccgagcgacccctcagagtttggcaccaagttcagggcaccgccaaggtctgcggcggcctctgaagatgcccggcagccggcaaagcccccctactcgtacatcgcgctcatcaccatggccatcctgcaaaacccgcacaagcgcctcacgctcagcggcatctgcgccttcattagtggccgcttcccctactaccgccgcaagttccccgcctggcagaacagcatccgccacaacctctcgctgaacgactgcttcgttaagatcccccgcgagccgggccacccaggcaagggcaactactggagcctggaccccgcctcccaagacatgttcgacaatggcagctttctccggcgtaggaagcgtttcaagcgccaccaactgaccccgggagcccacctgccccaccccttccctctacctgctgcacacgccgccctgcacaacccccacccaggccctctgcttggggcccctgccccgccgcagccagtcccgggggcctaccccaacaccgcccccgggagacgcccttacgctctgctgcacccgcatcctcttcgctacctactgctctcggcccccgtctatgccggggcaccgaagaaagcagaaggcgcggccctggcgaccccggcacccttcccgtgctgcagccctcacttggtcctcagccttgggaggagggcaagggtctggcgtcgccaccgggaggcggatgcatctctttcagcattgagagtattatgcaaggggtcaggggagcgggtacaggggctgcgcagagtttgtccccgaccgcgtggagctactgccacctgctccagcgaccatcaagcctgttgcatccccagaccgctgcccctttgctgcaagtgtccgccgccgccgctgctcggacaattttgcagcaatagcagcagcatcaggaggaggactgcgccaacggctgcgctcccaccaagggcgcggtgctgggcgggcacctgtcggcctcgtcggccctgc

SEQ ID NO: 5160 - DNA, 1266 bp, Homo sapiens
  source 1..1266: mol_type = genomic DNA
atgtttcgagctggggcagagggagcagagaaggagccctcaccgcggccggaatgcagagcggaccctggcccaggactgggtttccctttaggctcgggcctaccctggccctcgctgttggaatctccaggaggccgcattttagatatcccctgcaaagtgtgtggcgaccgcagctcggggaagcactacggggtctacgcctgcgacggctgctcaggttttttcaaacggagcatccgaaggaataggacctatgtctgcaaatctggaaaccagggaggctgtccggtggacaagacgcacagaaaccagtgcagggcgtgtcggctgaagaagtgtttggaagtcaacatgaacaaagacgccgtgcagcacgagcgggggcctcggacgtccaccatccgcaagcaagtggccctctacttccgtggacacaaggaggagaacggggccgccgcgcactttccctcggcggcgctccctgcgccggccttcttcaccgcggtcacgcagctggagccgcacggcctggagctggccgcggtgtccaccactccagagcggcagaccctcgtgagcctggctcagcccacgcccaagtacccccatgaagtgaatgggaccccaatgtatctctatgaagtggccacggagtcggtgtgtgaatcagctgccagacttctcttcatgagcatcaagtgggctaagagtgtgccagccttctccacgctgtctttgcaagaccagctgatgcttttggaagatgcttggagagaactgtttgttctaggaatagcacaatgggccattccggttgatgctaacactctactggctgtatctggcatgaacggtgacaacacagattcccagaagctgaacaagatcatatctgaaatacaggctttacaagaggtggtggctcgatttagacaactccggttagatgctactgaatttgcctgtctaaaatgcatcgtcactttcaaagccgttcctacacatagtggttctgaactgagaagtttccggaatgctgccgccattgcagcccttcaagatgaggctcagctaacgctcaacagctacatccataccagatatcccactcaaccctgtcgctttggaaaactcctgttgcttttgccagctttacgttctattagcccatcaactatagaagaagtgtttttcaaaaaaaccatcggcaatgtgccaattacaagactgctttcagatatgtacaaatccagtgatatc

SEQ ID NO: 5161 - DNA, 1101 bp, Homo sapiens
  source 1..1101: mol_type = genomic DNA
atggagaccagaccaacagctctgatgagctccacagtggctgcagctgcgcctgcagctggggctgcctccaggaaggagtctccaggcagatggggcctgggggaggatcccacaggcgtgagcccctcgctccagtgccgcgtgtgcggagacagcagcagcgggaagcactatggcatctatgcctgcaacggctgcagcggcttcttcaagaggagcgtacggcggaggctcatctacaggtgccaggtgggggcagggatgtgccccgtggacaaggcccaccgcaaccagtgccaggcctgccggctgaagaagtgcctgcaggcggggatgaaccaggacgccgtgcagaacgagcgccagccgcgaagcacagcccaggtccacctggacagcatggagtccaacactgagtcccggccggagtccctggtggctcccccggccccggcagggcgcagcccacggggccccacacccatgtctgcagccagagccctgggccaccacttcatggccagccttataacagctgaaacctgtgctaagctggagccagaggatgctgatgagaatattgatgtcaccagcaatgaccctgagttcccctcctctccatactcctcttcctccccctgcggcctggacagcatccatgagacctcggctcgcctactcttcatggccgtcaagtgggccaagaacctgcctgtgttctccagcctgcccttccgggatcaggtgatcctgctggaagaggcgtggagtgaactctttctcctcggggccatccagtggtctctgcctctggacagctgtcctctgctggcaccgcccgaggcctctgctgccggtggtgcccagggccggctcacgctggccagcatggagacgcgtgtcctgcaggaaactatctctcggttccgggcattggcggtggaccccacggagtttgcctgcatgaaggccttggtcctcttcaagccagagacgcggggcctgaaggatcctgagcacgtagaggccttgcaggaccagtcccaagtgatgctgagccagcacagcaaggcccaccaccccagccagcccgtgagg

SEQ ID NO: 5162 - DNA, 1230 bp, Homo sapiens
  source 1..1230: mol_type = genomic DNA
atggagaccagaccaacagctctgatgagctccacagtggctgcagctgcgcctgcagctggggctgcctccaggaaggagtctccaggcagatggggcctgggggaggatcccacaggcgtgagcccctcgctccagtgccgcgtgtgcggagacagcagcagcgggaagcactatggcatctatgcctgcaacggctgcagcggcttcttcaagaggagcgtacggcggaggctcatctacaggtgccaggtgggggcagggatgtgccccgtggacaaggcccaccgcaaccagtgccaggcctgccggctgaagaagtgcctgcaggcggggatgaaccaggacgccgtgcagaacgagcgccagccgcgaagcacagcccaggtccacctggacagcatggagtccaacactgagtcccggccggagtccctggtggctcccccggccccggcagggcgcagcccacggggccccacacccatgtctgcagccagagccctgggccaccacttcatggccagccttataacagctgaaacctgtgctaagctggagccagaggatgctgatgagaatattgatgtcaccagcaatgaccctgagttcccctcctctccatactcctcttcctccccctgcggcctggacagcatccatgagacctcggctcgcctactcttcatggccgtcaagtgggccaagaacctgcctgtgttctccagcctgcccttccgggatcaggtgatcctgctggaagaggcgtggagtgaactctttctcctcggggccatccagtggtctctgcctctggacagctgtcctctgctggcaccgcccgaggcctctgctgccggtggtgcccagggccggctcacgctggccagcatggagacgcgtgtcctgcaggaaactatctctcggttccgggcattggcggtggaccccacggagtttgcctgcatgaaggccttggtcctcttcaagccagagacgcggggcctgaaggatcctgagcacgtagaggccttgcaggaccagtcccaagtgatgctgagccagcacagcaaggcccaccaccccagccagcccgtgaggtttgggaaattgctcctgctcctcccgtctttgaggtttatcactgcggaacgcatcgagctcctctttttccgcaagaccatagggaatactccaatggagaagctcctttgtgatatgttcaaaaac

SEQ ID NO: 5163 - DNA, 3972 bp, Homo sapiens
  source 1..3972: mol_type = genomic DNA
atgcatgtctttgtccagagtacctgtggagaagaaacaatggattccttagaccatatgctgacagatcctctggaacttggtccgtgtggagatggccatggcacgcgcatcatggaggattgcctcctgggaggcaccagagttagtctgcccgaggaccttctggaggatcctgagatcttctttgatgttgtcagcctctcaacatggcaggaagtgttaagtgattctcaacgtgaacacctccagcagtttctgccccagtttcctgaagacagtgctgagcagcagaatgaactcatcttagccttgttcagtggggagaacttccgctttggaaaccctctgcacattgcccagaagcttttccgagacggacactttaaccccgaggtggtcaagtaccggcagttatgcttcaagtcacagtacaagcgctacctcaactcccagcagcagtatttccatcggctgctgaagcaaattcttgcttcccggagtgatctgctggagatggcccggcggagtggccccgcccttcccttccggcagaaacgcccttcaccatcccgcacacctgaggagcgggagtggcggacccagcagcgctacttgaaggtcttaagggaagtgaaagaggagtgtggtgacacagccctgtcatctgatgaagaggccacgttggatttacaagaacaattttcttttgaagatctcagctcatggcttccgagctctccagcacgttctcctagtcctgcggtgcccctgcgggtggtgcccacactttcaaccacggatatgaaaactgcagataaagtagaactgggggacagtgacctgaagataatgttaaagaagcaccacgagaagcggaaacatcagccagatcacccggaccttttgacaggggacctgactctcaatgacatcatgactcgagtaaatgctggcaggaagggctctctggcagccttatatgacttggctgtccttaaaaaaaaggttaaggaaaaagaggaaaagaagaagaagaaaataaaaacgatcaaatcagaggcagaggacctggccgagccgctaagcagtactgaaggggtcgcacctctctcacaggccccctctccgctggcaattcctgctatcaaggaagagccccttgaagacctcaagccttgccttggaatcaatgaaatatcttccagcttcttctctcttctattagagatcttgctgctggagagtcaggctagccttcctatgctagaggagcgagttttggattggcagtcatcgccagccagctccctcaacagctggttctctgcggcccccaactgggctgagttggtactaccagccctgcagtatcttgctggagaaagtcgagctgttccttccagtttctctccatttgttgaattcaaagagaaaacccagcagtggaagttgcttggccaatcccaagataatgaaaaggaattagctgccctcttccagctatggctagagaccaaagatcaggccttctgtaagcaagaaaatgaagacagctcagatgccacaacacctgtccctcgggtaagaactgactatgtggtgcgtcccagcacgggggaggagaaacgggtttttcaggagcaggagcgttacaggtatagccaaccccataaggcgttcacctttcgcatgcacggctttgagtctgtggtggggccagtgaagggcgtgtttgacaaggagacctcgctcaacaaggctcgggagcactccctgctgcgctccgaccggcctgcctacgtcaccattctgtctcttgttcgggacgctgcggctcgactgcctaatggagaaggcacacgggcagagatctgtgaactgcttaaggactcccagtttcttgcaccagatgtcaccagcactcaggtaaatacagtagtgagtggtgcactggatcggctacattacgaaaaagatccctgtgtgaaatacgacattggacgaaagctgtggatctacctgcatcgtgaccggagtgaagaagagtttgagcggattcaccaagcacaagcagctgcagctaaagccagaaaagctcttcagcaaaaacccaagcccccatccaaggtgaagtccagtagcaaggagagctccataaaggtccttagcagtggcccttctgagcagagccagatgagcctcagtgactccagtatgccacccaccccagtcacacctgtaacccccaccacaccagcattgcccgccattcccatctcccctccacctgtatcggcagtgaacaaaagcggcccttccacagtctcagaaccagctaagtctagctcgggtgttcttctggtgtcttcaccaacaatgccacatctgggaacaatgctttccccagcttccagccagactgcacccagttctcaggctgccgcccgggtcgtgagccactctggctctgctggactgtctcaggtgcgagtggtggcccagcctagccttcctgctgttccccagcagtcgggagggccggcacagacattgccacagatgccagcaggaccgcagatccgggttccagccactgccacacagaccaaagtagtgccccagacagtaatggccactgtgcccgtcaaagcgcagactacggcagccactgtgcagcggcctggacccgggcagacagggctcacggtgacaagtctccctgccacagccagccctgtgagtaagccagccacgagttctcctgggacctctgctcccagtgcctccacggctgccgtcattcaaaatgtcacaggacagaacatcatcaagcaggtggcaatcactgggcagcttggtgtgaagccccaaacaggcaacagcattccactcacagccactaacttccgcatccagggtaaggatgtattgcgtctgccgccctcttccatcaccacagatgccaagggccagacggttctgcgaatcactccggacatgatggccacattggccaagtcccaggttaccacagtcaaattgacccaggacctcttcgggacaggaggcaacactacaggcaaaggcatctctgccaccttacacgtcacttccaatccagtacatgcagctgatagccctgccaaggccagttcagccagtgccccttcatccactccaacaggtaccactgtggtcaaagtgactcctgacctcaagccaacagaagcctcaagttcggcttttcgcttgatgccagctcttggcgtgagtgtggctgaccagaagggaaaaagcacagtggcctcttcagaagcaaaaccagctgccacgatccgcatcgtgcagggactgggagtgatgcctcccaaagcaggccagaccatcaccgttgcaacccacgccaagcaaggggcctcggtggccagtgggtctggaactgtccatacttcagcggtgtccttacccagtatgaatgctgctgtgtccaagactgtagctgtggcttctggggctgcaagcacccccatcagcatcagcacaggagcccccaccgtgcggcaggtccctgtcagcaccacggttgtgtccacgtcccaggctgggaagttgcctacacggatcacagttcccctctctgtgatcagccagccaatgaagggcaagagcgtggtcacagcccccatcatcaaaggcaaccttggagccaacctcagtgggttgggccgcaacatcatcctcacaactatgccagcaggcactaagctcattgctggcaataagcctgttagtttcctcactgctcagcagttgcagcagcttcagcagcaaggtcaggccacacaggtgcgcatccagactgtccctgcatcccatctccaacagggaacagcttctggctcctccaaagcagtctccactgttgttgtgactacagctccgtctcctaaacaggcacctgagcaacaa

SEQ ID NO: 5164 - DNA, 3897 bp, Homo sapiens
  source 1..3897: mol_type = genomic DNA
atggattccttagaccatatgctgacagatcctctggaacttggtccgtgtggagatggccatggcacgcgcatcatggaggattgcctcctgggaggcaccagagttagtctgcccgaggaccttctggaggatcctgagatcttctttgatgttgtcagcctctcaacatggcaggaagtgttaagtgattctcaacgtgaacacctccagcagtttctgccccagtttcctgaagacagtgctgagcagcagaatgaactcatcttagccttgttcagtggggagaacttccgctttggaaaccctctgcacattgcccagaagcttttccgagacggacactttaaccccgaggtggtcaagtaccggcagttatgcttcaagtcacagtacaagcgctacctcaactcccagcagcagtatttccatcggctgctgaagcaaattcttgcttcccggagtgatctgctggagatggcccggcggagtggccccgcccttcccttccggcagaaacgcccttcaccatcccgcacacctgaggagcgggagtggcggacccagcagcgctacttgaaggtcttaagggaagtgaaagaggagtgtggtgacacagccctgtcatctgatgaagaggatctcagctcatggcttccgagctctccagcacgttctcctagtcctgcggtgcccctgcgggtggtgcccacactttcaaccacggatatgaaaactgcagataaagtagaactgggggacagtgacctgaagataatgttaaagaagcaccacgagaagcggaaacatcagccagatcacccggaccttttgacaggggacctgactctcaatgacatcatgactcgagtaaatgctggcaggaagggctctctggcagccttatatgacttggctgtccttaaaaaaaaggttaaggaaaaagaggaaaagaagaagaagaaaataaaaacgatcaaatcagaggcagaggacctggccgagccgctaagcagtactgaaggggtcgcacctctctcacaggccccctctccgctggcaattcctgctatcaaggaagagccccttgaagacctcaagccttgccttggaatcaatgaaatatcttccagcttcttctctcttctattagagatcttgctgctggagagtcaggctagccttcctatgctagaggagcgagttttggattggcagtcatcgccagccagctccctcaacagctggttctctgcggcccccaactgggctgagttggtactaccagccctgcagtatcttgctggagaaagtcgagctgttccttccagtttctctccatttgttgaattcaaagagaaaacccagcagtggaagttgcttggccaatcccaagataatgaaaaggaattagctgccctcttccagctatggctagagaccaaagatcaggccttctgtaagcaagaaaatgaagacagctcagatgccacaacacctgtccctcgggtaagaactgactatgtggtgcgtcccagcacgggggaggagaaacgggtttttcaggagcaggagcgttacaggtatagccaaccccataaggcgttcacctttcgcatgcacggctttgagtctgtggtggggccagtgaagggcgtgtttgacaaggagacctcgctcaacaaggctcgggagcactccctgctgcgctccgaccggcctgcctacgtcaccattctgtctcttgttcgggacgctgcggctcgactgcctaatggagaaggcacacgggcagagatctgtgaactgcttaaggactcccagtttcttgcaccagatgtcaccagcactcaggtaaatacagtagtgagtggtgcactggatcggctacattacgaaaaagatccctgtgtgaaatacgacattggacgaaagctgtggatctacctgcatcgtgaccggagtgaagaagagtttgagcggattcaccaagcacaagcagctgcagctaaagccagaaaagctcttcagcaaaaacccaagcccccatccaaggtgaagtccagtagcaaggagagctccataaaggtccttagcagtggcccttctgagcagagccagatgagcctcagtgactccagtatgccacccaccccagtcacacctgtaacccccaccacaccagcattgcccgccattcccatctcccctccacctgtatcggcagtgaacaaaagcggcccttccacagtctcagaaccagctaagtctagctcgggtgttcttctggtgtcttcaccaacaatgccacatctgggaacaatgctttccccagcttccagccagactgcacccagttctcaggctgccgcccgggtcgtgagccactctggctctgctggactgtctcaggtgcgagtggtggcccagcctagccttcctgctgttccccagcagtcgggagggccggcacagacattgccacagatgccagcaggaccgcagatccgggttccagccactgccacacagaccaaagtagtgccccagacagtaatggccactgtgcccgtcaaagcgcagactacggcagccactgtgcagcggcctggacccgggcagacagggctcacggtgacaagtctccctgccacagccagccctgtgagtaagccagccacgagttctcctgggacctctgctcccagtgcctccacggctgccgtcattcaaaatgtcacaggacagaacatcatcaagcaggtggcaatcactgggcagcttggtgtgaagccccaaacaggcaacagcattccactcacagccactaacttccgcatccagggtaaggatgtattgcgtctgccgccctcttccatcaccacagatgccaagggccagacggttctgcgaatcactccggacatgatggccacattggccaagtcccaggttaccacagtcaaattgacccaggacctcttcgggacaggaggcaacactacaggcaaaggcatctctgccaccttacacgtcacttccaatccagtacatgcagctgatagccctgccaaggccagttcagccagtgccccttcatccactccaacaggtaccactgtggtcaaagtgactcctgacctcaagccaacagaagcctcaagttcggcttttcgcttgatgccagctcttggcgtgagtgtggctgaccagaagggaaaaagcacagtggcctcttcagaagcaaaaccagctgccacgatccgcatcgtgcagggactgggagtgatgcctcccaaagcaggccagaccatcaccgttgcaacccacgccaagcaaggggcctcggtggccagtgggtctggaactgtccatacttcagcggtgtccttacccagtatgaatgctgctgtgtccaagactgtagctgtggcttctggggctgcaagcacccccatcagcatcagcacaggagcccccaccgtgcggcaggtccctgtcagcaccacggttgtgtccacgtcccaggctgggaagttgcctacacggatcacagttcccctctctgtgatcagccagccaatgaagggcaagagcgtggtcacagcccccatcatcaaaggcaaccttggagccaacctcagtgggttgggccgcaacatcatcctcacaactatgccagcaggcactaagctcattgctggcaataagcctgttagtttcctcactgctcagcagttgcagcagcttcagcagcaaggtcaggccacacaggtgcgcatccagactgtccctgcatcccatctccaacagggaacagcttctggctcctccaaagcagtctccactgttgttgtgactacagctccgtctcctaaacaggcacctgagcaacaa

SEQ ID NO: 5165 - DNA, 1266 bp, Homo sapiens
  source 1..1266: mol_type = genomic DNA
atgccgcgctcatttctcgtcaaaagcaagaaggctcacagctaccaccagccgcgctccccaggaccagactattccctccgtttagagaatgtaccggcgcctagccgagcagacagcacttcaaatgcaggcggggcgaaggcggagccccgggaccgtttgtcccccgaatcgcagctgaccgaagccccagacagagcctccgcatccccagacagctgcgaaggcagcgtctgcgaacggagctcggagtttgaggacttctggaggcccccgtcaccctccgcgtctccagcctcggagaagtcaatgtgcccatcgctggacgaagcccagcccttccccctgcctttcaaaccgtactcatggagcggcctggcgggttctgacctgcggcacctggtgcagagctaccgaccgtgtggggccctggagcgtggcgctggcctgggcctcttctgcgaacccgccccggagcctggccacccggccgcgctgtacggcccgaagcgggctgccggcggcgcgggggccggggcgccagggagctgcagcgcaggggccggtgccaccgctggccctggcctagggctctacggcgacttcgggtctgcggcagccgggctgtatgagaggcccacggcagcggcgggcttgctgtaccccgagcgtggccacgggctgcacgcagacaagggcgctggcgtcaaggtggagtcggagctgctgtgcacccgcctgctgctgggcggcggctcctacaagtgcatcaagtgcagcaaggtgttctccacgccgcacgggctcgaggtgcacgtgcgcaggtcccacagcggtaccagaccctttgcctgcgagatgtgcggcaagaccttcgggcacgcggtgagcctggagcagcacaaagccgtgcactcgcaggaacggagctttgactgtaagatctgtgggaagagcttcaagaggtcatccacactgtccacacacctgcttatccactcagacactcggccctacccctgtcagtactgtggcaagaggttccaccagaagtcagacatgaagaaacacactttcatccacactggtgagaagcctcacaagtgccaggtgtgcggcaaggcattcagccagagctccaacctcatcacccacagccgcaaacacacaggcttcaagcccttcggctgcgacctctgtgggaagggtttccagaggaaggtggacctccgaaggcaccgggagacgcagcatgggctcaaa

SEQ ID NO: 5166 - DNA, 684 bp, Homo sapiens
  source 1..684: mol_type = genomic DNA
atggagcgggtgaagatgatcaacgtgcagcgtctgctggaggctgccgagtttttggagcgccgggagcgagagtgtgaacatggctacgcctcttcattcccgtccatgccgagcccccgactgcagcattcaaagcccccacggaggttgagccgggcacagaaacacagcagcgggagcagcaacaccagcactgccaacagatctacacacaatgagctggaaaagaatcgacgagctcatctgcgcctttgtttagaacgcttaaaagttctgattccactaggaccagactgcacccggcacacaacacttggtttgctcaacaaagccaaagcacacatcaagaaacttgaagaagctgaaagaaaaagccagcaccagctcgagaatttggaacgagaacagagatttttaaagtggcgactggaacagctgcagggtcctcaggagatggaacgaatacgaatggacagcattggatcaactatttcttcagatcgttctgattcagagcgagaggagattgaagtggatgttgaaagcacagagttctcccatggagaagtggacaatataagtaccaccagcatcagtgacattgatgaccacagcagcctgccgagtattgggagtgacgagggttactccagtgccagtgtcaaactttcattcacttca

SEQ ID NO: 5167 - DNA, 546 bp, Homo sapiens
  source 1..546: mol_type = genomic DNA
atgccgagcccccgactgcagcattcaaagcccccacggaggttgagccgggcacagaaacacagcagcgggagcagcaacaccagcactgccaacagacgagctcatctgcgcctttgtttagaacgcttaaaagttctgattccactaggaccagactgcacccggcacacaacacttggtttgctcaacaaagccaaagcacacatcaagaaacttgaagaagctgaaagaaaaagccagcaccagctcgagaatttggaacgagaacagagatttttaaagtggcgactggaacagctgcagggtcctcaggagatggaacgaatacgaatggacagcattggatcaactatttcttcagatcgttctgattcagagcgagaggagattgaagtggatgttgaaagcacagagttctcccatggagaagtggacaatataagtaccaccagcatcagtgacattgatgaccacagcagcctgccgagtattgggagtgacgagggttactccagtgccagtgtcaaactttcattcacttca

SEQ ID NO: 5168 - DNA, 885 bp, Homo sapiens
  source 1..885: mol_type = genomic DNA
atgggcaaacgcgggcggccgcgcaaggaggcgcgctgcgagggcgcggggctggcccccgccgcgcccccggctgtgccccccgccgtggccgcgccccagcccccggccctgcccgaggaccccgctggggccaagcccaggtgccccttctcagacattttcaacaccagcgagaactcgatggagaagcacatcaacacttttctgcagaacgtgcagattctgctcgaggccgccagctacctggagcagatcgagaaagaaaacaaaaagtgtgaacatggctacgcctcttcattcccgtccatgccgagcccccgactgcagcattcaaagcccccacggaggttgagccgggcacagaaacacagcagcgggagcagcaacaccagcactgccaacagatctacacacaatgagctggaaaagaatcgacgagctcatctgcgcctttgtttagaacgcttaaaagttctgattccactaggaccagactgcacccggcacacaacacttggtttgctcaacaaagccaaagcacacatcaagaaacttgaagaagctgaaagaaaaagccagcaccagctcgagaatttggaacgagaacagagatttttaaagtggcgactggaacagctgcagggtcctcaggagatggaacgaatacgaatggacagcattggatcaactatttcttcagatcgttctgattcagagcgagaggagattgaagtggatgttgaaagcacagagttctcccatggagaagtggacaatataagtaccaccagcatcagtgacattgatgaccacagcagcctgccgagtattgggagtgacgagggttactccagtgccagtgtcaaactttcattcacttca

SEQ ID NO: 5169 - DNA, 2016 bp, Homo sapiens
  source 1..2016: mol_type = genomic DNA
atgatccagtcacagatatcatttgaggatgtggctgtggatttcacgctggaggaatggcagctacttaatcctactcagaagaacttgtacagagatgtgatgttggagaactatagcaatctggttttcttgggttttcaaattctcaaacctgatgcaatgttcaaactggaacaacaagatccatggataataggtcaagaaatcctaaatcagaacttttcagaagtctggctagataatcccaaaatgtggctccgagataatcaagacaaccttaaaagtatggagagaggccataaatatgatgtttttggaaaaatatttaattcaagcataaacattgttcatgtaggactgcgatcccataaatgtggcacaggagaaaaaagtttgaaatgtccttttgatttgcttattccaaaaaataattgtgaaagaaagaaaattgatgaactcaataagaaattattgttctgtatcaaacctggcagaacccatggtgggataaaatactgtgattgcagtacatgtagaaaatccagcaacgaagagccatggctcactgctaatcacataacacacacaggagtctatttatgcatggaatgtggcagattttttaacaagaagtcacaacttgttatacaccagagaactcatacaggagagaagccctatcaatgcagtgagtgtggaaaagccttttcacagaagtcactgctcacggttcatcaaagaactcactcaggagaaaaaccgcatgggtgcagcgaatgtcagaaagcttttagtaggaagtcactcctcattttacatcagagaattcatactggagagaagccgtatggatgcagtgaatgtggaaaagccttcagtaggaagtcgcagcttaaaagacatcagataacgcacacaatagagaaaccctacagttgcagtgagtgtgggaaagcattctcccagaaattaaaactcatcacacatcagagagcgcacacaggagagaaaccctatccatgtagtcactgtggaaaagccttcttttggaagtcgcagctgattactcatcagaggacccacacagggaagaaaccttacggatgtggtgagtgtcaaaaagccttcagcaggaactcacttctcattaggcatcagaggattcatacaggagagaagccctacgaatgcaacgaatgtggtgaagccttcatcagaaaaccacagctgattaaacatcagataactcacacaggagagaagaactatcgatgcagtgattgtgaggaggccttctttaagaagtcagagttaataagacatcaaaaaattcacttaggagagaaaccatatggatgcattcaatgtgggaaaaccttctttgggaagtcccagctcctaacgcatcacagaacacacactggggagaagccttatgaatgcagtgagtgtgggaaggccttcacccagaagtcaagcctgatatcacatcagagaacacatacaggtgagaaaccctatgaatgcagtgaatgcaggaaaaccttcagtgagaagtcaagtctcattcatcatcagagaacccatactggagaaaagccctttgaatgtagtgaatgtaggaaagcttttgcctggaagccacagcttcttaggcatcagagaattcatacaggggagaaaccctatgaatgcagtgaatgtgggaaagcatttgttcagaaagtgcagctcattaagcatcaaagaaatcacacaggagagaaaacctatggatgcagcgattgtgcaaaagctttctttgagaaggcacagctgattatacatcagagaattcatacaggagagagaccatataaatgtggtgaatgtgggaaatctttcacaagaaagtcacaccttatgaggcatcagaggattcatacaggagataaatactatggatgcaatgagtgtgggaccaccttcaacaggaagtcgcagcttatgatacatcagagaaatcatataata

SEQ ID NO: 5170 - DNA, 1923 bp, Homo sapiens
  source 1..1923: mol_type = genomic DNA
atgatccagtcacagatatcatttgaggatgtggctgtggatttcacgctggaggaatggcagctacttaatcctactcagaagaacttgtacagagatgtgatgttggagaactatagcaatctggttttcttggaagtctggctagataatcccaaaatgtggctccgagataatcaagacaaccttaaaagtatggagagaggccataaatatgatgtttttggaaaaatatttaattcaagcataaacattgttcatgtaggactgcgatcccataaatgtggcacaggagaaaaaagtttgaaatgtccttttgatttgcttattccaaaaaataattgtgaaagaaagaaaattgatgaactcaataagaaattattgttctgtatcaaacctggcagaacccatggtgggataaaatactgtgattgcagtacatgtagaaaatccagcaacgaagagccatggctcactgctaatcacataacacacacaggagtctatttatgcatggaatgtggcagattttttaacaagaagtcacaacttgttatacaccagagaactcatacaggagagaagccctatcaatgcagtgagtgtggaaaagccttttcacagaagtcactgctcacggttcatcaaagaactcactcaggagaaaaaccgcatgggtgcagcgaatgtcagaaagcttttagtaggaagtcactcctcattttacatcagagaattcatactggagagaagccgtatggatgcagtgaatgtggaaaagccttcagtaggaagtcgcagcttaaaagacatcagataacgcacacaatagagaaaccctacagttgcagtgagtgtgggaaagcattctcccagaaattaaaactcatcacacatcagagagcgcacacaggagagaaaccctatccatgtagtcactgtggaaaagccttcttttggaagtcgcagctgattactcatcagaggacccacacagggaagaaaccttacggatgtggtgagtgtcaaaaagccttcagcaggaactcacttctcattaggcatcagaggattcatacaggagagaagccctacgaatgcaacgaatgtggtgaagccttcatcagaaaaccacagctgattaaacatcagataactcacacaggagagaagaactatcgatgcagtgattgtgaggaggccttctttaagaagtcagagttaataagacatcaaaaaattcacttaggagagaaaccatatggatgcattcaatgtgggaaaaccttctttgggaagtcccagctcctaacgcatcacagaacacacactggggagaagccttatgaatgcagtgagtgtgggaaggccttcacccagaagtcaagcctgatatcacatcagagaacacatacaggtgagaaaccctatgaatgcagtgaatgcaggaaaaccttcagtgagaagtcaagtctcattcatcatcagagaacccatactggagaaaagccctttgaatgtagtgaatgtaggaaagcttttgcctggaagccacagcttcttaggcatcagagaattcatacaggggagaaaccctatgaatgcagtgaatgtgggaaagcatttgttcagaaagtgcagctcattaagcatcaaagaaatcacacaggagagaaaacctatggatgcagcgattgtgcaaaagctttctttgagaaggcacagctgattatacatcagagaattcatacaggagagagaccatataaatgtggtgaatgtgggaaatctttcacaagaaagtcacaccttatgaggcatcagaggattcatacaggagataaatactatggatgcaatgagtgtgggaccaccttcaacaggaagtcgcagcttatgatacatcagagaaatcatataata

SEQ ID NO: 5171 - DNA, 3717 bp, Homo sapiens
  source 1..3717: mol_type = genomic DNA
atggagctccccaactacagccggcagctgctgcagcagctgtacactctgtgcaaggagcagcagttctgtgattgcaccatctccattggtaccatttacttcagggctcacaagcttgtcctggctgctgccagcctcctgttcaaaaccctgctggataacacagataccatctccatcgatgcatctgtggtgagccccgaggagtttgcgctcttgttggaaatgatgtacacgggcaaactacctgtgggcaagcacaacttctccaaaatcatctccttagcagacagtctacagatgtttgatgtagctgttagctgcaaaaatcttctgaccagccttgtaaactgctcggttcagggtcaggtggtaagggatgtctctgcgccatcctcagagacattcagaaaggaaccagagaagcctcaagtagaaatcctttcatctgaaggtgctggagagcctcattcttccccagagcttgctgccactccagggggccctgtgaaagctgagactgaggaagcagcccattcagtttcacaagagatgagtgtgaattctcccacagcccaggagagccagaggaatgcagaaaccccagcggagactcctactacagctgaagcttgttccccctcccctgctgtgcaaacctttagtgaggcaaagaagacaagcacagaaccaggatgtgaaaggaaacactaccagctgaattttcttctagaaaatgaaggtgtcttctcagatgcactcatggttacccaggatgttttaaaaaaactagaaatgtgttcagaaattaaaggtccacagaaggagatgatagtgaaatgtttcgagggtgaaggaggacattcagcattccagagaatcctgggtaaagtaagagaggaaagcctggatgttcaaactgttgtgtccctgttgaggctgtaccaatattctaatcctgcagtaaaaacagcactattagacaggaagccagaagatgtagacacagtgcagccaaaagggagcacagaggagggaaagaccttgtctgttctgttactagaacacaaagaggacctgatacagtgtgtaacacagctgagacctattatggagtccctggaaacagccaaggaggaattcctgactggcactgaaaaaagggtgattctgaattgctgtgagggcagaacacccaaggagacaatagaaaatttgttgcacagaatgactgaagagaagacgctgactgctgagggtttggtaaaactcctccaggctgtgaagacgactttcccaaacctgggccttctgctagagaagttgcagaaatcagccactttgccaagcaccacagtccaaccaagccctgatgattatgggactgagctattgagacgctatcatgaaaacctctctgagattttcacagacaaccagattttattaaagatgatctcacacatgacaagtttagcccctggagaaagagaggtcatggagaagcttgtgaaacgtgactctggttcaggtggtttcaattctctgatatcagcagttctagaaaagcagactctctctgccacagccatttggcaactgctgctggtggttcaggagacaaagacctgtccattggacctgctcatggaggaaatacgaagggagcctggtgccgatgctttcttccgggcagtgaccaccccagaacatgccactttagaaacaatcctgaggcataaccagttgatcttggaggccatccaacagaagattgagtacaagctctttacctcggaggaggagcacctggcagagactgtgaaagagattctgagcattccctctgagacagccagccctgaagcttccctgagagcagtgctgagcagagccatggaaaaatcagtcccggccattgaaatatgccacctcctgtgcagtgtccacaaatcttttccaggcctgcagcctgtcatgcaggagttggcatacattggtgtccttactaaggaagatggagagaaggaaacgtggaaggtgagtaataaatttcaccttgaagccaacaacaaagaagatgaaaaggcagccaaagaagacagccagcctggggaacagaatgatcaaggagagactggttccttgccaggacagcaagagaaagaggcttcagcctccccagaccctgccaagaagagcttcatctgtaaggcctgcgacaaaagcttccatttctactgccgcctaaaggtgcacatgaagcgctgccgggtggctaagagcaaacaggtgcagtgtaaggagtgcagtgagaccaaggattcaaagaaagagctggacaaacatcagctggaggcccatggtgcaggtggagagcccgatgcccccaagaagaagaagaagaggcttccagtgacatgtgacctctgtggcagagaatttgcccatgcctcaggcatgcagtaccataagctgacagagcacttcgatgagaagcctttctcctgtgaagagtgtggggcgaagtttgcagccaattccaccctgaagaaccaccttcgccttcacaccggggaccgcccgttcatgtgcaagcactgcctcatgaccttcacccaggcctccgccctggcctatcacaccaagaagaagcactcagaagggaaaatgtatgcatgccagtactgtgatgctgtgtttgcccagtctattgagctgtcccgccacgtgaggacccacaccggggacaagccctatgtctgcagagactgtggcaagggcttccggcaagccaatggcctctccatccatctgcacacctttcacaacatagaagatccttatgactgcaagaagtgcaggatgagtttccccactcttcaggatcaccggaagcacatccatgaggtgcactccaaagagtaccacccctgccccacgtgtgggaagatcttcagtgccccgtccatgctggagcggcacgtggtgacccacgttggagggaagcccttcagctgcgggatctgcaacaaggcctaccagcaattgtctggtttgtggtaccacaatcgaacccaccaccctgacgtatttgctgctcagaaccaccgatcttccaagttctcatcactccagtgcagctcctgtgacaaaaccttccccaacaccattgagcacaagaagcacatcaaagcagaacatgcagatatgaagttccatgaatgtgaccagtgtaaggagctcttccccacgccagccttgctgcaggttcatgtcaagtgccagcattcagggtcccagccattccggtgcttgtactgtgctgctactttccgttttcctggagcattgcagcaccatgtcaccacggagcacttcaagcagtcagagaccaccttcccctgtgagctctgtggggaactcttcacctcccaggcccagcttgacagtcacctggaatctgagcacccaaaggtgatgagcacggaaacccaggccgcagcctcacagatggcgcaggtgatccaaaccccagagccggtggccccgacagagcaggtgatcactttggaggagacccagcttgccgggtcgcaggtgtttgtgacgttgccagattctcaggcatctcaggccagctctgagctcgtggcggtgactgtggaggacttgctggatggcacagtgacgctgatctgtggtgaggccaaa

SEQ ID NO: 5172 - DNA, 3381 bp, Homo sapiens
  source 1..3381: mol_type = genomic DNA
atggagctccccaactacagccggcagctgctgcagcagctgtacactctgtgcaaggagcagcagttctgtgattgcaccatctccattggtaccatttacttcagggctcacaagcttgtcctggctgctgccagcctcctgttcaaaaccctgctggataacacagataccatctccatcgatgcatctgtggtgagccccgaggagtttgcgctcttgttggaaatgatgtacacgggcaaactacctgtgggcaagcacaacttctccaaaatcatctccttagcagacagtctacagatgtttgatgtagctgttagctgcaaaaatcttctgaccagccttgtaaactgctcggttcagggtcaggtggtaagggatgtctctgcgccatcctcagagacattcagaaaggaaccagagaagcctcaagtagaaatcctttcatctgaaggtgctggagagcctcattcttccccagagcttgctgccactccagggggccctgtgaaagctgagactgaggaagcagcccattcagtttcacaagagatgagtgtgaattctcccacagcccaggagagccagaggaatgcagaaaccccagcggagactcctactacagctgaagcttgttccccctcccctgctgtgcaaacctttagtgaggcaaagaagacaagcacagaaccaggatgtgaaaggaaacactaccagctgaattttcttctagaaaatgaaggtgtcttctcagatgcactcatggttacccaggatgttttaaaaaaactagaaatgtgttcagaaattaaaggtccacagaaggaggtgattctgaattgctgtgagggcagaacacccaaggagacaatagaaaatttgttgcacagaatgactgaagagaagacgctgactgctgagggtttggtaaaactcctccaggctgtgaagacgactttcccaaacctgggccttctgctagagaagttgcagaaatcagccactttgccaagcaccacagtccaaccaagccctgatgattatgggactgagctattgagacgctatcatgaaaacctctctgagattttcacagacaaccagattttattaaagatgatctcacacatgacaagtttagcccctggagaaagagaggtcatggagaagcttgtgaaacgtgactctggttcaggtggtttcaattctctgatatcagcagttctagaaaagcagactctctctgccacagccatttggcaactgctgctggtggttcaggagacaaagacctgtccattggacctgctcatggaggaaatacgaagggagcctggtgccgatgctttcttccgggcagtgaccaccccagaacatgccactttagaaacaatcctgaggcataaccagttgatcttggaggccatccaacagaagattgagtacaagctctttacctcggaggaggagcacctggcagagactgtgaaagagattctgagcattccctctgagacagccagccctgaagcttccctgagagcagtgctgagcagagccatggaaaaatcagtcccggccattgaaatatgccacctcctgtgcagtgtccacaaatcttttccaggcctgcagcctgtcatgcaggagttggcatacattggtgtccttactaaggaagatggagagaaggaaacgtggaaggtgagtaataaatttcaccttgaagccaacaacaaagaagatgaaaaggcagccaaagaagacagccagcctggggaacagaatgatcaaggagagactggttccttgccaggacagcaagagaaagaggcttcagcctccccagaccctgccaagaagagcttcatctgtaaggcctgcgacaaaagcttccatttctactgccgcctaaaggtgcacatgaagcgctgccgggtggctaagagcaaacaggtgcagtgtaaggagtgcagtgagaccaaggattcaaagaaagagctggacaaacatcagctggaggcccatggtgcaggtggagagcccgatgcccccaagaagaagaagaagaggcttccagtgacatgtgacctctgtggcagagaatttgcccatgcctcaggcatgcagtaccataagctgacagagcacttcgatgagaagcctttctcctgtgaagagtgtggggcgaagtttgcagccaattccaccctgaagaaccaccttcgccttcacaccggggaccgcccgttcatgtgcaagcactgcctcatgaccttcacccaggcctccgccctggcctatcacaccaagaagaagcactcagaagggaaaatgtatgcatgccagtactgtgatgctgtgtttgcccagtctattgagctgtcccgccacgtgaggacccacaccggggacaagccctatgtctgcagagactgtggcaagggcttccggcaagccaatggcctctccatccatctgcacacctttcacaacatagaagatccttatgactgcaagaagtgcaggatgagtttccccactcttcaggatcaccggaagcacatccatgaggtgcactccaaagagtaccacccctgccccacgtgtgggaagatcttcagtgccccgtccatgctggagcggcacgtggtgacccacgttggagggaagcccttcagctgcgggatctgcaacaaggcctaccagcaattgtctggtttgtggtaccacaatcgaacccaccaccctgacgtatttgctgctcagaaccaccgatcttccaagttctcatcactccagtgcagctcctgtgacaaaaccttccccaacaccattgagcacaagaagcacatcaaagcagaacatgcagatatgaagttccatgaatgtgaccagtgtaaggagctcttccccacgccagccttgctgcaggttcatgtcaagtgccagcattcagggtcccagccattccggtgcttgtactgtgctgctactttccgttttcctggagcattgcagcaccatgtcaccacggagcacttcaagcagtcagagaccaccttcccctgtgagctctgtggggaactcttcacctcccaggcccagcttgacagtcacctggaatctgagcacccaaaggtgatgagcacggaaacccaggccgcagcctcacagatggcgcaggtgatccaaaccccagagccggtggccccgacagagcaggtgatcactttggaggagacccagcttgccgggtcgcaggtgtttgtgacgttgccagattctcaggcatctcaggccagctctgagctcgtggcggtgactgtggaggacttgctggatggcacagtgacgctgatctgtggtgaggccaaa

SEQ ID NO: 5173 - DNA, 2727 bp, Homo sapiens
  source 1..2727: mol_type = genomic DNA
atgaagaagaggagaaaggttacttcaaatcttgagaagatccatctaggctatcataaagattcttcagaaggaaatgttgcagtggagtgtgaccaagtgacctatactcattctgcaggaagaccaactcctgaagctcttcactgttaccaggaacttcctccctctccagatcagagaaagcttttaagttctttgcagtataataagaatttgctaaaatatttaaatgatgataggcagaagcaaccatctttttgtgatttacttatcatagtggaaggaaaagaatttagtgcacataaagtagtcgttgctgtcggcagtagttattttcatgcgtgtttgagcaaaaatccaagcactgatgttgtcaccctggatcacgtaacacattcagtttttcagcatttgcttgaatttctttacacatcagaattttttgtgtacaaatatgaaatacctcttgttttagaggctgcaaaatttttggacattatagatgcagtgaagttgttaaataacgaaaatgttgccccttttcattcagagctaactgaaaagtcatcaccagaagaaacactaaatgaattaactggaagactatcaaataatcatcagtgcaaattctgtagtagacatttttgttataaaaagtctttagagaatcatttggctaaaacccataggtcccttttattagggaaaaaacatgggttaaaaatgctggagagaagtttctccgcaagaagatcaaaaaggaatcggaagtgccctgttaagtttgatgacaccagcgatgatgaacaggaaagtggtgatgggtcagacaatttgaatcaagaaaattttgataaggaaaagtcagatagaaatgattctgaggaccctggaagtgaatataatgctgaagaagatgagctagaggaggagatgtcagatgagtactctgacattgaagaacaaagtgaaaaggatcataatgatgcagaagaagaacctgaggctggtgattctgtaggaaatgttcatgaggggttaactccagtggtcattcagaacagcaacaaaaaaatattgcagtgtcctaaatgtgataaaacatttgaccgaataggaaaatatgagagccacacccgtgttcacacaggtgagaagccctttgagtgtgatatttgtcaccagcgctattcaacaaagtctaacctaactgttcacagaaagaagcacagtaatgaaacagaatttcataagaaggagcacaagtgcccttattgtaataaacttcatgcaagcaagaagactttagccaagcatgttaagagatttcatcctgaaaatgcacaagaatttatttccattaagaagactaagagtgaaagttggaaatgtgatatttgtaagaaatcttttactcgaagaccacacttggaggaacatatgattctacattctcaagataaaccttttaagtgtacctattgtgaagaacattttaaatcacggtttgctcggttaaagcatcaagaaaagttccatctgggtccttttccatgtgatatatgtggtcgccagtttaacgacactggaaatttgaaacgtcatatagaatgtactcatggtggaaagagaaaatggacttgctttatctgtggaaaatcagtacgagaaagaactactttgaaagaacatttgagaatccacagtggagaaaagcctcacctttgtagtatttgtgggcaaagttttcgtcatggaagttcgtatagacttcacttacgagtacatcatgatgataaaagatatgagtgcgatgaatgtggaaaaacatttatccgtcatgatcaccttacaaagcacaaaaaaatacattcaggtgaaaaagctcatcagtgtgaagaatgtggaaaatgttttggtcgtagggatcatctcactgttcattacaaaagcgtacaccttggagagaaagtgtggcaaaaatataaagcaacatttcatcaatgtgatgtttgtaagaaaatttttaaaggcaaatcaagtctggaaatgcattttcgaacgcattcaggtgaaaaaccatacaagtgtcaaatttgcaatcagtcttttagaattaagaaaacattaacaaaacacctggttattcattctgatgcccgacctttcaactgtcagcactgtaatgcaacatttaagcggaaagacaagctgaaataccacattgaccatgttcatgaaataaaatctcctgatgatcctctcagtacttctgaggaaaaacttgtatccttgccagttgagtactcatctgatgacaaaatctttcaaacagaaacaaaacaatatatggaccagcccaaagtttatcagtcggaagccaagacgatgttacagaatgtatctgctgaagtatgtgttccagtaactctggttccagttcagatgcctgacactccgagtgacctagtgcgtcatactaccacactcccaccatcttctcatgagattctgtcaccacagccacagtcaactgattatccacgagcagcggatttagcttttctggaaaaatatactcttactcctcaacctgcaaatatagttcacccagttcgacctgaacaaatgctagatcctagagaacaatcttatcttggaacattactgggccttgatagcactactggtgttcaaaatatttctacgaatgagcatcattca

SEQ ID NO: 5174 - DNA, 1266 bp, Homo sapiens
  source 1..1266: mol_type = genomic DNA
atggagttccctgagcacggcggacggctgctgggccgcctgagacagcagcgcgagctgggcttcctatgcgactgcaccgtgctggtgggcgacgcgcgcttcccggcccaccgtgccgtgctggccgcgtgcagcgtctacttccatctcttctacagggaccggcccgcgggcagtcgcgacacggtgcggctcaacggcgacatcgtcacggcgcccgccttcggccgcctactggacttcatgtacgagggccgcctggacctgcgcagcctgcctgtggaggacgtcctggcagccgccagctacctgcacatgtatgacatcgtcaaggtctgcaagggcaggctccaggagaaggatcgaagtctggacccggggaaccctgcccctggggcagaacctgctcagccaccgtgcccctggcctgtctggaccgcggacctctgcccagctgcccgaaaggccaagctccccccgtttggggtcaaggctgccctccctcctcgagcatctgggcctcctccctgccaggtcccagaagagtcagaccaggccctggacctgtcgttgaagtctggcccaaggcaggagcgggtccacccaccgtgcgtcctccagacacccctctgcagccagaggcagccaggggcccagccactggtgaaggacgaacgggactcactgtccgaacaggaggagagcagcagctctaggagcccccacagtcccccgaagccacctcctgttcctgcagccaagggcctggtggtgggcttgcagccgctgcccctcagcggagagggcagccgggagctggagcttggtgcagggcgactggcgagtgaggacgagctggggcctggtgggcccctctgcatctgcccgttgtgcagcaagctgtttcccagctcccacgtgctgcagctgcacctcagtgcccacttccgtgagcgagacagcacccgggcccggctctcacccgacggcgtggcacccacctgcccgctctgtgggaagaccttctcgtgcacatacacactgaagaggcacgagcggacacactcgggtgagaagccctatacgtgtgtgcagtgtggcaaaagttttcagtactcccacaacctgagccggcacaccgtagtgcacactcgagagaagccgcatgcctgccggtggtgtgagcgccgtttcacgcagtccggggacctctaccgccacgtccgcaagtttcactgtggcctcgtcaagtcccttctggtg

SEQ ID NO: 5175 - DNA, 1710 bp, Homo sapiens
  source 1..1710: mol_type = genomic DNA
atgggtgtgaaaacatttactcatagctcctcttcccacagccaggaaatgcttggaaagctaaatatgctgcgaaatgatggacatttttgtgatatcactattcgtgtccaggacaaaatcttccgggcacataaggtggtactagcagcttgcagtgatttctttcgcaccaaacttgtaggccaagccgaggatgagaacaagaatgtgttggatctgcatcatgttacagtgactggctttatacctcttttagaatatgcttacacagccactctatcaattaacacagaaaatattattgatgttctagcagcagccagctatatgcaaatgttcagtgttgccagcacctgctcagagttcatgaaatcaagcattttatggaatacacccaacagccaacctgaaaagggtctagatgctggacaagaaaataattctaactgcaattttacttctcgagatgggagcatttctcccgtgtcctcagagtgcagtgtggtagaaagaaccattcctgtctgccgagaatcccggagaaagcgcaaaagctacattgttatgtctcctgaaagtcctgtaaagtgtggcacacaaacaagctcaccccaggtattgaattcttcagcttcctactcagaaaatagaaaccaaccagttgactcttccttagcttttccttggacttttccttttggaattgatcgaaggattcagcctgagaaagttaagcaagcagaaaatacccggactttagaattacctggcccatctgagaccggtagaagaatggctgattatgtgacttgtgagagcacaaaaactaccttgcctttaggtaccgaagaagatgtccgggtcaaagtagaaagattaagtgatgaggaggtccatgaggaagtgtcccagcctgtcagtgcatctcagagttcgctgagtgatcagcagacagttccaggaagtgaacaagtccaagaggaccttctgattagtccacagtcttcctctataggctcagtagatgaaggcgtttctgagggcttgcctacacttcaaagcacgtctagcactaatgctcctccggatgatgatgatcgattggaaaatgttcagtatccctaccaactctacattgctccttccaccagcagtacagagcgaccaagtccaaatggtcccgacagaccttttcagtgtccaacctgcggggtgcgattcacccgtattcagaacctaaagcagcacatgctcatccactcaggaattaaaccatttcagtgtgaccgctgtgggaaaaagttcaccagggcttactcgctaaagatgcatcgcctaaagcatgaaggtaaacgctgtttccggtgccagatatgtagtgccactttcacttccttcggggaatataaacaccacatgagggtttcccggcacattatccgcaagcctcggatttacgagtgcaaaacatgtggcgccatgttcaccaactctggaaatttaatcgtgcacctgaggagtctgaaccatgaagcatcagagctagcaaactacttccagagcagtgatttcctagtaccggactacttaaaccaggaacaagaagagacccttgttcaatatgatcttggagaacacggttttgaaagcaactcctctgttcaaatgcctgtcatttcacagtaccactccaaaggcaaggaacca

SEQ ID NO: 5176 - DNA, 1422 bp, Homo sapiens
  source 1..1422: mol_type = genomic DNA
atgggtgtgaaaacatttactcatagctcctcttcccacagccaggaaatgcttggaaagctaaatatgctgcgaaatgatggacatttttgtgatatcactattcgtgtccaggacaaaatcttccgggcacataaggtggtactagcagcttgcagtgatttctttcgcaccaaacttgtaggccaagccgaggatgagaacaagaatgtgttggatctgcatcatgttacagtgactggctttatacctcttttagaatatgcttacacagccactctatcaattaacacagaaaatattattgatgttctagcagcagccagctatatgcaaatgttcagtgttgccagcacctgctcagagttcatgaaatcaagcattttatggaatacacccaacagccaacctgaaaagggtctagatgctggacaagaaaataattctaactgcaattttacttctcgagatgggagcatttctcccgtgtcctcagagtgcagtgtggtagaaagaaccattcctgtctgccgagaatcccggagaaagcgcaaaagctacattgttatgtctcctgaaagtcctgtaaagtgtggcacacaaacaagctcaccccaggtattgaattcttcagcttcctactcagaaaatagaaaccaaccagttgactcttccttagcttttccttggacttttccttttggaattgatcgaaggattcagcctgagaaagttaagcaagcagaaaatacccggactttagaattacctggcccatctgagaccggtagaagaatggctgattatgtgacttgtgagagcacaaaaactaccttgcctttaggtaccgaagaagatgtccgggtcaaagtagaaagattaagtgatgaggaggtccatgaggaagtgtcccagcctgtcagtgcatctcagagttcgctgagtgatcagcagacagttccaggaagtgaacaagtccaagaggaccttctgattagtccacagtcttcctctataggctcagtagatgaaggcgtttctgagggcttgcctacacttcaaagcacgtctagcactaatgctcctccggatgatgatgatcgattggaaaatgttcagtatccctaccaactctacattgctccttccaccagcagtacagagcgaccaagtccaaatggtcccgacagaccttttcagtgtccaacctgcggggtgcgattcacccgtattcagaacctaaagcagcacatgctcatccactcaggaattaaaccatttcagtgtgaccgctgtgggaaaaagttcaccagggcttactcgctaaagatgcatcgcctaaagcatgaagtaccactccaaaggcaaggaaccatgattgacaacagtcaagctgtggatgaaatgaccaggaacggagaa

SEQ ID NO: 5177 - DNA, 1533 bp, Homo sapiens
  source 1..1533: mol_type = genomic DNA
atggcggctgcagaggctgtgcatcacatacacctgcagaacttctcacgctctctgcttgagaccctcaatgggcagaggcttgggggacacttctgtgacgtgactgtgcgcattcgtgaagcttcgctgcgtgcccaccgctgcgtgctggcggccggctcacccttcttccaagacaagctgctgctcggccactctgagatccgtgtgcctccggtggtgcccgcgcagacagtgcgacagctggtagagttcctgtacagcggttcgctcgttgtggcgcagggtgaagccctgcaggtgctcacggccgcgtcagtgcttcgcatacagacagttatcgacgaatgcacgcagattatcgcccgcgctcgagccccgggcacctctgcgcccacgcccctgcccacccctgtgcccccgccactcgcacctgcgcagctgcgtcaccgcctgcgccacctgctggctgcacgtcccccggggcaccccggtgctgcacacagccgtaagcagcgccagcccgcgcgtttgcagctgccagcgcccccaacacctgccaaggctgaggggcctgatgctgacccctcactgtccgcggcccctgatgaccgaggtgacgaggatgacgaggaaagtgacgatgagaccgatggcgaggatggcgaaggtggcggcccaggcgagggccaggcacctccttccttcccagactgtgctgctggcttcctcactgctgctgctgacagcgcgtgcgaggagccccctgcacccactggcctcgctgactacagtggtgccgggagagattttcttcggggagctgggtcagctgaggacgtatttccagacagctatgtatccacttggcacgacgaggatggcgctgtccccgaaggctgtcccactgagacccctgtccagcccgactgcatactgtctggatcccgcccgcctggtgtgaagaccccagggccgcccgttgcactcttcccctttcacttgggtgcccctgggccacccgcaccacccccttcagcaccatcggggccagcccctgcgcccccacccgccttctaccccacactccagcccgaggcagcccccagtactcagctgggggaggtcccggctccctctgctgctcccaccacggccccctcaggcacccctgctcgcaccccaggtgctgagccacctacgtatgagtgcagccactgtcgcaagacgttcagctcccggaaaaactacaccaagcacatgttcatccactcgggggagaagccgcaccagtgcgccgtgtgctggcgatccttctctctacgcgactacctgctcaaacacatggtcacgcacaccggcgtgcgcgccttccagtgcgccgtctgcgccaagcgcttcacgcagaagagctcgctcaacgtgcacatgcgcactcaccggcccgagcgcgcgccctgccccgcctgcggcaaggtcttctcgcaccgcgcgctgctggagcgccacctggcggcgcaccctgcgccc

SEQ ID NO: 5178 - DNA, 1767 bp, Homo sapiens
  source 1..1767: mol_type = genomic DNA
atgaacaaccgaaaggaagatatggaaatcacgtcccactaccggcacctgctgcgggagctcaacgagcagaggcagcacggcgtcctgtgcgacgtctgcgtggtcgtggagggcaaggtcttcaaggcgcacaagaacgtcctgctgggcagcagccgctacttcaagacgctctactgccaggtgcagaagacgtcggagcaggccacggtcacgcacctggacatcgtcacggcccagggcttcaaggccatcatcgacttcatgtactcagcgcacctggcgctcaccagcaggaacgtcatcgaggtgatgtcagccgccagcttcctgcagatgacggacatcgtgcaagcctgccacgacttcatcaaggcggcgctggacatcagcatcaagtcggacgcctcagatgagcttgcggagttcgagatcggcgcctcgtccagcagcagcacggaagctctcatctcggccgtgatggctgggaggagcatctccccgtggctggcacggcgaacgagtcctgccaattcttccggagactcggccatcgccagctgtcacgacggagggagcagctacgggaaagaggatcaggagcccaaggccgatggccctgatgatgtttcttcacagcctctatggcctggagacgtgggctacgggcctctgcgcatcaaggaagagcaggtttcaccgtctcagtacggagggagcgagctgccttctgccaaggacggtgcagtacagaactctttctcagagcagagtgctggtgatgcctggcagcccacgggccgaaggaagaatcggaaaaacaaagagaccgtccggcacatcacacagcaggtggaagatgacagccgggccagctccccggtgccgtccttcctgccgacgtcggggtggccgttcagcagccgagactcaaatgcggacctgtccgtcaccgaagccagcagctccgacagccgaggagagagggccgagctctatgcacaggtggaggagggtctcctgggaggagaagccagctatctgggccctcccctcaccccagagaaggacgacgccctgcatcaggccaccgcggtggccaacctgcgcgcggcgctcatgagtaagaacagcctgctgtcgctgaaggccgacgtgctgggggatgacggctccctgctgttcgagtacctgcccagaggggcccactcgctgtccctgaatgagttcacggtgatcaggaagaagttcaagtgtccgtactgcagcttctcggccatgcaccagtgcatcctcaagcgacacatgcgctcgcacacgggagagcggccctacccctgcgagatctgcgggaagaagttcacgcggcgcgagcacatgaagcgccacacgctggtccacagcaaggacaagaagtatgtgtgcaaggtgtgcagccgcgtcttcatgtccgccgccagcgtgggcatcaggcatggctccaggcgccacggtgtgtgcaccgactgtgctggccgcggcatggccgggcccctggaccatggcggcggaggcggcgagggctctccagaggcgctgttcccaggcgacgggccctatctggaggaccctgaggacccacgaggggaggcggaggagctgggcgaggacgacgagggcctggcccctgaggatgcgctgttggcggacgacaaggatgaggaagactcgccgcggccgcgcagccccccaggaggccctgacaaggacttcgcctggctctcc

SEQ ID NO: 5179 - DNA, 2241 bp, Homo sapiens
  source 1..2241: mol_type = genomic DNA
atgggccgcctgaacgagcagcgcctcttccagcctgacctctgcgacgtggacttggtgctggtgccccagcgcagcgtctttccggcacacaagggtgtgctagccgcctacagccagttcttccactcactcttcacccagaacaagcagctgcagcgtgtggagctgtccctggaggcactggcacctggtggcctgcagcagatcctcaacttcatctatacgtccaagctgctggtcaacgcggccaacgtccacgaggtgctcagcgccgcctcattgctgcagatggctgacatcgctgcgtcctgccaagagctgctggacgcccgctctctaggcccaccaggtccgggcactgtggccctggcccagccggctgccagctgcactccagctgcgccgccctactactgtgacatcaagcaggaggccgacaccccaggcctgcccaagatctatgcccgcgagggccctgacccttactcggtgcgtgttgaggacggggcagggactgctggtggcacagtgcctgccaccattgggccagcccagcccttctttaaggaggagaaggagggtggtgtcgaggaggccggtgggcccccagccagcttgtgcaagctggagggtggagaagagttggaggaagagcttgggggttctggcacctacagccgcagggagcaatcccagatcatcgtggaggtgaacctcaacaaccagacactgcacgtgtccacggggccagaggggaagccaggtgccgggccaagcccagccaccgtggttctgggccgggaggacgggctgcagagacactcggacgaggaggaggaggacgacgaggaggaggaggaggaagaagaggaagaggaaggtggtggcagtggacgggaggaggaggaggaggaagagggtggcagtcagggagaagaggaagaagaggaggaggacgggcacagtgagcaggaagaggaagaggaggaggaagaggaggaagggcctagtgagcaggatcaagagagctctgaggaggaggagggggaggagggggaggctgggggcaagcaggggccacggggaagccgaagcagccgggcagacccccctccccacagtcacatggccacacggtcccgggagaacgcccggcgccggggtacccctgaacctgaagaagctgggcggcggggtgggaagaggccaaagccaccccctggagtggcctctgcatcggcccgagggccgccagccactgatgggctgggggccaaggtgaagctggaggagaagcagcaccatccatgccagaagtgcccacgagttttcaacaaccgctggtacctggagaaacacatgaatgtgacccacagccgcatgcagatctgcgaccagtgcggcaagcgcttcctgctggagagcgagctgctgctgcacaggcagacagactgcgagcgcaacatccagtgtgtgacatgtggcaaagctttcaagaagctttggtccctccatgagcataacaagattgtgcacggctacgcagagaagaagttctcatgcgagatctgtgagaagaagttctacaccatggcccacgtgcgtaagcacatggttgcccacaccaaggacatgcccttcacctgcgagacctgcggaaagtccttcaagcgcagcatgtccctcaaggtgcactcactgcagcactcaggggagaagccgttcagatgtgagaactgcaatgagcgcttccagtacaagtaccagctgcggtcacacatgagcatccacattggccacaagcagttcatgtgccaatggtgcggcaaggacttcaacatgaagcagtacttcgatgagcacatgaagacccacacaggagagaagccgtacatctgcgagatctgtggcaagagcttcaccagccggcccaacatgaagcggcaccggcgcacgcacacgggcgagaagccgtacccgtgcgacgtgtgtggccagcgcttccgcttctccaacatgctcaaggcccacaaggagaagtgcttccgcgtcagccacaccctggccggcgacggcgtccccgctgccccaggcctgcccccaacccagccccaggcgcacgcactgcccctgctcccggggctgccccagaccctgccgcccccgccccacctgccgcccccgcctccgctcttccccaccactgccagccccggcgggaggatgaacgccaacaac

SEQ ID NO: 5180 - DNA, 2295 bp, Homo sapiens
  source 1..2295: mol_type = genomic DNA
atggaccctgttgctacccacagctgccatctgctccagcaactgcatgagcagcgaatccaaggcctgctttgtgactgtatgttggtggtaaaaggagtctgctttaaagcgcataagaatgtcctggcagcattcagccagtattttaggagcctctttcagaattcttcaagccagaagaatgatgtttttcacttggatgttaaaaatgtcagtggcatagggcagatcctggacttcatgtacacttctcatctagatcttaaccaggacaatatacaagtaatgctggacacagcacagtgtttgcaagttcaaaatgttctgagtctgtgtcacacatttttaaaatcagccactgtagtacagccacctggcatgccttgtaatagtacattgtctctacaaagcaccctgaccccagatgccacttgtgttatcagtgaaaactacccccctcatttactgcaggaatgttcagcagatgcacagcagaacaaaacgttggatgaatcgcatccgcatgcttcaccatcagttaatcgtcatcactccgcaggtgaaatctcaaaacaagctcctgatacttcagatggcagctgcacagaactgcctttcaaacagccaaattactattacaaactcagaaacttttacagtaagcagtaccataaacacgcagctggtcccagtcaggagagagttgttgagcagccttttgctttcagcacctctacagaccttaccacggtagagagccagccttgtgccgtcagtcattctgaatgcatcctggagtctcccgagcacttaccttccaacttcctggcccagcctgtgaatgactctgccccacaccctgagtcagacgccacatgccaacaacctgtcaagcagatgaggctcaaaaaggccattcatctgaagaagctcaatttcctgaagtcacagaaatacgcagagcaagtatctgaacccaagtcagatgatggtttgacaaagaggttggaatctgctagtaaaaataccctagagaaagctagcagccaaagtgctgaagaaaaagaaagtgaagaagtcgtcagttgtgagaattttaattgcattagtgagacggagaggcctgaagacccggctgccctggaagaccagtcccagacacttcagtcccagagacaatacgcgtgtgaattatgcgggaaaccttttaaacacccaagcaacttggagcttcacaaacggtctcatacaggtgagaaaccttttgaatgtaacatttgtgggaaacatttctctcaggcaggtaacttgcagactcacttacgacggcattctggtgaaaaaccatacatctgcgagatctgtggaaagaggtttgcagcctctggcgacgtccagcgtcacattattattcactcaggagaaaaaccacacttgtgtgacatctgtggtcgagggtttagtaacttcagtaatttgaaggagcacaaaaagacacacacggctgataaagtcttcacctgtgatgagtgtggaaagtcttttaatatgcaaaggaagttagtaaagcacagaattcggcacacgggggagcggccttacagctgctctgcctgcgggaaatgttttgggggatcaggtgacctccgcaggcatgtccgcactcacactggggagaagccgtacacatgtgagatctgtaacaagtgctttacccgctctgcggtgctccggcggcacaagaagatgcactgcaaagctggtgacgagagcccagatgtgctggaggagctcagccaagccatcgagacctccgacctcgagaaatctcagagctcagactctttctcccaagacacgtctgtgacgctgatgccagtgtcggttaaactccctgtccacccagtggaaaattctgtggcagaatttgatagccactctggcggctcctattgtaagttacggtccatgatccaacctcatggagttagtgaccaggagaagctgagtttggatcctggtaaacttgccaagccccagatgcagcagacacagcctcaggcctatgcttactcggatgtggacaccccagccggtggcgaaccactgcaggccgatggcatggccatgatccgttcctctctggctgctttggacaaccacggcggtgaccccctgggcagtcgagcatcttccaccacttataggaactcagagggtcagtttttctccagcatgactctctgggggctagcgatgaagacgctgcagaatgaaaacgagttagaccag

SEQ ID NO: 5181 - DNA, 1359 bp, Homo sapiens
  source 1..1359: mol_type = genomic DNA
atggaccctgttgctacccacagctgccatctgctccagcaactgcatgagcagcgaatccaaggcctgctttgtgactgtatgttggtggtaaaaggagtctgctttaaagcgcataagaatgtcctggcagcattcagccagtattttaggagcctctttcagaattcttcaagccagaagaatgatgtttttcacttggatgttaaaaatgtcagtggcatagggcagatcctggacttcatgtacacttctcatctagatcttaaccaggacaatatacaagtaatgctggacacagcacagtgtttgcaagttcaaaatgttctgagtctgtgtcacacatttttaaaatcagccactgtagtacagccacctggcatgccttgtaatagtacattgtctctacaaagcaccctgaccccagatgccacttgtgttatcagtgaaaactacccccctcatttactgcaggaatgttcagcagatgcacagcagaacaaaacgttggatgaatcgcatccgcatgcttcaccatcagttaatcgtcatcactccgcaggtgaaatctcaaaacaagctcctgatacttcagatggcagctgcacagaactgcctttcaaacagccaaattactattacaaactcagaaacttttacagtaagcagtaccataaacacgcagctggtcccagtcaggagagagttgttgagcagccttttgctttcagcacctctacagaccttaccacggtagagagccagccttgtgccgtcagtcattctgaatgcatcctggagtctcccgagcacttaccttccaacttcctggcccagcctgtgaatgactctgccccacaccctgagtcagacgccacatgccaacaacctgtcaagcagatgaggctcaaaaaggccattcatctgaagaagctcaatttcctgaagtcacagaaatacgcagagcaagtatctgaacccaagtcagatgatggtttgacaaagaggttggaatctgctagtaaaaataccctagagaaagctagcagccaaagtgctgaagaaaaagaaagtgaagaagtcgtcagttgtgagaattttaattgcattagtgagacggagaggcctgaagacccggctgccctggaagaccagtcccagacacttcagtcccagagacaatacgcgtgtgaattatgcgggaaaccttttaaacacccaagcaacttggagcttcacaaacggtctcatacaggtttgcagcctctggcgacgtccagcgtcacattattattcactcaggagaaaaaccacacttgtgtgacatctgtggtcgagggtttagtaacttcagtaatt

SEQ ID NO: 5182 - DNA, 1566 bp, Homo sapiens
  source 1..1566: mol_type = genomic DNA
atggagacagatttggctgaaatgcctgagaaaggagttctgtcttcccaggattctccccatttccaagagaagagcacagaagagggagaagtggctgctctgcgcctcacggccagatcccaggcggcggcggcggcggcggcgcccgggagccggagccttcgcggcgtccacgtccctcccccgctgcaccccgccccggcgcgagaggagatcaaatccacttgctccttgaaggcatgcttttcactttcattaactcttacctattacagaactgcctttttgttgagcacagaaaacgaaggaaatttgcatttccaatgtccttcagacgtggagactagaccacagagcaaggattcaacttcagtgcaagatttttccaaagcagaatcatgcaaagttgcaataatagacagactgacacggaatagtgtctatgactctaacttggaagcagcccttgaatgtgaaaattggttagagaagcagcaaggaaatcaggagagacatttgagagaaatgttcactcacatgaattcactctctgaggaaacagaccatgagcatgatgtatactggaaaagcttcaatcagaaatctgtccttatcactgaagacagagttcccaaaggatcttatgccttccatacacttgaaaaaagcttgaaacaaaaatcaaacttaatgaaaaagcagagaacttataaagagaaaaaacctcataaatgtaatgattgtggtgaactcttcacctgccattcagtgcatattcaacaccagagagtccatactggagagaaaccctatacctgcaatgaatgtgggaaatcttttagccacagagctaatttaactaaacaccagagaactcatactagaattctctttgaatgccgtgaatgtaagaaaaccttcacagaaagctcatcccttgcaacacatcagagaattcacgttggagagagaccttatgaatgcaatgaatgtgggaaaggttttaatcgaagtacacatcttgtgcagcatcagttgattcatactggagtgaggccttatgaatgtaatgaatgtgataaagcttttattcattcatcagcactcattaaacatcaaagaactcatactggagagaaaccttataaatgtcaagaatgtgggaaagcctttagccattgctcatccctaactaagcatcagagagttcatactggagaaaagccatatgaatgcagtgaatgtggaaaaacttttagtcagagcacacatcttgttcaacatcagagaattcacactggagagaaaccctatgagtgtagtgaatgtgggaaaaccttcagccagagctccaattttgctaaacatcaaagaattcatattggaaagaaaccgtacaaatgtagtgagtgtggaaaagccttcattcattcatcagctcttattcaacatcagagaactcataccggagagaaaccctttagatgtaatgagtgtgggaaaagctttaagtgcagttcatctctcatcagacatcaaagagttcacactgaagagcaaccc

SEQ ID NO: 5183 - DNA, 2454 bp, Homo sapiens
  source 1..2454: mol_type = genomic DNA
atggcccttactcaggtacggttgacatttagggatgtggccatagaattctctcaggaggagtggaaatgcctggaccctgctcagaggatcttatacagggacgtgatgttggagaactactggaaccttgtttctctgggactgtgtcattttgatatgaatattatctccatgttggaggaagggaaagagccctggactgtgaagagctgtgtgaaaatagcaagaaaaccaagaacgccggaatgtgtcaaaggcgtggtcacagatatccctcctaaatgtacaatcaaggatttgctaccaaaagagaagagcagtacagaagcagtattccacacagtggtgttggaaagacacgaaagccctgacattgaagacttttccttcaaggaaccccagaaaaatgtgcatgattttgagtgtcaatggagagatgacacaggaaattacaagggagtgcttatggcccagaaagaaggtaaaagagatcaacgcgacagaagagacatagaaaacaagcttatgaacaatcagcttggagtaagctttcattctcatctgcctgaactgcagctatttcaaggtgaggggaaaatgtatgaatgtaatcaagttgagaagtctaccaacaatggttcctcagtgtcaccacttcaacaaattccttctagtgtccaaacccacaggtctaaaaaatatcatgaacttaaccatttttcattactcacacaaagacgaaaagcaaacagttgtggaaaaccttataaatgtaatgaatgtggcaaggcgttcactcagaattcgaaccttacaagtcataggagaattcatagtggagagaagccttacaaatgcagtgagtgcggcaaaacctttactgttcgttcaaatctaactattcatcaggtcatccatactggagaaaaaccttacaaatgtcatgagtgtggcaaggtcttcaggcacaattcataccttgcaactcatcggcgaattcatactggagagaaaccttacaagtgtaatgagtgtggaaaagcctttagaggacattcaaacctaactacccatcagttaattcatactggagaaaaaccgttcaaatgtaatgaatgtggcaagctcttcactcaaaattcacaccttataagtcattggagaattcacactggagagaaaccttacaagtgcaatgagtgcggcaaagcctttagtgttcgttcaagcctagcaatccatcagacaatccacactggagaaaaaccttacaaatgtaatgaatgtggcaaagtctttaggtacaattcatacctcggaaggcatcggagagttcatactggtgagaaaccttacaagtgtaatgaatgtggcaaagccttcagtatgcattcaaacctagctacccatcaggtcatccatactggaacaaaacctttcaaatgcaatgaatgcagcaaggttttcactcaaaattcacaacttgcaaatcatcgaagaattcatactggagagaaaccttacaagtgtaatgagtgtgggaaagccttcagtgttcgttcaagtctgactacccatcaggcaatccattctggagagaaaccttacaaatgtattgaatgtggcaagagcttcactcaaaaatcacaccttagaagtcatcggggaattcattctggagagaaaccttacaagtgtaatgaatgtggtaaagtcttcgctcaaacatcacaacttgcaaggcattggagagttcatactggagaaaaaccttacaagtgtaatgactgtggcagagcctttagtgatcgttcaagcctaacttttcatcaggcaatacatactggagagaaaccttacaaatgtcatgaatgcggcaaggtttttaggcacaattcataccttgcaactcatcggcgaattcatactggagagaaaccttacaagtgtaatgagtgtgggaaagcctttagtatgcattcaaacctaactacccataaggtcatccatactggagagaagccttacaaatgtaatcaatgtggcaaggtcttcactcagaactcacaccttgcaaatcatcaaaggactcacaccggagagaaaccttaccgatgcaatgagtgtgggaaagccttcagtgttcgttcaagcctaaccacccatcaggcaatccatactgggaaaaaaccttacaaatgtaatgaatgtggcaaggtctttactcaaaatgctcacctggcaaatcaccgaagaattcatactggggagaaaccttacaggtgtacagagtgtgggaaagcctttagggtaagatcaagtctaactacccatatggcaatccacactggagaaaagcgttacaaatgtaatgagtgtggcaaggtcttcaggcagagttcaaatcttgcaagtcatcacagaatgcataccggagagaaaccttacaaa

SEQ ID NO: 5184 - DNA, 441 bp, Homo sapiens
  source 1..441: mol_type = genomic DNA
atggcccttactcaggtacggttgacatttagggatgtggccatagaattctctcaggaggagtggaaatgcctggaccctgctcagaggatcttatacagggacgtgatgttggagaactactggaaccttgtttctctgggactgtgtcattttgatatgaatattatctccatgttggaggaagggaaagagccctggactgtgaagagctgtgtgaaaatagcaagaaaaccaagaacgccggaatgtgtcaaaggcgtggtcacagacctgctcaggagatggaaacattggctgctgctccttggcatctgctgccccaaacctcatggaagagtctccagccgtctccgcctgtcgaggtccctcggccatttcttccattctgcttttgccactttcatgggggtgtgtgataagcgagtgggttctatcttc

SEQ ID NO: 5185 - DNA, 2346 bp, Homo sapiens
  source 1..2346: mol_type = genomic DNA
atgttggagaactactggaaccttgtttctctgggactgtgtcattttgatatgaatattatctccatgttggaggaagggaaagagccctggactgtgaagagctgtgtgaaaatagcaagaaaaccaagaacgccggaatgtgtcaaaggcgtggtcacagatatccctcctaaatgtacaatcaaggatttgctaccaaaagagaagagcagtacagaagcagtattccacacagtggtgttggaaagacacgaaagccctgacattgaagacttttccttcaaggaaccccagaaaaatgtgcatgattttgagtgtcaatggagagatgacacaggaaattacaagggagtgcttatggcccagaaagaaggtaaaagagatcaacgcgacagaagagacatagaaaacaagcttatgaacaatcagcttggagtaagctttcattctcatctgcctgaactgcagctatttcaaggtgaggggaaaatgtatgaatgtaatcaagttgagaagtctaccaacaatggttcctcagtgtcaccacttcaacaaattccttctagtgtccaaacccacaggtctaaaaaatatcatgaacttaaccatttttcattactcacacaaagacgaaaagcaaacagttgtggaaaaccttataaatgtaatgaatgtggcaaggcgttcactcagaattcgaaccttacaagtcataggagaattcatagtggagagaagccttacaaatgcagtgagtgcggcaaaacctttactgttcgttcaaatctaactattcatcaggtcatccatactggagaaaaaccttacaaatgtcatgagtgtggcaaggtcttcaggcacaattcataccttgcaactcatcggcgaattcatactggagagaaaccttacaagtgtaatgagtgtggaaaagcctttagaggacattcaaacctaactacccatcagttaattcatactggagaaaaaccgttcaaatgtaatgaatgtggcaagctcttcactcaaaattcacaccttataagtcattggagaattcacactggagagaaaccttacaagtgcaatgagtgcggcaaagcctttagtgttcgttcaagcctagcaatccatcagacaatccacactggagaaaaaccttacaaatgtaatgaatgtggcaaagtctttaggtacaattcatacctcggaaggcatcggagagttcatactggtgagaaaccttacaagtgtaatgaatgtggcaaagccttcagtatgcattcaaacctagctacccatcaggtcatccatactggaacaaaacctttcaaatgcaatgaatgcagcaaggttttcactcaaaattcacaacttgcaaatcatcgaagaattcatactggagagaaaccttacaagtgtaatgagtgtgggaaagccttcagtgttcgttcaagtctgactacccatcaggcaatccattctggagagaaaccttacaaatgtattgaatgtggcaagagcttcactcaaaaatcacaccttagaagtcatcggggaattcattctggagagaaaccttacaagtgtaatgaatgtggtaaagtcttcgctcaaacatcacaacttgcaaggcattggagagttcatactggagaaaaaccttacaagtgtaatgactgtggcagagcctttagtgatcgttcaagcctaacttttcatcaggcaatacatactggagagaaaccttacaaatgtcatgaatgcggcaaggtttttaggcacaattcataccttgcaactcatcggcgaattcatactggagagaaaccttacaagtgtaatgagtgtgggaaagcctttagtatgcattcaaacctaactacccataaggtcatccatactggagagaagccttacaaatgtaatcaatgtggcaaggtcttcactcagaactcacaccttgcaaatcatcaaaggactcacaccggagagaaaccttaccgatgcaatgagtgtgggaaagccttcagtgttcgttcaagcctaaccacccatcaggcaatccatactgggaaaaaaccttacaaatgtaatgaatgtggcaaggtctttactcaaaatgctcacctggcaaatcaccgaagaattcatactggggagaaaccttacaggtgtacagagtgtgggaaagcctttagggtaagatcaagtctaactacccatatggcaatccacactggagaaaagcgttacaaatgtaatgagtgtggcaaggtcttcaggcagagttcaaatcttgcaagtcatcacagaatgcataccggagagaaaccttacaaa

SEQ ID NO: 5186 - DNA, 1914 bp, Homo sapiens
  source 1..1914: mol_type = genomic DNA
atgtttggttccagcagatacttgggttcctctgaacagcccagagctaattcactgggtcccagtgacaggaccttggttttgtgctccctagtggaaggggaagataaggtcaacccctccgaaccacatggactgagaatggaggagaaatggttgctcaaaggaaaactgaggaatcagaggaaccaaaacaagctcctgtccccaaacaagaagcagaggaaaaaccacactagcaagctgcaagagttggcactgctgctgcccatagccctgaagacggggaccaagaagctcacaaagaaggagattctggtgcatgtcctgcagtacattcagtacctccagagaaacatcgatgccgccaaggccttgttcaaatgccacatcaccactggggaaggtggacttgcggggctgggtcagaaaccagcctggggcccagccaggcggaggagacactctaccccctccagctccccaagctctcagaagtcctgtctccagggggcgtgccagaagcctcggaagaagaagctgacccaggcatcagaaagccagactcggaccccgaagcctcgccgctctctggccctgaacaagcctgagaagctggtggccccatccccagaccagaaaggaagtggcacaggggggaccactacccctccaaggtgccctgactcctgcggtcacccgaggcctgcatcatcctcacctccaggtgacagaaaaggaggacagtcccagctgacgctgttggatctggccgaggacaccatccactgtgacatctcaagctgctggtgccagggcagtgtccaggatgacgcacctttccctgcgctcctggctcaggaagatgtggcgaggatccattttctcaacaagacccagccccatcccaggcagaagctggtgttctatgattccagcgaggatgtggacaaagggtccctagacgctgacccttggctccctgcctggaccccagagaacagcccccaagggagcccactgttcctggggcctccccagattgatgtctggagtggaacaggccacccaagtgagatcctcgggctcagccctagccttttcagctccccagggaaactgctgccagacgagatcttggaggatgacatggagtacctgacccaagcggctttctttgaagaagtgtgcttagatctggagtcttcaccttcagcctacacgcaggaggctccacaggaaaaggacacagcctccaaggcccccaaagaccctcctgagtcccacagcctgcaccggtcctcagtctcgctggaccactgctacctctcgctgagcgggaacagcaaggcgccatccagctccagctccagctccagctccagctccagctcggaggacagcgactcggagcccctgtggaagcagcgagaggatatgcaggccaaccctgtgggcacgccgggctccagcgaagaggacgaagacaccacatggacccccacccggctggcctcacccctgctggcagctgagaaaaaggccacgaagggccaagtagccagggcccctgtgaagcccaaggagaagaagaaaggcccctgcccaccccagatgaagaagaagtgtgtcaacggcttcatcatgttctgcaggatgaaccggaagcagtacatccgatcctgccctggaaccgcttccacagctgccaccaaggagctggcccagctgtggcgggtgatgacccagcaggagcggaggccatactgcaccaaggctcgcaggttcagccgccagcacaaccgcatcgtgaagcaggacggctccagcagcgaggctgaggactgggagacgccaaagcccttctaccagctgctggccgagaaggccttgccgctgcccccgcacctccag

SEQ ID NO: 5187 - DNA, 3249 bp, Homo sapiens
  source 1..3249: mol_type = genomic DNA
atgtcggacagcgaggacagcaacttttccgaggaggaggacagcgagcgcagcagtgacggcgaggaggccgaggtagacgaagagcggcggagtgcagcgggcagtgagaaagaagaagagcctgaggacgaagaggaggaggaagaggaggaggaatacgatgaggaagaggaggaagaagatgatgaccgaccccccaagaaaccccgccatggaggcttcattctggacgaggctgatgttgacgatgagtatgaggacgaggaccagtgggaggatggagcagaggacattctagagaaagcctccaatatcgataatgttgtcctggatgaagatcgttctggggctcgccgcctgcaaaacctctggagggaccagcgagaagaagaactgggcgagtattacatgaagaaatacgccaagtcatctgtgggagagacggtgtatggaggatctgatgagctctcagacgacatcacccagcagcagctgctcccaggagtcaaggatcccaatctgtggactgtcaaatgtaagattggggaggaacgggccacggccatttccttgatgcgcaagttcattgcctaccagttcacagacacgcccctgcagatcaagtcagtagtggcaccagagcatgtgaagggctacatctacgtggaggcctacaagcagacccacgtgaagcaggccattgagggggtgggcaacctgcggcttggctactggaaccagcagatggtgcccatcaaggagatgacagacgtgctcaaagtggtgaaggaggtggccaacctgaaaccaaagtcctgggtccgcctcaagcggggcatctacaaggatgacattgctcaggtggactacgtggagcccagccagaacaccatctccctgaagatgatcccacgcatcgactacgatcgcatcaaggcccgcatgagcttgaaagactggtttgccaaaaggaagaagtttaagcggcctccacagaggctgtttgatgctgagaagatcaggtccctggggggtgatgttgcctctgatggtgacttcctcatctttgaggggaaccgttacagccggaagggctttctgttcaagagcttcgccatgtctgctgtgatcacggagggtgtgaagccaacactctctgagctggaaaagtttgaggaccagccagagggcattgacctggaggtggtgactgagagcacagggaaggagcgggagcacaacttccaacctggggacaacgtggaggtctgtgagggtgagctcatcaacctgcagggcaagatcctcagcgtggatggcaacaagatcaccatcatgcccaagcatgaggacctcaaggacatgttggagttcccagcccaggaacttagaaaatacttcaagatgggggaccacgtgaaggtgattgctggccgattcgagggcgacacaggcctcattgtgcgggtggaggagaatttcgttatcctgttctctgacctcaccatgcatgagctgaaggtgctcccccgggacctgcagctctgctcagagacagcatcaggtgtggatgttgggggccagcatgaatggggcgagctggtgcagctggatccccagactgtgggtgtcatcgtgcgactagaacgggagaccttccaggtgctgaacatgtacgggaaggtggtgactgtcagacatcaggctgtgacccggaagaaggacaaccgctttgctgtggccttggactcagagcagaacaacatccatgtgaaagacatcgttaaggtcattgatggcccccactcaggccgagaaggggagattcgccatctcttccgaagcttcgccttcctacattgcaagaaactggtggagaacgggggcatgtttgtctgcaagacccgccacctggtgctggctgggggctcaaagccccgtgatgtgaccaacttcaccgtgggtggctttgcgcctatgagtccccggatcagcagccccatgcaccccagtgctggaggtcagcgtggcggctttggtagcccaggtggcggcagtggtggcatgagcaggggccggggccggagggacaacgaactcatcggccagaccgtgcgcatctcccaggggccctacaaaggctacatcggtgtggtgaaagatgccacagagtccacggcccgtgtggagctgcactccacctgccagaccatctctgtggaccgtcagcggctcaccacggtgggctcacggcgcccgggcggcatgacctcgacctatgggaggacgcccatgtatggctcccagacgcccatgtatggctctggctcccgaacacccatgtacggctcacagacacccctccaggatggtagccgcaccccacactacggctcacagacgcccctgcatgatggcagccgcactcctgcccagagtggggcctgggaccccaacaaccccaacacgccgtcacgggctgaggaagaatatgagtatgctttcgatgatgagcccaccccgtccccgcaggcctatgggggaacccccaatccccaaacacctggctacccagacccctcgtccccacaggtcaacccacaatacaacccgcagacgccagggacgccggccatgtacaacacagaccagttctctccctatgctgccccctccccacaaggttcctaccagcccagccccagcccccagagctaccaccaggtggcgccaagcccagcaggctaccagaatacccactccccagccagctaccaccctacaccgtcgcccatggcctatcaggctagccccagcccgagccccgttggctacagtcctatgacacctggagctccctcccctggtggctacaacccacacacgccaggctcaggcatcgagcagaactccagcgactgggtaaccactgacattcaggtgaaggtgcgggacacctacctggatacacaggtggtgggacagacaggtgtcatccgcagtgtcacggggggcatgtgctctgtgtacctgaaggacagtgagaaggttgtcagcatttccagtgagcacctggagcctatcacccccaccaagaacaacaaggtgaaagtgatcctgggcgaggatcgggaagccacgggcgtcctactgagcattgatggtgaggatggcattgtccgtatggaccttgatgagcagctcaagatcctcaacctccgcttcctggggaagctcctggaagcc

SEQ ID NO: 5188 - DNA, 786 bp, Homo sapiens
  source 1..786: mol_type = genomic DNA
atgcctctgcacgtgaagtggccgttccccgcggtgccgccgctcacctggaccctggccagcagcgtcgtcatgggcttggtgggcacctacagctgcttctggaccaagtacatgaaccacctgaccgtgcacaacagggaggtgctgtacgagctcatcgagaagcgaggcccggccacgcccctcatcaccgtgtccaatcaccagtcctgcatggacgaccctcatctctgggggatcctgaaactccgccacatctggaacctgaagttgatgcgttggacccctgcagctgcagacatctgcttcaccaaggagctacactcccacttcttcagcttgggcaagtgtgtgcctgtgtgccgaggagatggcgtctaccagaaggggatggacttcattttggagaagctcaaccatggggactgggtgcatatcttcccagaagggaaagtgaacatgagttccgaattcctgcgtttcaagtggggaatcgggcgcctgattgctgagtgtcatctcaaccccatcatcctgcccctgtggcatgtcggaatgaatgacgtccttcctaacagtccgccctacttcccccgctttggacagaaaatcactgtgctgatcgggaagcccttcagtgccctgcctgtactcgagcggctccgggcggagaacaagtcggctgtggagatgcggaaagccctgacggacttcattcaagaggaattccagcatctgaagactcaggcagagcagctccacaaccacctccagcctgggaga

SEQ ID NO: 5189 - DNA, 744 bp, Homo sapiens
  source 1..744: mol_type = genomic DNA
atgcctctgcacgtgaagtggccgttccccgcggtgccgccgctcacctggaccctggccagcagcgtcgtcatgggcttggtgggcacctacagctgcttctggaccaagtacatgaaccacctgaccgtgcacaacagggaggtgctgtacgagctcatcgagaagcgaggcccggccacgcccctcatcaccgtgtccaatcaccagtcctgcatggacgaccctcatctctgggggatcctgaaactccgccacatctggaacctgaagttgatgcgttggacccctgcagctgcagacatctgcttcaccaaggagctacactcccacttcttcagcttgggcaagtgtgtgcctgtgtgccgaggagatggcgtctaccagaaggggatggacttcattttggagaagctcaaccatggggactgggtgcatatcttcccagaaggaatcgggcgcctgattgctgagtgtcatctcaaccccatcatcctgcccctgtggcatgtcggaatgaatgacgtccttcctaacagtccgccctacttcccccgctttggacagaaaatcactgtgctgatcgggaagcccttcagtgccctgcctgtactcgagcggctccgggcggagaacaagtcggctgtggagatgcggaaagccctgacggacttcattcaagaggaattccagcatctgaagactcaggcagagcagctccacaaccacctccagcctgggaga

SEQ ID NO: 5190 - DNA, 834 bp, Homo sapiens
  source 1..834: mol_type = genomic DNA
atgcctctgcacgtgaagtggccgttccccgcggtgccgccgctcacctggaccctggccagcagcgtcgtcatgggcttggtgggcacctacagctgcttctggaccaagtacatgaaccacctgaccgtgcacaacagggaggtgctgtacgagctcatcgagaagcgaggcccggccacgcccctcatcaccgtgtccaatcaccagtcctgcatggacgaccctcatctctgggggatcctgaaactccgccacatctggaacctgaagttgatgcgttggacccctgcagctgcagacatctgcttcaccaaggagctacactcccacttcttcagcttgggcaagtgtgtgcctgtgtgccgaggagcagaatttttccaagcagagaatgaggggaaaggtgttctagacacaggcaggcacatgccaggtgctggaaaaagaagagagaaaggagatggcgtctaccagaaggggatggacttcattttggagaagctcaaccatggggactgggtgcatatcttcccagaaggaatcgggcgcctgattgctgagtgtcatctcaaccccatcatcctgcccctgtggcatgtcggaatgaatgacgtccttcctaacagtccgccctacttcccccgctttggacagaaaatcactgtgctgatcgggaagcccttcagtgccctgcctgtactcgagcggctccgggcggagaacaagtcggctgtggagatgcggaaagccctgacggacttcattcaagaggaattccagcatctgaagactcaggcagagcagctccacaaccacctccagcctgggaga

SEQ ID NO: 5191 - DNA, 876 bp, Homo sapiens
  source 1..876: mol_type = genomic DNA
atgcctctgcacgtgaagtggccgttccccgcggtgccgccgctcacctggaccctggccagcagcgtcgtcatgggcttggtgggcacctacagctgcttctggaccaagtacatgaaccacctgaccgtgcacaacagggaggtgctgtacgagctcatcgagaagcgaggcccggccacgcccctcatcaccgtgtccaatcaccagtcctgcatggacgaccctcatctctgggggatcctgaaactccgccacatctggaacctgaagttgatgcgttggacccctgcagctgcagacatctgcttcaccaaggagctacactcccacttcttcagcttgggcaagtgtgtgcctgtgtgccgaggagcagaatttttccaagcagagaatgaggggaaaggtgttctagacacaggcaggcacatgccaggtgctggaaaaagaagagagaaaggagatggcgtctaccagaaggggatggacttcattttggagaagctcaaccatggggactgggtgcatatcttcccagaagggaaagtgaacatgagttccgaattcctgcgtttcaagtggggaatcgggcgcctgattgctgagtgtcatctcaaccccatcatcctgcccctgtggcatgtcggaatgaatgacgtccttcctaacagtccgccctacttcccccgctttggacagaaaatcactgtgctgatcgggaagcccttcagtgccctgcctgtactcgagcggctccgggcggagaacaagtcggctgtggagatgcggaaagccctgacggacttcattcaagaggaattccagcatctgaagactcaggcagagcagctccacaaccacctccagcctgggaga

SEQ ID NO: 5192 - DNA, 1665 bp, Homo sapiens
  source 1..1665: mol_type = genomic DNA
atggggaggggcttcaggatgttcaccatgacaagagccatggaagaggctctttttcagcacttcatgcaccagaagctggggatcgcctatgccatacacaagccatttcccttctttgaaggcctcctagacaactccatcatcactaagagaatgtacatggaatctctggaagcctgtagaaatttgatccctgtatccagagtggtgcacaacattctcacccaactggagaggacttttaacctgtctcttctggtgacattgttcagtcaaattaacctgcgtgaatatcccaatctggtgacgatttacagaagcttcaaacgtgttggtgcttcctatgaatggcagagcagagacacaccaatcctacttgaagccccaactggcctagcagaaggaagctccctccataccccactggcgctgcccccaccacaaccccctcaaccaagctgttcaccctgtgcgccaagagtcagtgagcctggaacatcctcccagcaaagcgatgagatcctgagtgagtcgcccagcccatctgaccctgtcctgcctctccctgcactcatccaggaaggaagaagcacttcagtgaccaatgacaagttaacatccaaaatgaatgcggaagaagactcagaagagatgcccagcctcctcactagcactgtgcaagtggccagtgacaacctgatcccccaaataagagataaagaagaccctcaagagatgccccactctcccttgggctctatgccagagataagagataattctccagaaccaaatgacccagaagagccccaggaggtgtccagcacaccttcagacaagaaaggaaagaaaagaaaaagatgtatctggtcaactccaaaaaggagacataagaaaaaaagcctcccaggagggacagcctcatctagacacggaatccaaaagaagctcaaaagggtggatcaggttcctcaaaagaaagatgactcaacttgtaactccacggtagagacaagggcccaaaaggcgagaactgaatgtgcccgaaagtcgagatcagaggagatcattgatggcacttcagaaatgaatgaaggaaagaggtcccagaagacgcctagtacaccacgaagggtcacacaaggggcagcctcacctgggcatggcatccaagagaagctccaagtggtggataaggtgactcaaaggaaagacgactcaacctggaactcagaggtcatgatgagggtccaaaaggcaagaactaaatgtgcccgaaagtccagattgaaagaaaagaaaaaggagaaagatatctgttcaagctcaaaaaggagatttcagaaaaatattcaccgaagaggaaaacccaaaagtgacactgtggattttcactgttctaagctccccgtgacctgtggtgaggcgaaagggattttatataagaagaaaatgaaacacggatcctcagtgaagtgcattcggaatgaggatggaacttggttaacaccaaatgaatttgaagtcgaaggaaaaggaaggaacgcaaagaactggaaacggaatatacgttgtgaaggaatgaccctaggagagctgctgaagagtggacttttgctctgtcctccaagaataaatctcaagagagagttaaatagcaag

SEQ ID NO: 5193 - DNA, 1647 bp, Homo sapiens
  source 1..1647: mol_type = genomic DNA
atgttcaccatgacaagagccatggaagaggctctttttcagcacttcatgcaccagaagctggggatcgcctatgccatacacaagccatttcccttctttgaaggcctcctagacaactccatcatcactaagagaatgtacatggaatctctggaagcctgtagaaatttgatccctgtatccagagtggtgcacaacattctcacccaactggagaggacttttaacctgtctcttctggtgacattgttcagtcaaattaacctgcgtgaatatcccaatctggtgacgatttacagaagcttcaaacgtgttggtgcttcctatgaatggcagagcagagacacaccaatcctacttgaagccccaactggcctagcagaaggaagctccctccataccccactggcgctgcccccaccacaaccccctcaaccaagctgttcaccctgtgcgccaagagtcagtgagcctggaacatcctcccagcaaagcgatgagatcctgagtgagtcgcccagcccatctgaccctgtcctgcctctccctgcactcatccaggaaggaagaagcacttcagtgaccaatgacaagttaacatccaaaatgaatgcggaagaagactcagaagagatgcccagcctcctcactagcactgtgcaagtggccagtgacaacctgatcccccaaataagagataaagaagaccctcaagagatgccccactctcccttgggctctatgccagagataagagataattctccagaaccaaatgacccagaagagccccaggaggtgtccagcacaccttcagacaagaaaggaaagaaaagaaaaagatgtatctggtcaactccaaaaaggagacataagaaaaaaagcctcccaggagggacagcctcatctagacacggaatccaaaagaagctcaaaagggtggatcaggttcctcaaaagaaagatgactcaacttgtaactccacggtagagacaagggcccaaaaggcgagaactgaatgtgcccgaaagtcgagatcagaggagatcattgatggcacttcagaaatgaatgaaggaaagaggtcccagaagacgcctagtacaccacgaagggtcacacaaggggcagcctcacctgggcatggcatccaagagaagctccaagtggtggataaggtgactcaaaggaaagacgactcaacctggaactcagaggtcatgatgagggtccaaaaggcaagaactaaatgtgcccgaaagtccagattgaaagaaaagaaaaaggagaaagatatctgttcaagctcaaaaaggagatttcagaaaaatattcaccgaagaggaaaacccaaaagtgacactgtggattttcactgttctaagctccccgtgacctgtggtgaggcgaaagggattttatataagaagaaaatgaaacacggatcctcagtgaagtgcattcggaatgaggatggaacttggttaacaccaaatgaatttgaagtcgaaggaaaaggaaggaacgcaaagaactggaaacggaatatacgttgtgaaggaatgaccctaggagagctgctgaagagtggacttttgctctgtcctccaagaataaatctcaagagagagttaaatagcaag

SEQ ID NO: 5194 - DNA, 2067 bp, Homo sapiens
  source 1..2067: mol_type = genomic DNA
atgttcaccatgacaagagccatggaagaggctctttttcagcacttcatgcaccagaagctggggatcgcctatgccatacacaagccatttcccttctttgaaggcctcctagacaactccatcatcactaagagaatgtacatggaatctctggaagcctgtagaaatttgatccctgtatccagagtggtgcacaacattctcacccaactggagaggacttttaacctgtctcttctggtgacattgttcagtcaaattaacctgcgtgaatatcccaatctggtgacgatttacagaagcttcaaacgtgttggtgcttcctatgaatggcagagcagagacacaccaatcctacttgaagccccaactggcctagcagaaggaagctccctccataccccactggcgctgcccccaccacaaccccctcaaccaagctgttcaccctgtgcgccaagagtcagtgagcctggaacatcctcccagcaaagcgatgagatcctgagtgagtcgcccagcccatctgaccctgtcctgcctctccctgcactcatccaggaaggaagaagcacttcagtgaccaatgacaagttaacatccaaaatgaatgcggaagaagactcagaagagatgcccagcctcctcactagcactgtgcaagtggccagtgacaacctgatcccccaaataagagataaagaagaccctcaagagatgccccactctcccttgggctctatgccagagataagagataattctccagaaccaaatgacccagaagagccccaggaggtgtccagcacaccttcagacaagaaaggaaagaaaagaaaaagatgtatctggtcaactccaaaaaggagacataagaaaaaaagcctcccaggagggacagcctcatctagacacggaatccaaaagaagctcaaaagggtggatcaggttcctcaaaagaaagatgactcaacttgtaactccacggtagagacaagggcccaaaaggcgagaactgaatgtgcccgaaagtcgagatcagaggagatcattgatggcacttcagaaatgaatgaaggaaagaggtcccagaagacgcctagtacaccacgaagggtcacacaaggggcagcctcacctgggcatggcatccaagagaagctccaagtggtggataaggttactcaaaggaaagacgactcaacctggaactcagaggtcatgatgagggtccaaaaggcaagaactaaatgtgcccgaaagtccagattgaaagaaaagaaaaaggagaaagatatctgttcaagctcaaaaaggagatttcagaaaaatattcaccgaagaggaaaacccaaaagtgacactgtggattttcactgttctaagctccccgtgacctgtggtgaggcgaaagggattttatataagaagaaaatgaaacacggatcctcagtgaagtgcattcggaatgaggatggaacttggttaacaccaaatgaatttgaagtcgaaggaaaaggaaggaacgcaaagaactggaaacggaatatacgttgtgaaggaatgaccctaggagagctgctgaagcggaaaaactcggatgaatgcgaggtgtgctgtcaagggggacaacttctctgctgcggtacttgtccacgagtcttccatgaggactgtcacatcccccctgtggaagccaagaggatgctgtggagttgcaccttctgcaggatgaagaggtcttcaggaagccaacagtgccatcatgtatctaagaccctggagaggcagatgcagcctcaggaccagctgattcgagattacggtgagccctttcaggaagcaatgtggttggacctggttaaggaaaggctgattacggaaatgtacacggtggcatggtttgtgcgagacatgcgcctgatgtttcgcaaccataaaacattttacaaggcttctgactttggccaggtaggacttgacttagaggcagaatttgaaaaagatctcaaagacgtgctcggttttcatgaagccaatgacggcggtttctggactcttcct

SEQ ID NO: 5195 - DNA, 2139 bp, Homo sapiens
  source 1..2139: mol_type = genomic DNA
atgttcaccatgacaagagccatggaagaggctctttttcagcacttcatgcaccagaagctggggatcgcctatgccatacacaagccatttcccttctttgaaggcctcctagacaactccatcatcactaagagaatgtacatggaatctctggaagcctgtagaaatttgatccctgtatccagagtggtgcacaacattctcacccaactggagaggacttttaacctgtctcttctggtgacattgttcagtcaaattaacctgcgtgaatatcccaatctggtgacgatttacagaagcttcaaacgtgttggtgcttcctatgaatggcagagcagagacacaccaatcctacttgaagccccaactggcctagcagaaggaagctccctccataccccactggcgctgcccccaccacaaccccctcaaccaagctgttcaccctgtgcgccaagagtcagtgagcctggaacatcctcccagcaaagcgatgagatcctgagtgagtcgcccagcccatctgaccctgtcctgcctctccctgcactcatccaggaaggaagaagcacttcagtgaccaatgacaagttaacatccaaaatgaatgcggaagaagactcagaagagatgcccagcctcctcactagcactgtgcaagtggccagtgacaacctgatcccccaaataagagataaagaagaccctcaagagatgccccactctcccttgggctctatgccagagataagagataattctccagaaccaaatgacccagaagagccccaggaggtgtccagcacaccttcagacaagaaaggaaagaaaagaaaaagatgtatctggtcaactccaaaaaggagacataagaaaaaaagcctcccaggagggacagcctcatctagacacggaatccaaaagaagctcaaaagggtggatcaggttcctcaaaagaaagatgactcaacttgtaactccacggtagagacaagggcccaaaaggcgagaactgaatgtgcccgaaagtcgagatcagaggagatcattgatggcacttcagaaatgaatgaaggaaagaggtcccagaagacgcctagtacaccacgaagggtcacacaaggggcagcctcacctgggcatggcatccaagagaagctccaagtggtggataaggtgactcaaaggaaagacgactcaacctggaactcagaggtcatgatgagggtccaaaaggcaagaactaaatgtgcccgaaagtccagattgaaagaaaagaaaaaggagaaagatatctgttcaagctcaaaaaggagatttcagaaaaatattcaccgaagaggaaaacccaaaagtgacactgtggattttcactgttctaagctccccgtgacctgtggtgaggcgaaagggattttatataagaagaaaatgaaacacggatcctcagtgaagtgcattcggaatgaggatggaacttggttaacaccaaatgaatttgaagtcgaaggaaaaggaaggaacgcaaagaactggaaacggaatatacgttgtgaaggaatgaccctaggagagctgctgaagcggaaaaactcggatgaatgcgaggtgtgctgtcaagggggacaacttctctgctgcggtacttgtccacgagtcttccatgaggactgtcacatcccccctgtggaagccaagaggatgctgtggagttgcaccttctgcaggatgaagaggtcttcaggaagccaacagtgccatcatgtatctaagaccctggagaggcagatgcagcctcaggaccagctgaaatgtgagttcctcctcttgaaggcctactgtcatccacaaagctccttttttacgggcatcccatttaatattcgagattacggtgagccctttcaggaagcaatgtggttggacctggttaaggaaaggctgattacggaaatgtacacggtggcatggtttgtgcgagacatgcgcctgatgtttcgcaaccataaaacattttacaaggcttctgactttggccaggtaggacttgacttagaggcagaatttgaaaaagatctcaaagacgtgctcggttttcatgaagccaatgacggcggtttctggactcttcct

SEQ ID NO: 5196 - DNA, 360 bp, Homo sapiens
  source 1..360: mol_type = genomic DNA
atgggagacaagaagagccccaccaggccgaagcggcagccgaagccgtcctcggatgagggttactgggactgtagcgtctgcaccttccggaacagcgccgaggccttcaagtgcatgatgtgcgatgtgcggaagggcacctccacccgaatgaagaatcatgaaatcataagtttcttgaaggaaggagagaagaaaaagctggatcacttaccagtaactggagttctcctattgggtaatctccacagatccacattgtttgaagttattgtgagtgcctcgaggaccaaggaaccgttgaaatttccaatttcaggaagttccagtggatgcccatcaggaagattctcatgc

SEQ ID NO: 5197 - DNA, 540 bp, Homo sapiens
  source 1..540: mol_type = genomic DNA
atgggagacaagaagagccccaccaggccgaagcggcagccgaagccgtcctcggatgagggttactgggactgtagcgtctgcaccttccggaacagcgccgaggccttcaagtgcatgatgtgcgatgtgcggaagggcacctccacccggaaacctcgacctgtctcccagttggttgcacagcaggttactcagcagtttgtgcctcctacacagtcaaagaaagagaaaaaagataaagtagaaaaagaaaaaagtgaaaaggaaacaactagcaaaaagaatagccataagaaaaccaggccaagattgaaaaatgtggatcggagtagtgctcagcatttggaagttactgttggagatctgacagtcattattacagactttaaggagaaaacaaagtcaccgcctgcatctagtgctgcttctgcagatcaacacagtcaaagcggctctagctctgataacacagagagaggaatgtccaggtcatcttcacccagaggagaagcctcatcattgaatggagaatctcat

SEQ ID NO: 5198 - DNA, 351 bp, Homo sapiens
  source 1..351: mol_type = genomic DNA
atgggagacaagaagagccccaccaggccgaagcggcagccgaagccgtcctcggatgagggttactgggactgtagcgtctgcaccttccggaacagcgccgaggccttcaagtgcatgatgtgcgatgtgcggaagggcacctccacccgggacagcaaggaaggggggaagctggtgtcctactccacagccagtcttggggttagaggaaccctgagaaatagagtaggtggtggcagctcagaagagaagaaacaggctgaatacctggcacctggaagaagaaggaatatagtacacaggggagttggcccaggacagagaagtgggcctagtttaaaagaggct

SEQ ID NO: 5199 - DNA, 414 bp, Homo sapiens
  source 1..414: mol_type = genomic DNA
atgggagacaagaagagccccaccaggaaacctcgacctgtctcccagttggttgcacagcaggttactcagcagtttgtgcctcctacacagtcaaagaaagagaaaaaagataaagtagaaaaagaaaaaagtgaaaaggaaacaactagcaaaaagaatagccataagaaaaccaggccaagattgaaaaatgtggatcggagtagtgctcagcatttggaagttactgttggagatctgacagtcattattacagactttaaggagaaaacaaagtcaccgcctgcatctagtgctgcttctgcagatcaacacagtcaaagcggctctagctctgataacacagagagaggaatgtccaggtcatcttcacccagaggagaagcctcatcattgaatggagaatctcat

SEQ ID NO: 5200 - DNA, 567 bp, Homo sapiens
  source 1..567: mol_type = genomic DNA
atggctgctgaaccagtagaagacaattgcatcaactttgtggcaatgaaatttattgacaatacgctttactttatagaaaacctggaatcagattactttggcaagcttgaatctaaattatcagtcataagaaatttgaatgaccaagttctcttcattgaccaaggaaatcggcctctatttgaagatatgactgattctgactgtagagataatgcaccccggaccatatttattataagtatgtataaagatagccagcctagaggtatggctgtaactatctctgtgaagtgtgagaaaatttcaactctctcctgtgagaacaaaattatttcctttaaggaaatgaatcctcctgataacatcaaggatacaaaaagtgacatcatattctttcagagaagtgtcccaggacatgataataagatgcaatttgaatcttcatcatacgaaggatactttctagcttgtgaaaaagagagagacctttttaaactcattttgaaaaaagaggatgaattgggggatagatctataatgttcactgttcaaaacgaagac

SEQ ID NO: 5201 - DNA, 828 bp, Homo sapiens
  source 1..828: mol_type = genomic DNA
atggcgccgcccccagccccgctcctggcgccgaggcccggggagacccggcctggttgcaggaagcccgggactgtgagcttcgcggacgtggccgtgtacttctccccggaggagtggggctgtctgcggcccgcgcagagggctctgtaccgggacgtgatgcaggagacctacggccacctgggcgcgctcggattcccaggccccaaaccagccctcatctcttggatggaacaggagagtgaggcttggagccccgccgcccaggatcctgagaagggggaaagactgggaggagctcggagaggagatgtcccaaacaggaaggaagaggaaccggaggaagtcccaagagccaaagggcctagaaaggctcctgtgaaggagagtcctgaagtgctggtggaacgcaaccctgacccagctattagcgtggccccggcacgggcacagccacccaaaaatgctgcctgggacccgaccacaggagcacagcccccggcacccatacccagcatggatgctcaggccggccagcggcgccacgtgtgcacggactgcggccgccgcttcacctacccctcactgctggtcagccacaggcgcatgcactcgggggagcggcctttcccctgccccgagtgtggcatgcgcttcaagaggaagttcgcagtggaagcgcaccagtggatccaccgctcctgctccggggggcggcggggccggaggcctgggatccgggctgtgcctcgggcccccgtccgaggtgaccgggacccgcctgtgctcttccggcactacccagacatcttcgaggagtgcggc

SEQ ID NO: 5202 - DNA, 786 bp, Homo sapiens
  source 1..786: mol_type = genomic DNA
atgccgaggtctccgctgcgctccagtctgtcaacagaggcttcaggaccgcggggtcccttcaaatgccccgccagtcccaggccaatcaccgcgcagcttcttccgggatcgtcgccaatcatcggccgttgcgtattgcgggtacagaggggattcccaggccccaaaccagccctcatctcttggatggaacaggagagtgaggcttggagccccgccgcccaggatcctgagaagggggaaagactgggaggagctcggagaggagatgtcccaaacaggaaggaagaggaaccggaggaagtcccaagagccaaagggcctagaaaggctcctgtgaaggagagtcctgaagtgctggtggaacgcaaccctgacccagctattagcgtggccccggcacgggcacagccacccaaaaatgctgcctgggacccgaccacaggagcacagcccccggcacccatacccagcatggatgctcaggccggccagcggcgccacgtgtgcacggactgcggccgccgcttcacctacccctcactgctggtcagccacaggcgcatgcactcgggggagcggcctttcccctgccccgagtgtggcatgcgcttcaagaggaagttcgcagtggaagcgcaccagtggatccaccgctcctgctccggggggcggcggggccggaggcctgggatccgggctgtgcctcgggcccccgtccgaggtgaccgggacccgcctgtgctcttccggcactacccagacatcttcgaggagtgcggc

SEQ ID NO: 5203 - DNA, 1512 bp, Homo sapiens
  source 1..1512: mol_type = genomic DNA
atgttttgttttgtttttcaggaactgttgacattcagggatgtgaccatagaattctctctggaggagtgggagtttctgaaccctgctcagcagagtttgtataggaaagtgatgctagagaactacagaaacctggtctctctgggtcttactgtttctaagccagaactgattagccgtctggagcaaagacaggagccctggaatgtgaagagacatgagaccatagccaaacccccagctatgtcttctcattacactgaagaccttttgccagaacagtgcatgcaagattcattccaaaaagtgatactgagaagatatggaagctgtggacttgaggatttacacttaaggaaggatggggaaaatgtgggtgagtgtaaggatcaaaaagaaatttataatggacttaaccaatgtttgtcaactctacctagcaaaattttcccatataataaatgtgtgaaagtctttagtaaatcatcaaatctaaatagagaaaacataagacatactacagagaaacttttcaaatgtatgcaatgtggcaaagtctttaaatctcactcaggcctttcttatcataagataattcacactgaagagaaactctgcatatgtgaggaatgtggcaaaacctttaagtggttctcataccttactaaacataagagaattcacactggagagaaaccatacaaatgtgaagaatgtggcaaagcttttaactggtgctcgagtcttactaaacataagagaatccatactggtgagaaaccctacaaatgtgaagaatgtggaaaagcctttcactggtgttcaccctttgttagacataagaaaattcatacaggagaaaaaccctatacatgtgaagactgtggcagagcgtttaaccggcactcacatctcaccaaacataagacaattcacactggaaagaaaccctacaaatgtaaagaatgtgggaaagcctttaaccactgctcactacttactatacatgagagaacccatacgggagagaaaccctataaatgtgaagaatgtggcaaagcttttaactcatcatcaattcttactgaacataaggtaattcatagcggagagaaaccctacaaatgtgaaaaatgtgacaaagtctttaagaggttctcataccttactaaacacaagagaattcacactggagagaaaccctacaaatgtgaagaatgtggcaaagcttttaactggtcctcaatccttactgaacataagagaattcatactggagagaaaccctacaactgtgaagaatgtggaaaagcctttaatcggtgctcacaccttactagacataagaaaattcatactgccgtcaaacgctataaatgtgaagaatgtggcaaagcttttaaacggtgctcacatcttaatgaacataagagagttcaaagaggagagaaatcctgcaagtataaaaaatgtggggaagcttttaatcactgctcaaaccttactacg

SEQ ID NO: 5204 - DNA, 1494 bp, Homo sapiens
  source 1..1494: mol_type = genomic DNA
atggaactgttgacattcagggatgtgaccatagaattctctctggaggagtgggagtttctgaaccctgctcagcagagtttgtataggaaagtgatgctagagaactacagaaacctggtctctctgggtcttactgtttctaagccagaactgattagccgtctggagcaaagacaggagccctggaatgtgaagagacatgagaccatagccaaacccccagctatgtcttctcattacactgaagaccttttgccagaacagtgcatgcaagattcattccaaaaagtgatactgagaagatatggaagctgtggacttgaggatttacacttaaggaaggatggggaaaatgtgggtgagtgtaaggatcaaaaagaaatttataatggacttaaccaatgtttgtcaactctacctagcaaaattttcccatataataaatgtgtgaaagtctttagtaaatcatcaaatctaaatagagaaaacataagacatactacagagaaacttttcaaatgtatgcaatgtggcaaagtctttaaatctcactcaggcctttcttatcataagataattcacactgaagagaaactctgcatatgtgaggaatgtggcaaaacctttaagtggttctcataccttactaaacataagagaattcacactggagagaaaccatacaaatgtgaagaatgtggcaaagcttttaactggtgctcgagtcttactaaacataagagaatccatactggtgagaaaccctacaaatgtgaagaatgtggaaaagcctttcactggtgttcaccctttgttagacataagaaaattcatacaggagaaaaaccctatacatgtgaagactgtggcagagcgtttaaccggcactcacatctcaccaaacataagacaattcacactggaaagaaaccctacaaatgtaaagaatgtgggaaagcctttaaccactgctcactacttactatacatgagagaacccatacgggagagaaaccctataaatgtgaagaatgtggcaaagcttttaactcatcatcaattcttactgaacataaggtaattcatagcggagagaaaccctacaaatgtgaaaaatgtgacaaagtctttaagaggttctcataccttactaaacacaagagaattcacactggagagaaaccctacaaatgtgaagaatgtggcaaagcttttaactggtcctcaatccttactgaacataagagaattcatactggagagaaaccctacaactgtgaagaatgtggaaaagcctttaatcggtgctcacaccttactagacataagaaaattcatactgccgtcaaacgctataaatgtgaagaatgtggcaaagcttttaaacggtgctcacatcttaatgaacataagagagttcaaagaggagagaaatcctgcaagtataaaaaatgtggggaagcttttaatcactgctcaaaccttactacg

SEQ ID NO: 5205 - DNA, 1266 bp, Homo sapiens
  source 1..1266: mol_type = genomic DNA
atgtcttctcattacactgaagaccttttgccagaacagtgcatgcaagattcattccaaaaagtgatactgagaagatatggaagctgtggacttgaggatttacacttaaggaaggatggggaaaatgtgggtgagtgtaaggatcaaaaagaaatttataatggacttaaccaatgtttgtcaactctacctagcaaaattttcccatataataaatgtgtgaaagtctttagtaaatcatcaaatctaaatagagaaaacataagacatactacagagaaacttttcaaatgtatgcaatgtggcaaagtctttaaatctcactcaggcctttcttatcataagataattcacactgaagagaaactctgcatatgtgaggaatgtggcaaaacctttaagtggttctcataccttactaaacataagagaattcacactggagagaaaccatacaaatgtgaagaatgtggcaaagcttttaactggtgctcgagtcttactaaacataagagaatccatactggtgagaaaccctacaaatgtgaagaatgtggaaaagcctttcactggtgttcaccctttgttagacataagaaaattcatacaggagaaaaaccctatacatgtgaagactgtggcagagcgtttaaccggcactcacatctcaccaaacataagacaattcacactggaaagaaaccctacaaatgtaaagaatgtgggaaagcctttaaccactgctcactacttactatacatgagagaacccatacgggagagaaaccctataaatgtgaagaatgtggcaaagcttttaactcatcatcaattcttactgaacataaggtaattcatagcggagagaaaccctacaaatgtgaaaaatgtgacaaagtctttaagaggttctcataccttactaaacacaagagaattcacactggagagaaaccctacaaatgtgaagaatgtggcaaagcttttaactggtcctcaatccttactgaacataagagaattcatactggagagaaaccctacaactgtgaagaatgtggaaaagcctttaatcggtgctcacaccttactagacataagaaaattcatactgccgtcaaacgctataaatgtgaagaatgtggcaaagcttttaaacggtgctcacatcttaatgaacataagagagttcaaagaggagagaaatcctgcaagtataaaaaatgtggggaagcttttaatcactgctcaaaccttactacg

SEQ ID NO: 5206 - DNA, 1398 bp, Homo sapiens
  source 1..1398: mol_type = genomic DNA
atgctagagaactacagaaacctggtctctctgggtcttactgtttctaagccagaactgattagccgtctggagcaaagacaggagccctggaatgtgaagagacatgagaccatagccaaacccccagctatgtcttctcattacactgaagaccttttgccagaacagtgcatgcaagattcattccaaaaagtgatactgagaagatatggaagctgtggacttgaggatttacacttaaggaaggatggggaaaatgtgggtgagtgtaaggatcaaaaagaaatttataatggacttaaccaatgtttgtcaactctacctagcaaaattttcccatataataaatgtgtgaaagtctttagtaaatcatcaaatctaaatagagaaaacataagacatactacagagaaacttttcaaatgtatgcaatgtggcaaagtctttaaatctcactcaggcctttcttatcataagataattcacactgaagagaaactctgcatatgtgaggaatgtggcaaaacctttaagtggttctcataccttactaaacataagagaattcacactggagagaaaccatacaaatgtgaagaatgtggcaaagcttttaactggtgctcgagtcttactaaacataagagaatccatactggtgagaaaccctacaaatgtgaagaatgtggaaaagcctttcactggtgttcaccctttgttagacataagaaaattcatacaggagaaaaaccctatacatgtgaagactgtggcagagcgtttaaccggcactcacatctcaccaaacataagacaattcacactggaaagaaaccctacaaatgtaaagaatgtgggaaagcctttaaccactgctcactacttactatacatgagagaacccatacgggagagaaaccctataaatgtgaagaatgtggcaaagcttttaactcatcatcaattcttactgaacataaggtaattcatagcggagagaaaccctacaaatgtgaaaaatgtgacaaagtctttaagaggttctcataccttactaaacacaagagaattcacactggagagaaaccctacaaatgtgaagaatgtggcaaagcttttaactggtcctcaatccttactgaacataagagaattcatactggagagaaaccctacaactgtgaagaatgtggaaaagcctttaatcggtgctcacaccttactagacataagaaaattcatactgccgtcaaacgctataaatgtgaagaatgtggcaaagcttttaaacggtgctcacatcttaatgaacataagagagttcaaagaggagagaaatcctgcaagtataaaaaatgtggggaagcttttaatcactgctcaaaccttactacg

SEQ ID NO: 5207 - DNA, 1572 bp, Homo sapiens
  source 1..1572: mol_type = genomic DNA
atgaaggaagaatcagctgcacaattaggttgttgtcataggcccatggccctgggaggtacagggggctccctgtcccccagcctggacttccagctcttccgaggtgaccaggtcttctcagcctgcagaccacttccagacatggtggatgctcatggcccatcctgtgccagctggctgtgtcccttgcccctggcaccgggcaggtctgcactgctggcctgcctacaggacctggacctgaacctgtgcaccccacagccggcacccctgggcacagacctgcagggcctccaagaggacgccttgagcatgaagcacgagccaccagggctgcaggccagctccaccgatgacaagaaattcacagtcaagtacccacagaacaaggacaagctgggaaaacagccagaaagagctggcgagggggccccctgcccagccttctcctctcataacagctcttccccaccaccgctgcagaacagaaagagccccagccccttggctttctgcccctgtccccctgtcaactccatctccaaggagctcccatttctcctccacgccttctaccctggatacccacttctcctgcctccaccccacctgttcacctatggggccctaccttctgaccaatgtccccacctcctcatgctgccccaagacccctcctaccccaccatggctatgcctagcctgctgatgatggtcaatgagctggggcaccccagcgctcggtgggagaccctgcttccctacccaggggccttccaagcctctggccaagctctgccttcccaggcccgaaatccaggtgctggagctgccccaaccgactccccaggcctggagcgtggtggcatggcatctccagcaaagcgggtcccattgagttcccagacaggcaccgcagccttgccttacccgctgaaaaagaagaatggcaaaatcctgtacgagtgcaacatatgtggcaagagctttgggcagctctccaatctcaaggtccacctgcgtgtgcacagtggagagcgtccattccagtgtgccttgtgccagaagagcttcactcaacttgcccacctgcagaagcaccacctggtgcacactggggagcggccccacaagtgctcgataccgtgggttccaggaagaaatcactggaaaagcttccaggcctggagggaaagagaggtgtgccacaagcgcttcagcagctccagtaacctcaagacccacctgcgcctgcactccggggcccggcccttccagtgcagtgtctgccggagtcgcttcacccagcacatccacctgaagctgcaccatcggctgcatgccccacagccctgtggcctggtgcacacccagctgcccctggcctctctggcctgccttgcccaatggcaccagggggcactagatcttatggcggtggcatctgagaaacacatgggctatgacatagatgaggtcaaagtgtcctcgacatcccaggggaaagcaagagcagtgagcctgagcagtgccgggactcccctggtgatggggcaggaccagaacaat

SEQ ID NO: 5208 - DNA, 1512 bp, Homo sapiens
  source 1..1512: mol_type = genomic DNA
atgaaggaagaatcagctgcacaattaggttgttgtcataggcccatggccctgggaggtacagggggctccctgtcccccagcctggacttccagctcttccgaggtgaccaggtcttctcagcctgcagaccacttccagacatggtggatgctcatggcccatcctgtgccagctggctgtgtcccttgcccctggcaccgggcaggtctgcactgctggcctgcctacaggacctggacctgaacctgtgcaccccacagccggcacccctgggcacagacctgcagggcctccaagaggacgccttgagcatgaagcacgagccaccagggctgcaggccagctccaccgatgacaagaaattcacagtcaagtacccacagaacaaggacaagctgggaaaacagccagaaagagctggcgagggggccccctgcccagccttctcctctcataacagctcttccccaccaccgctgcagaacagaaagagccccagccccttggctttctgcccctgtccccctgtcaactccatctccaaggagctcccatttctcctccacgccttctaccctggatacccacttctcctgcctccaccccacctgttcacctatggggccctaccttctgaccaatgtccccacctcctcatgctgccccaagacccctcctaccccaccatggctatgcctagcctgctgatgatggtcaatgagctggggcaccccagcgctcggtgggagaccctgcttccctacccaggggccttccaagcctctggccaagctctgccttcccaggcccgaaatccaggtgctggagctgccccaaccgactccccaggcctggagcgtggtggcatggcatctccagcaaagcgggtcccattgagttcccagacaggcaccgcagccttgccttacccgctgaaaaagaagaatggcaaaatcctgtacgagtgcaacatatgtggcaagagctttgggcagctctccaatctcaaggtccacctgcgtgtgcacagtggagagcgtccattccagtgtgccttgtgccagaagagcttcactcaacttgcccacctgcagaagcaccacctggtgcacactggggagcggccccacaagtgctcggtgtgccacaagcgcttcagcagctccagtaacctcaagacccacctgcgcctgcactccggggcccggcccttccagtgcagtgtctgccggagtcgcttcacccagcacatccacctgaagctgcaccatcggctgcatgccccacagccctgtggcctggtgcacacccagctgcccctggcctctctggcctgccttgcccaatggcaccagggggcactagatcttatggcggtggcatctgagaaacacatgggctatgacatagatgaggtcaaagtgtcctcgacatcccaggggaaagcaagagcagtgagcctgagcagtgccgggactcccctggtgatggggcaggaccagaacaat

SEQ ID NO: 5209 - DNA, 369 bp, Homo sapiens
  source 1..369: mol_type = genomic DNA
atgccaggaccacctggaagcctagaaatgggaccactgacatttagggatgtggccatagaattctctctggaggagtggcaatgcctggacactgcacaacggaatttatataggaaagtgatgtttgagaactacagaaacctggtcttcctgggtattgctgtctctaagcctcacctgataacctgtttggagcaaggaaaagagccctggaataggaagagacaggagatggtagccaaacccccagagtcttactgtgttgctcaggctgatcttgaactcctggtctcaagttatcttactgccttggcctccctaaagatgtgggattacagaaataatccactttgccaggctactatg

SEQ ID NO: 5210 - DNA, 1590 bp, Homo sapiens
  source 1..1590: mol_type = genomic DNA
atgccaggaccacctggaagcctagaaatgggaccactgacatttagggatgtggccatagaattctctctggaggagtggcaatgcctggacactgcacaacggaatttatataggaaagtgatgtttgagaactacagaaacctggtcttcctgggtattgctgtctctaagcctcacctgataacctgtttggagcaaggaaaagagccctggaataggaagagacaggagatggtagccaaacccccagttatatattctcatttcactgaagacctttggccagagcatagcataaaagattcttttcaaaaagtgatactgagaggatatggaaaatgtggacatgagaatttacaattaagaataagttgtaaaagtgtggatgagtctaaggtgttcaaagaaggttataatgaacttaaccaatgtttgagaactacccagagcaaaatatttcaatgtgataaatacgtgaaagtctttcataaattttcaaattcaaacagtcataagaaaagaaatactggaaagaaggttttcaaatgtaaagaatgtggcaaatcattttgcatgctttcacatctaacacaacatataagaattcacactagagagaattcttacaaatgtgaggaatgtggcaaagttcttaactggttctcagagcttattaaacataagggaattcatatgggagagaaaccctacaaatgtgaggaatgtggcaaagcctttaaccaatcctcaacccttattaaacataagaaaattcatattgaagagaaacccttcaaatgtgaagaatgtggcaaagcctttagtttattctcaatccttagtaaacataagataattcatactggagacaaaccttacaaatgtgatgaatgtcacaaagcctttaactggtttgcaacccttactaaccataagagaattcatactggagagaaacccttcaaatgtgaagaatgtggcaaagactttaaccagttttcaaaccttactaaacataagaaaattcatactggagagaaaccctacaaatgtgaagaatgtggcaaagcttttaaccagtttgcaaaccttactagacataagaaaattcatactggagagaaatcctacaaatgtgaagaatgcggcaaagcttttatacagtcctcaaaccttactgaacatatgagaattcatactggagagaaaccctacaaatgtgaagaatgtggcaaagcttttaatgggtgctccagccttactcgacataagagaattcacactagagagaatacctacaaatgtgaagaatgtggcaaaggctttactttattttcaacccttactaaccataaagtaattcatactggagagaaatcctacaaatgtgatgaatgtggcaatgtttttaactggcctgcaactcttgctaatcataagagaattcatgctagagagaaaccctacaaatgtgaagaatgtggcaaagcttttaaccggtcctcacaccttactagacataagaaaattcatactggtgagaaactctacaaacctgaaaaatgtgacaataattttgataacacc

SEQ ID NO: 5211 - DNA, 1935 bp, Homo sapiens
  source 1..1935: mol_type = genomic DNA
atggaaccattgaaatttagggatgtggccatagaattctctctggaggagtggcaatgcctggacactatacagcagaatttatataggaatgtgatgttagagaactacagaaacctggtcttcttgggtattgttgtctctaagccagacctgatcacctgtctggaacaagaaaaagagccttggactagaaagagacataggatggtggccgaacccccagttatttgttctcattttgcccaagacttttcaccagagcagaacataaaagattctttccaaaaagtgacaccaagaagatatggaaaatgtgaacatgagaatttacagttaagtaaaagtgtggatgagtgcaaagtgcaaaaaggaggttataatggacttaaccaatgtttgccaactacccagagcaaaatatttcaatgtgataaatatatgaaaatctttcataaattttcaaatttaaatggacataaggtaagacacaccagaaaaaaaccttttaaatataaagaatttggcaaatcattttgcatattttcaaacctaactcaacataaaataatttgtactagagtaaatttctacaaatgtgaagactgtggaaaagcctttaatggatcctcaatctttactaaacataaaagaattcatattggagagaaatcgtacatatgtgaagaatgtggcaaagcctgtaaccagttcacaaaccttactacacataagataatttatactagagacaaactctacaaacgtgaagaatgtagcaaagcctttaacctgtcgtcacacattacaacacatacaataattcatactggagagaatccctacaaacgtgaagaatgtgacaaagcctttaatcagtccttaacccttactacacataagataattcataccagagagaaactcaatgaatataaggaatgtggcaaagctttcaaccagtcctcacaccttaccagacataagataattcatactggagagaaaccctacaaatgtgaagaatgtggcaaagcctttaaccagtcctcacaccttaccagacataagataattcatactggagagaagccctacagatgtgaagaatgtggcaaagcctttaggcagtcctcacaccttactacacataagataattcatactggagagaaaccctacaaatgtgaagaatgtggcaaagcttttaacaagtcctcacaccttactagacataagagcattcatactggagaaaaaccctaccagtgtgaaaaatgtggcaaagcttctaaccaatcctcaaaccttactgaacataagaatattcatactgaagagaaaccatacaaatgtgaagaatgtgggaaagcctttaaccagttctcaaaccttactacacataaaagaattcatactggagagaaaccctacaaatgtgaagaatgtggcaaagcttttaaccagtcctcaatccttactacacataagagaattcatactggagagaaatcctacaaatgtgaagaatgtggcaaagctttctatcgatcctcaaaacttactgaacataagaaaattcatactggagagaaaccctacacatgtgaagaatgtggcaaagcctttaaccattcctcacatcttgctacacataaggtaattcatactggagagaaaccctaccaatgtgaagaatgtggtaaagcctttaaccagtcctcacaccttactagacataagagaattcatactggagagaaaccctaccaatgtgaaaaatgtggcaaagcttttaaccagtcctcaaaccttactggacataagaaaattcatactggtgagaaactctacaaacctaaaagatgtaacagtgattttgaaaacacttcaaagttttctaaacataaaagaaattatgctggtgagaaatct

SEQ ID NO: 5212 - DNA, 3711 bp, Homo sapiens
  source 1..3711: mol_type = genomic DNA
atgggggatatgaagacccctgattttgatgacctccttgctgcctttgacatccctgacattgatgcgaatgaagccatccattctgggccagaagaaaatgaggggcctggaggcccagggaagccagaaccaggtgtaggaagtgaatctgaagacacagcagcagcctctgctggggatggccctggagttccagcccaggcctctgaccatggcctgccaccgccagacatttctgtagtcagtgtcattgtcaagaacactgtgtgtcccgagcagtctgaggccctggctggaggctcagcaggagacggggcccaggctgctggggtaactaaagaagggcctgtggggcctcatcgaatgcagaatggttttgggagccctgaaccttccctcccaggaactccccactctcctgctcctcccagtgggggcacctggaaagaaaaaggcatggaaggcaaaactcccttggacctgtttgctcattttggccctgagccaggggaccactcagatccgctgcctccctctgcaccctctcccactcgggagggggctctgaccccgcctcctttcccctcttcctttgagctggcccaggagaatggcccaggcatgcagccacctgtttcttccccaccattgggggccttgaagcaggagagctgcagcccccatcatccccaggtcctagcccaacaaggctcaggctccagccctaaggccacggacatccctgccagtgcctcgcctcccccagttgctggggtgcccttcttcaagcagtctccagggcaccagagccctcttgcctcccccaaagtgcccgtctgtcagcccttgaaggaagaagatgatgatgaggggccagtggacaagtcttccccaggaagtccccagagtccctctagtggggccgaggctgcagatgaggacagcaatgactcccctgcctccagctcctctaggcctcttaaggtgcggatcaagaccattaaaacatcctgcgggaatatcacaaggactgtaactcaggtcccctcagatcctgatccacctgcccccttggctgagggggccttcttggctgaggctagcctcttgaagctgtcccctgcaacacctacttctgagggtccaaaggtggtgagcgtacagttgggtgatggtacaaggctgaaaggcactgtgctgcctgtggccaccatccagaacgccagtactgccatgctgatggcagccagtgtggctcgcaaggctgtggtgctgcctggggggactgccaccagccctaagatgattgctaagaacgtgctaggcctggtgccccaagccctgcctaaggctgacgggcgggcagggctggggactgggggacagaaggtgaatggtgcctcggtggtgatggtgcaaccttcaaagacagctactgggccaagtacagggggcggcacagtgatatcacggacccagtccagcctggtggaggccttcaacaagatcctcaacagcaagaacctgctccctgcctataggccaaacctgagcccaccagctgaggctgggctggccctgcctcccaccggctaccgctgcctggagtgtggggatgccttctcattggagaagagcctggcacggcactatgaccgtcggagcatgcgcatcgaggtcacctgcaaccactgcgcccgccgcctggtcttcttcaacaagtgcagcctgctcctgcatgcacgtgaacacaaggacaaggggctcgtcatgcagtgctcacatttggtcatgaggcctgtagcccttgaccagatggtggggcagccggacatcacaccgctgctgcctgtagctgtcccacctgtctctggacctctggccttgcctgccttgggcaagggtgagggggccatcacctcctctgccattactacagttgctgctgaggcccctgtcctgccgctctccacagagccgcctgctgccccggccacctctgcttacacatgctttcgctgcctggagtgcaaggaacagtgccgggacaaggctggcatggcagctcacttccagcagctcggcccccctgcccctggggccaccagcaatgtgtgcccaacctgccccatgatgctccccaatcgctgcagcttcagcgcccaccagcgcatgcataagaatcgacccccccatgtctgtcctgagtgtgggggcaacttcctgcaagccaattttcagacccatctccgggaggcctgtctgcacgtctctcgccgtgtaggatacaggtgccccagctgttcagtggtgtttgggggtgtgaactccatcaagtcccacatccagacgtcgcactgcgaggttttccacaagtgccccatctgccccatggccttcaagtctgggccaagtgcccatgcccacctctactcccagcatcccagcttccaaactcagcaggccaagctgatctacaagtgcgccatgtgcgacacagtcttcactcacaaacccctcctctcctcacacttcgaccagcacttgctgccccagcgtgtcagtgtctttaagtgcccgtcttgtcctctgctctttgcccaaaaaaggaccatgctggaacatctcaagaacacccatcagtctgggcgcttggaggagactgctgggaaaggggccgggggtgccctgctgacccccaagactgagcctgaggagctggctgtttctcagggaggggcagcccctgctactgaggagtcgtcttcatcttcagaagaggaggaagtacccagctcccctgagcccccccgtccagccaaacggcctcggcgggaactagggagcaaaggcctcaagggtgggggtggggggcctggaggctggacctgtggcctgtgtcactcctggttccctgagcgtgatgaatacgtggcccacatgaagaaggagcatggcaagtcagtgaaaaagttcccctgtcgcctgtgtgagcgctccttctgctccgcccccagcctgaggcgccatgtcagagttaatcacgagggcatcaagcgagtttacccctgcaggtattgcacagagggaaaacgcaccttcagcagccgcctgatcctagagaaacatgtccaggtccggcacggcttgcagcttggggcccagtcccctggccgggggaccaccttggctcggggttccagtgccagagcccaggggccaggtcggaaacgccgccagtcttctgactcttgcagtgaggagcctgacagcacgacaccgccagccaagtcccccaggggcggacctggatctggaggccatggccctctgcgctaccggagcagcagctccacagaacagagcctcatgatggggttgagggtggaggatggtgcccagcagtgcctcgactgtggcttgtgctttgcctcccctggctccctgagccgacaccgtttcatcagccacaagaagagacggggtgtgggtaaagccagtgccctggggctgggggatggggaggaagaggcccctccatcaaggtctgaccccgatggtggagactcacccctgcctgcttctggaggcccactgacctgtaaggtctgtggcaagagctgcgacagccctctaaacctcaagacccacttccgcacgcatggcatggcgttcatcagggctcggcagggggctgttggggacaac

SEQ ID NO: 5213 - DNA, 1134 bp, Homo sapiens
  source 1..1134: mol_type = genomic DNA
atgatcagcttccaggaatcagtgacattccaggatgtggctgtggatttcactgcagaggagtggcagctgcttgattgtgctgagagaaccctgtattgggatgtgatgttggagaactatagaaacctcatctcagtgggatgtccaattaccaaaacaaaagtgatcctcaaggtagagcaaggacaagagccatggatggtggagggagcgaatccacacgagagctctccagaatctgactacccacttgttgatgaaccagggaagcatcgggaaagcaaagacaattttttgaagtcagttttgctcacattcaataaaattctgactatggagagaatccaccattataatatgagcacaagtcttaatccaatgagaaaaaaatcatataaatcgtttgagaagtgtttgccacctaatttagacttacttaaatataatagaagttatactgtagaaaacgcttatgaatgcagtgaatgcgggaaagccttcaaaaagaagtttcatttcattagacatgaaaaaaatcatacaaggaaaaaaccttttgaatgcaatgactgtggaaaagcctatagcaggaaggcacaccttgcaactcatcagaaaattcataatggagagagaccctttgtgtgcaatgattgtgggaaggcgtttatgcataaagcccaactcgtggtccaccagagacttcacactggagagaagccttatgagtgcagtcaatgtgggaaaacattcacttggaactcctcatttaatcaacacgtgaaatctcatacacttgagaagtcatttgaatgtaaggaatgtgggaaaaccttcaggtatagttcatccctttataaacattccagatttcatacaggagagaaaccctaccagtgtatcatatgtggcaaagcttttggcaacacatccgtgcttgttacacaccaaagaattcatacaggagagaaaccttacagttgtattgaatgtggcaaagccttcatcaagaagtcccatctcctcagacatcagataactcatacaggagagaagccctatgaatgtaacagatgtgggaaagcattttcccagaagtcaaatcttattgtacatcagaaaattcataca

SEQ ID NO: 5214 - DNA, 702 bp, Homo sapiens
  source 1..702: mol_type = genomic DNA
atggcagctaaaatggagataactttaagctccaacactgaagcttcctccaagcaagagagacacataatagccaaactagaagagaaacggggccctcctctgcaaaaaaactgcccagatcctgagctctgccgccagagcttcagacgcttttgttatcaagaggtgtctggaccccaagaggctctctcccagctccgacagctctgccgtcagtggttgcaacccgagctgcacaccaaggagcagattttggagcttctggtgatggagcagttcctgaccatcctgcccccggagatccaggctcgggtcaggcatcgatgtccaatgagcagcaaggagattgtgaccctcgtggaagattttcacagagcatccaagaaaccaaagcagtgggtggccgtttgtatgcaggggcaaaaggtgctcttggagaaaactggatctcagcttggagaacaggaactgccagactttcaaccgcagactcctaggagagatctcagggagagctctccagcagagccttcccaggcaggagcttatgaccggctgagcccccatcattgggagaaatccccactcctccaagaaccaacccccaaattggctgggacagaacttcttatagaaaagacagatccaaatatggccacagatgaacttccatgcaagctatggctgagtttcattgct

SEQ ID NO: 5215 - DNA, 1221 bp, Homo sapiens
  source 1..1221: mol_type = genomic DNA
atggcagctaaaatggagataactttaagctccaacactgaagcttcctccaagcaagagagacacataatagccaaactagaagagaaacggggccctcctctgcaaaaaaactgcccagatcctgagctctgccgccagagcttcagacgcttttgttatcaagaggtgtctggaccccaagaggctctctcccagctccgacagctctgccgtcagtggttgcaacccgagctgcacaccaaggagcagattttggagcttctggtgatggagcagttcctgaccatcctgcccccggagatccaggctcgggtcaggcatcgatgtccaatgagcagcaaggagattgtgaccctcgtggaagattttcacagagcatccaagaaaccaaagcagtgggtggccgtttgtatgcaggggcaaaaggtgctcttggagaaaactggatctcagcttggagaacaggaactgccagactttcaaccgcagactcctaggagagatctcagggagagctctccagcagagccttcccaggcaggagcttatgaccggctgagcccccatcattgggagaaatccccactcctccaagaaccaacccccaaattggctgggacagaggcccccagaatgagaagtgacaacaaggaaaatccacaacaggaaggggctaaaggagcaaagccatgtgcagtgtcagctggcagatccaaagggaatggtctgcagaatcctgaaccaagaggggcaaatatgagtgaacctcggttgtcacggaggcaggtcagctccccaaatgctcaaaagccatttgctcactaccagagacattgcagggtggaatacatcagcagccccctaaaaagccacccactgagagagctaaagaaaagcaaaggaggtaaacggagtctgagcaaccgtttgcaacatcttggtcaccagcccacccgctcagcaaagaaaccctacaaatgtgatgactgtgggaaaagcttcacgtggaattcagagctgaagagacacaagagagtccacacaggagagagaccctacacgtgcggagagtgtggaaactgctttgggcggcagtcaaccctgaagctgcaccagaggatccacactggagagaagccataccagtgtggccagtgtgggaaaagctttcgccagagctcaaaccttcaccagcatcaccgacttcaccatggggac

SEQ ID NO: 5216 - DNA, 1443 bp, Homo sapiens
  source 1..1443: mol_type = genomic DNA
atggctgcagggtggctgacaacctggtcacagaactcagtaaccttccaggaagtggcagtggacttttcccaggaggagtgggcattgctggaccctgctcaaaaaaatctatacaaagatgtgatgctggagaactttaggaacctggcctcagtagggtatcagctctgcagacacagtctgatctccaaggtggatcaagaacagctgaagacagatgaaagaggaattttacaaggtgactgtgcagactgggaaactcaacttaaaccaaaagatacaattgctatgcagaacattcctgggggaaaaacatccaatggcataaacacggcagaaaatcaacctggtgagcactccctggagtgtaaccattgtgggaaattcagaaagaacactcgctttatttgtacaagatattgcaagggagagaaatgctataaatatataaagtatagcaaagtcttcaaccatccctcaactcttaggagtcatgtgagcattcacattggagagaaaactcttgaatttactgattgtagaaaagctttcaatcaagagtcatccctcaggaaacacttaagaactcccacaggacagaagtttcaggagtatgagcaatgtgatatgtccttcagcctacactcttcctgctcagtacgtgagcaaatacctactggagagaaaggtgatgaatgcagtgactatggcaaaatatctccccttagtgtccacacaaaaactggtagtgtggaggagggtttggaatgtaatgaacatgagaaaactttcactgaccctttgtcccttcagaactgtgtcagaactcactctggagagatgccctatgaatgcagtgactgtgggaaagccttcatttttcagtcttcccttaagaaacacatgagatctcatactggagagaagccttatgagtgtgatcactgtggaaaatcctttagccagagctctcatctgaatgtgcacaaaagaactcacactggagagaaaccctatgactgtaaggaatgtgggaaggctttcactgttccttcatcccttcagaaacatgtgagaacccacactggagagaaaccctatgaatgcagtgactgtggaaaagccttcatcgatcagtcatcccttaagaaacacacacgctctcacactggagagaagccttatgagtgtaaccagtgtggaaagtccttcagcacaggctcttaccttattgtgcacaagagaactcacactggtgagaaaacctatgagtgtaaagaatgtgggaaggcctttaggaattcctcttgcctgagggtacacgtgagaactcacactggagagaagccttataaatgtattcagtgtgaaaaagcctttagcacaagcactaaccttataatgcacaagcgaatccacaatggccagaaactccatgaa

SEQ ID NO: 5217 - DNA, 2544 bp, Homo sapiens
  source 1..2544: mol_type = genomic DNA
atgaacagcagcagcgccaacatcacctacgccagtcgcaagcggcggaagccggtgcagaaaacagtaaagccaatcccagctgaaggaatcaagtcaaatccttccaagcggcatagagaccgacttaatacagagttggaccgtttggctagcctgctgcctttcccacaagatgttattaataagttggacaaactttcagttcttaggctcagcgtcagttacctgagagccaagagcttctttgatgttgcattaaaatcctcccctactgaaagaaacggaggccaggataactgtagagcagcaaatttcagagaaggcctgaacttacaagaaggagaattcttattacaggctctgaatggctttgtattagttgtcactacagatgctttggtcttttatgcttcttctactatacaagattatctagggtttcagcagtctgatgtcatacatcagagtgtatatgaacttatccataccgaagaccgagctgaatttcagcgtcagctacactgggcattaaatccttctcagtgtacagagtctggacaaggaattgaagaagccactggtctcccccagacagtagtctgttataacccagaccagattcctccagaaaactctcctttaatggagaggtgcttcatatgtcgtctaaggtgtctgctggataattcatctggttttctggcaatgaatttccaagggaagttaaagtatcttcatggacagaaaaagaaagggaaagatggatcaatacttccacctcagttggctttgtttgcgatagctactccacttcagccaccatccatacttgaaatccggaccaaaaattttatctttagaaccaaacacaaactagacttcacacctattggttgtgatgccaaaggaagaattgttttaggatatactgaagcagagctgtgcacgagaggctcaggttatcagtttattcatgcagctgatatgctttattgtgccgagtcccatatccgaatgattaagactggagaaagtggcatgatagttttccggcttcttacaaaaaacaaccgatggacttgggtccagtctaatgcacgcctgctttataaaaatggaagaccagattatatcattgtaactcagagaccactaacagatgaggaaggaacagagcatttacgaaaacgaaatacgaagttgccttttatgtttaccactggagaagctgtgttgtatgaggcaaccaacccttttcctgccataatggatcccttaccactaaggactaaaaatggcactagtggaaaagactctgctaccacatccactctaagcaaggactctctcaatcctagttccctcctggctgccatgatgcaacaagatgagtctatttatctctatcctgcttcaagtacttcaagtactgcaccttttgaaaacaactttttcaacgaatctatgaatgaatgcagaaattggcaagataatactgcaccgatgggaaatgatactatcctgaaacatgagcaaattgaccagcctcaggatgtgaactcatttgctggaggtcacccagggctctttcaagatagtaaaaacagtgacttgtacagcataatgaaaaacctaggcattgattttgaagacatcagacacatgcagaatgaaaaatttttcagaaatgatttttctggtgaggttgacttcagagacattgacttaacggatgaaatcctgacgtatgtccaagattctttaagtaagtctcccttcataccttcagattatcaacagcaacagtccttggctctgaactcaagctgtatggtacaggaacacctacatctagaacagcaacagcaacatcaccaaaagcaagtagtagtggagccacagcaacagctgtgtcagaagatgaagcacatgcaagttaatggcatgtttgaaaattggaactctaaccaattcgtgcctttcaattgtccacagcaagacccacaacaatataatgtctttacagacttacatgggatcagtcaagagttcccctacaaatctgaaatggattctatgccttatacacagaactttatttcctgtaatcagcctgtattaccacaacattccaaatgtacagagctggactaccctatggggagttttgaaccatccccataccccactacttctagtttagaagattttgtcacttgtttacaacttcctgaaaaccaaaagcatggattaaatccacagtcagccataataactcctcagacatgttatgctggggccgtgtcgatgtatcagtgccagccagaacctcagcacacccacgtgggtcagatgcagtacaatccagtactgccaggccaacaggcatttttaaacaagtttcagaatggagttttaaatgaaacatatccagctgaattaaataacataaataacactcagactaccacacatcttcagccacttcatcatccgtcagaagccagaccttttcctgatttgacatccagtggattcctg

SEQ ID NO: 5218 - DNA, 2271 bp, Homo sapiens
  source 1..2271: mol_type = genomic DNA
atggcagcccctgacctggcccacggaggtcatgtttctagggactcagtctgccttcatgaagaacagacacaggcagcagggatggtggctggctggctgataaattgttaccaggacgcggtgacctttgacgacgtggctgtggacttcacccaggaggaatggactttactggacccatctcagagagacctctacagagatgtgatgctggaaaactacgagaacctggcctcagtaggacatcacctgttccaacccagtgtgatctattggctggagcaggaagaggagttgagggcagggcggagagcagttctccaagaatggcgacttaaaaccaaagggccagcacttcggcaggatagatcttggttcagagcatcaaatgagacacagacggcaagaagccacaatggagggcagctctgtgaccgcacgcagtgtggagaagctttcagtgaacactcaggcctcagcacacacgtgagaactcaaaatacaggagacagttgtgtgtctaatcattatgaaagggacttttttattccatgccagaaaaccttgttcaaaattggagagcagttttccgtgttgggtcagtgtggaaaagccttcagctctactccaaatgttgtttcccagcaagcatgcactcgggacagatctcttgactacagcagctgtggggaagtgttccttaatcagtcataccttcaggcacgtgcgggaagtcacaacggagaagaaacatggaaatggaagccgtgtgggaaagctctaactcactccatgggctgcgccacacctgttgaaatgcatgccgtcaggaatccccacgtatgtagggaatgtgggaaggcctttaggtacactgcctaccttactggtcgcgtgcaagtccaccctggggaaaagccctgtgaattggaagaatgtggaaaagcctcccctgtttcttccagcctaactcaacatgtaagaattcatgctgcagagaaaccctgtgaatgtaaagaatgcggaaaagccttcactggactctcaggtctttctaaacacgtccaaacagaccctggacagaagccctatgaatgtaaggactgtgggaaagcctgcggtgggttttatctactgaatgagcatggaaaaactcacacgagggagaagccctttgcatgtgtggtttgcggaaaatattttagaaattcctcatgccttaataatcatgttcgaattcacactggaataaaaccctatacatgcagctactgtgggaaggccttcactgtgcgctgtggccttactagacacgtacgaacacacacgggcgagaagccatacacgtgtaaggactgcgggaaagccttctgtacatcctcgggccttactgagcatgtaaggactcacactggagagaaaccatatgaatgtaaagattgtgggaaatccttcactgtttcttcaagcctgactgagcacgcgagaatccataccggagagaaaccctacgaatgtaagcagtgtggcaaagccttcacagggcgctcaggcctcactaaacacatgcggacacacaccggggagaagccctatgaatgtaaggactgtgggaaagcctacaatagggtttatctactgaatgagcatgtgaaaactcacacagaggagaagccctttatatgtacggtatgcaggaaatccttcagaaattcctcgtgcctgaataagcacattcagattcacactggaataaaaccttatgaatgtaaggactgtgggaaaacattcactgtttcttcgagcctaaccgagcacatacgaactcacactggagagaaaccttatgaatgtaaagtatgcggaaaggccttcaccacatcctcacaccttatcgtgcacataagaacccacaccggtgagaaaccctacatatgtaaggagtgtgggaaagcctttgcttcctcctcacaccttatcgaacacagaaggactcacacaggagagaaaccttacatatgtaacgagtgtgggaaagccttccgtgcctcctctcacctgcataaacatggaagaattcacactgggcagaaaccctataaatgtaaggaatgtgggaaagcatacaataggttttatctactaaaagaacatttaaaaacttacactgaagagcaggtttttgtatgtaaggactgtggaaaatcttttaagaattcctcatgccttaaccatcacactcaaattcacactgatgagaaacctttc

SEQ ID NO: 5219 - DNA, 2061 bp, Homo sapiens
  source 1..2061: mol_type = genomic DNA
atgctggaaaactacgagaacctggcctcagtaggacatcacctgttccaacccagtgtgatctattggctggagcaggaagaggagttgagggcagggcggagagcagttctccaagaatggcgacttaaaaccaaagggccagcacttcggcaggatagatcttggttcagagcatcaaatgagacacagacggcaagaagccacaatggagggcagctctgtgaccgcacgcagtgtggagaagctttcagtgaacactcaggcctcagcacacacgtgagaactcaaaatacaggagacagttgtgtgtctaatcattatgaaagggacttttttattccatgccagaaaaccttgttcaaaattggagagcagttttccgtgttgggtcagtgtggaaaagccttcagctctactccaaatgttgtttcccagcaagcatgcactcgggacagatctcttgactacagcagctgtggggaagtgttccttaatcagtcataccttcaggcacgtgcgggaagtcacaacggagaagaaacatggaaatggaagccgtgtgggaaagctctaactcactccatgggctgcgccacacctgttgaaatgcatgccgtcaggaatccccacgtatgtagggaatgtgggaaggcctttaggtacactgcctaccttactggtcgcgtgcaagtccaccctggggaaaagccctgtgaattggaagaatgtggaaaagcctcccctgtttcttccagcctaactcaacatgtaagaattcatgctgcagagaaaccctgtgaatgtaaagaatgcggaaaagccttcactggactctcaggtctttctaaacacgtccaaacagaccctggacagaagccctatgaatgtaaggactgtgggaaagcctgcggtgggttttatctactgaatgagcatggaaaaactcacacgagggagaagccctttgcatgtgtggtttgcggaaaatattttagaaattcctcatgccttaataatcatgttcgaattcacactggaataaaaccctatacatgcagctactgtgggaaggccttcactgtgcgctgtggccttactagacacgtacgaacacacacgggcgagaagccatacacgtgtaaggactgcgggaaagccttctgtacatcctcgggccttactgagcatgtaaggactcacactggagagaaaccatatgaatgtaaagattgtgggaaatccttcactgtttcttcaagcctgactgagcacgcgagaatccataccggagagaaaccctacgaatgtaagcagtgtggcaaagccttcacagggcgctcaggcctcactaaacacatgcggacacacaccggggagaagccctatgaatgtaaggactgtgggaaagcctacaatagggtttatctactgaatgagcatgtgaaaactcacacagaggagaagccctttatatgtacggtatgcaggaaatccttcagaaattcctcgtgcctgaataagcacattcagattcacactggaataaaaccttatgaatgtaaggactgtgggaaaacattcactgtttcttcgagcctaaccgagcacatacgaactcacactggagagaaaccttatgaatgtaaagtatgcggaaaggccttcaccacatcctcacaccttatcgtgcacataagaacccacaccggtgagaaaccctacatatgtaaggagtgtgggaaagcctttgcttcctcctcacaccttatcgaacacagaaggactcacacaggagagaaaccttacatatgtaacgagtgtgggaaagccttccgtgcctcctctcacctgcataaacatggaagaattcacactgggcagaaaccctataaatgtaaggaatgtgggaaagcatacaataggttttatctactaaaagaacatttaaaaacttacactgaagagcaggtttttgtatgtaaggactgtggaaaatcttttaagaattcctcatgccttaaccatcacactcaaattcacactgatgagaaacctttc

SEQ ID NO: 5220 - DNA, 2187 bp, Homo sapiens
  source 1..2187: mol_type = genomic DNA
atggcagcccctgacctggcccacggaggtcatgtttctagggactcagtctgccttcatgaagaacagacacaggcagcagggatggtggctggctggctgataaattgttaccaggacgcggtgacctttgacgacgtggctgtggacttcacccaggaggaatggactttactggacccatctcagagagacctctacagagatgtgatgctggaaaactacgagaacctggcctcagtagaatggcgacttaaaaccaaagggccagcacttcggcaggatagatcttggttcagagcatcaaatgagacacagacggcaagaagccacaatggagggcagctctgtgaccgcacgcagtgtggagaagctttcagtgaacactcaggcctcagcacacacgtgagaactcaaaatacaggagacagttgtgtgtctaatcattatgaaagggacttttttattccatgccagaaaaccttgttcaaaattggagagcagttttccgtgttgggtcagtgtggaaaagccttcagctctactccaaatgttgtttcccagcaagcatgcactcgggacagatctcttgactacagcagctgtggggaagtgttccttaatcagtcataccttcaggcacgtgcgggaagtcacaacggagaagaaacatggaaatggaagccgtgtgggaaagctctaactcactccatgggctgcgccacacctgttgaaatgcatgccgtcaggaatccccacgtatgtagggaatgtgggaaggcctttaggtacactgcctaccttactggtcgcgtgcaagtccaccctggggaaaagccctgtgaattggaagaatgtggaaaagcctcccctgtttcttccagcctaactcaacatgtaagaattcatgctgcagagaaaccctgtgaatgtaaagaatgcggaaaagccttcactggactctcaggtctttctaaacacgtccaaacagaccctggacagaagccctatgaatgtaaggactgtgggaaagcctgcggtgggttttatctactgaatgagcatggaaaaactcacacgagggagaagccctttgcatgtgtggtttgcggaaaatattttagaaattcctcatgccttaataatcatgttcgaattcacactggaataaaaccctatacatgcagctactgtgggaaggccttcactgtgcgctgtggccttactagacacgtacgaacacacacgggcgagaagccatacacgtgtaaggactgcgggaaagccttctgtacatcctcgggccttactgagcatgtaaggactcacactggagagaaaccatatgaatgtaaagattgtgggaaatccttcactgtttcttcaagcctgactgagcacgcgagaatccataccggagagaaaccctacgaatgtaagcagtgtggcaaagccttcacagggcgctcaggcctcactaaacacatgcggacacacaccggggagaagccctatgaatgtaaggactgtgggaaagcctacaatagggtttatctactgaatgagcatgtgaaaactcacacagaggagaagccctttatatgtacggtatgcaggaaatccttcagaaattcctcgtgcctgaataagcacattcagattcacactggaataaaaccttatgaatgtaaggactgtgggaaaacattcactgtttcttcgagcctaaccgagcacatacgaactcacactggagagaaaccttatgaatgtaaagtatgcggaaaggccttcaccacatcctcacaccttatcgtgcacataagaacccacaccggtgagaaaccctacatatgtaaggagtgtgggaaagcctttgcttcctcctcacaccttatcgaacacagaaggactcacacaggagagaaaccttacatatgtaacgagtgtgggaaagccttccgtgcctcctctcacctgcataaacatggaagaattcacactgggcagaaaccctataaatgtaaggaatgtgggaaagcatacaataggttttatctactaaaagaacatttaaaaacttacactgaagagcaggtttttgtatgtaaggactgtggaaaatcttttaagaattcctcatgccttaaccatcacactcaaattcacactgatgagaaacctttc

SEQ ID NO: 5221 - DNA, 2469 bp, Homo sapiens
  source 1..2469: mol_type = genomic DNA
atggcggcctcggaggcggcggcggcggcggggtccgcggctctggcggcgggtgcccgggccgtcccggcggccacgacaggagccgccgccgccgcctcgggcccgtgggtgcccccgggaccccgactgaggggcagccggccgcggcccgcgggggcgacgcagcagcccgctgtccccgcgccgccggcgggggagctgatccagccgtcggtgagcgagctgtcccgggccgtgcggaccaacatcctgtgcaccgtgcgcggctgcggcaagatcctgcccaacagccccgcgctcaacatgcacctagtcaagagccaccgcctgcaggatggcatagtcaatccaacaataagaaaagatttgaaaactggaccgaaattctactgctgtccaattgaaggctgccccagaggccctgagagaccgttttctcagttttctctcgtaaaacagcactttatgaaaatgcatgctgagaagaagcacaaatgtagtaagtgcagcaattcgtacggtacagaatgggacctgaaaagacatgcagaggactgtggcaagaccttccggtgcacatgcggctgtccctacgccagtagaacagcactgcagtctcacatctaccgaactgggcacgagatacctgcagaacacagggacccacctagtaagaaaaggaaaatggaaaactgtgcacaaaaccagaagttatccaacaagaccattgaatcattgaacaaccaaccaatccctagaccagacactcaagaactagaagcttcagaaataaagctagaaccatcttttgaagactcttgtggctctaacactgacaagcagactcttacaacaccaccgagatatcctcagaagttgcttttaccaaagcccaaagtggctttggttaaactacccgtgatgcagttttctgtcatgcctgtctttgtgcctacagccgactcctcagcccagcctgtggtgttaggtgttgatcagggctctgccacaggggctgtgcacttaatgcccttgtcagtaggaaccctgatcctcggcctagattcagaggcttgctctcttaaggagagcctacctcttttcaaaattgctaatcctattgctggtgagccaataagtactggtgttcaagtgaactttggtaaaagtccatctaatcctttacaagaactagggaacacgtgtcaaaagaatagcatttcttcaatcaacgtgcagacagatctgtcttatgcctcacaaaactttataccttctgcacagtgggccactgctgattcctctgtgtcgtcttgttctcaaactgatttgtcgtttgattctcaagtgtctcttcccattagtgttcacactcagacatttttgcccagctctaaggtaacttcatctatagctgctcagactgatgcatttatggacacctgtttccagtcaggtggggtctccagagaaactcaaaccagtgggatagaaagtccaacggatgaccatgtacagatggaccaagctggaatgtgcggagacatttttgagagtgttcattcatcatataatgttgctacaggtaacattataagcaacagtttagtagcagagacagtaactcatagtttgttacctcagaatgagcctaagactttaaatcaagatattgagaaatctgcaccaattataaatttcagtgcacagaatagtatgcttccttcacagaacatgacagataatcagacccaaaccatagatttattaagtgatttggaaaacatcttgtcaagtaatctgcctgctcagacattggatcatcgtagtcttttgtctgacacaaatcctggacctgacacccagctcccatctggcccagcccagaaccccggaatcgattttgatatcgaagagttcttttcggcctcaaatatccagactcaaactgaagagagtgaacttagcaccatgaccaccgagccagtcttggagtcactggacatagagactcaaacggacttcttactcgcagatacctctgctcagtcctatgggtgtaggggaaattctaacttcttaggccttgagatgtttgacacacagacacagacagacttaaactttttcttagacagtagccctcatctgcctctgggaagtattctgaaacactccagcttttccgtgagtactgattcatctgacacagagacccaaactgaaggagtctccactgctaaaaatatacctgctctagaaagcaaagttcagttgaacagtacagaaacacagaccatgagttctgggtttgaaaccctggggagcttgttcttcaccagcaacgaaactcagacagcaatggatgactttcttctggctgatctggcctggaacacgatggagtctcagttcagctctgtagaaacccagacttctgcggaaccacacacagtctccaacttc

SEQ ID NO: 5222 - DNA, 2493 bp, Homo sapiens
  source 1..2493: mol_type = genomic DNA
atggagaaccaacgctcatcacctctgtcgttccccagtgttccacaagaagaaaccttacgtcaggcccctgctggactcccccgagaaactctgttccaatcccgcgttcttcctcccaaagaaattccttctttgtctcccaccattccccgtcaaggctccctgccccaaacttccagtgctcccaagcaagagacttctggccggatgccacatgtgctccagaagggaccctcactcctgtgttctgccgcttctgagcaagagacttctctccagggccccctggcttcccaggaagggacccagtatccacccccagctgctgctgaacaagaagtctcccttctctcccactccccccaccaccaggaagcccccgttcactcccctgaagctcctgagaaagaccccctgaccctttccccaacagttcccgagactgacatggacccgctgctccagagcccggtttcccaaaaggacacccctttccagatctcttctgcagtccagaaggaacagccgctccccacggcagagatcacccgcttggctgtgtgggctgccgtccaagcagtggagaggaagctggaggcccaggccatgaggctactgaccctggaaggcaggacggggacaaatgaaaagaagatagccgactgcgagaagacagccgtggagttcgcgaaccatctggagagcaagtgggtcgtgttggggaccctgctgcaggagtatgggctgctgcagaggcggctggagaacatggagaacctgctgaaaaacagaaatttctggatcctgcggctgccccccggcagcaatggagaagttcccaaggtccctgtcacatttgatgatgttgctgtgcacttctcggagcaggagtggggaaacctgtctgagtggcagaaggagctctacaagaacgtgatgaggggcaactacgagtccctggtttccatggactatgcaatttccaaaccagacctcatgtcacagatggagcgcggggagcggcccaccatgcaggagcaggaagactctgaggagggcgaaacgccgacagatcccagtgctgcgcacgatgggatcgtgattaagatcgaggtacagaccaacgacgagggctcagaaagtttggagacacctgagcccctgatgggacaggtggaagagcacggcttccaggactcagagctgggtgacccctgtggggaacagccagacctggacatgcaggagccagagaacacgctggaggagtccacggaaggctccagcgagttcagcgaactgaagcagatgctggtgcagcagaggaactgcacggaggggatcgtgatcaagacagaggaacaagacgaggaggaagaagaggaggaggaggatgagctgccgcagcacttgcaatcccttgggcagctgtccgggagatatgaggccagtatgtaccagaccccgctgcccggggagatgtcccccgagggcgaggagagccccccgcccctgcagctaggaaaccccgcagtgaaaaggctggcgccctccgtgcacggtgagcggcacctgagcgagaaccgcggggcctcgagccagcagcagcggaaccggcgcggcgagcggcccttcacatgcatggagtgcggcaagagcttccgcctgaagatcaacctcatcatccaccagcgcaaccacatcaaggaggggccctacgagtgcgccgaatgcgagatcagcttccggcacaagcaacagctcacgctgcaccagcgcatccaccgcgtgcgcggaggctgcgtctcacccgaacgcgggcccacgttcaaccccaagcacgcgctcaagccgcgtcccaagtcacccagctctggtagcggcggcggtggccctaagccctacaagtgccccgagtgcgacagcagcttcagccacaagtccagcctgaccaaacaccagatcacgcacacgggtgagcggccctacacgtgccccgagtgcaagaagagcttccgcctgcacatcagcttggtgatccatcagcgcgtgcacgcgggcaagcatgaggtctccttcatctgcagcctgtgcggcaagagcttcagccgcccctcgcacctgctgcgccaccagcggactcacacaggcgagcggcccttcaagtgccccgagtgcgagaagagcttcagcgagaagtccaagctcaccaaccactgccgcgtgcactcgcgcgagcggccgcacgcctgccccgagtgcggcaagagcttcatccgcaagcaccacctcctggaacaccggcgcatccacacaggcgagcggccctaccactgcgccgagtgcggcaagcgcttcacgcagaagcatcacctgctggagcaccagcgcgcgcacacgggcgagcggccctacccctgcacgcactgcgccaagtgcttccgctacaagcagtcgctcaagtaccacctgcggacccacacgggcgag

SEQ ID NO: 5223 - DNA, 1449 bp, Homo sapiens
  source 1..1449: mol_type = genomic DNA
atgtggctggggacttcagggaagagtgggttacctggacactgcttagagaatcctctccaggaatgccacccagcacagttagaagaatgggctctcaaaggaatttccaggcctagtgtaatctcccagccggagcagaaagaagagccatgggtcctaccactccaaaactttgaggcgaggaagatcccgagggaaagccacacagactgtgagcatcaggtggcaaagctcaatcaggacaattctgaaacagcagaacaatgtggaacatcctcagaaaggaccaataaagatctttctcatactcttagttggggaggaaactgggagcaaggcctagaattagaagggcaacatggaacccttccaggagagggccagctggagtccttttcacaggagagggatttaaacaagctcctggatggatatgtaggagagaagcctatgtgtgcagaatgcgggaaaagctttaaccagagttcctatctcataagacacctaagaacccacactggcgagaggccctatacgtgcattgagtgtgggaaaggcttcaaacagagctcagaccttgtcacccatcgcagaacacacacaggagagaagccctaccaatgcaaggggtgtgagaagaaattcagcgacagctcaacactcatcaaacatcagagaacccacacaggggagagaccctatgagtgcccagagtgtggaaagacttttgggcggaagccacacctcataatgcaccaaagaacccacacaggcgagaagccctacgcgtgcctggaatgtcacaaaagcttcagtcgaagctcaaatttcatcactcaccagaggacccacacaggggtgaagccttacaggtgtaatgactgtggggagagttttagccagagctcggatttgattaagcaccaacgaacccacacgggagaacggcccttcaaatgcccggagtgcgggaagggcttcagagatagttctcattttgtagctcacatgagcactcattcaggagagaggcctttcagttgtcctgactgccacaaaagcttcagtcagagctcacatttggtcacgcaccaaagaacacacacaggtgagagaccttttaagtgcgaaaactgtgggaaaggattcgccgacagctccgccctcattaagcaccaacgaatccacaccggagaaagaccctacaaatgtggagagtgtgggaagagcttcaatcagagctcccactttattacccatcagcgaatccacttaggagacaggccctatcgatgtcctgagtgtggcaagaccttcaatcagcgttcccatttcctcacacaccagagaacgcatacaggagaaaaacctttccactgtagtaaatgtaacaagagcttccgtcagaaagcgcatcttttatgccatcaaaacacccatttgatt

SEQ ID NO: 5224 - DNA, 1611 bp, Homo sapiens
  source 1..1611: mol_type = genomic DNA
atggagagtggcctggctggcaacggcacaggagctgggctggtgatgaaggtcaagcaggagaagccggagcggctgctgcagacgctggcgccgcaggccatgcttgtggagaaggacaaggagaacatatttcagcagcaccggggcctcccgccacgccagaccatggggcggcctcgagccctggggggacaggaggagtctgggagtccaaggtgggcccctcccactgagcaggatgcggggctggcaggccgggctcccgggtcagcctccggccccctgagcccctcgctttcctccggcgagggtcactttgtatgcctggactgcgggaagaggttcagctggtggtcgtccctgaagatccaccagcgcacccacaccggggagaagccgtacctctgcggcaagtgcggcaagagcttcagccagaagccgaacctggcgcgccaccagcggcaccacacgggcgagcgacccttctgctgccccgagtgcgcgcggcgcttcagccagaagcagcacctgctcaagcaccagaagacccactcccggcccgccacccactcgtgccccgagtgcgagcgctgcttccgtcaccaggtgggcctccgcatccaccagcgcgcgcacgcccgggaccgccagggctcccgcgccggcctgcacgagctgattcaggacgcggcggcgcgccgggcctgtcgcctgcagccggggccgccgcgggggcgccccgagtgggcctggctggggctctgccagggctggtggggccagcccggggcccgggccgcggtctccggccccgaggggccgggcgagccgcgccagttcatctgcaacgagtgtggcaagagcttcacctggtggtcgtcgctgaacatccaccagcgcatccacactggcgagcgcccctatgcgtgccccgagtgcggccgccgcttcagccagaagcccaacttgacgcggcacctgcgcaaccacacaggcgagcgcccgcacccctgcccgcactgtggccgcggcttccgccagaagcagcacctgctcaagcacctgcgcacgcacctgcccggcgcccaggctgcgccctgccccagctgcggtaagagctgccgcagccgcgccgcgctgcgcgcccaccagcgcgcccacgctgtcgctgagcccgccgttccggccggggaaccgggcgaccagccgcaggccgaggccatcccgggcttggccgcgaggccgcggagctcccaacggtccccgggggcccgggacacgctgtggggccggggacaagcgggcctcgctgggcctggcgagccgcgccagttcatctgcaacgagtgcggcaagagcttctcgtggtggtcggcgctcaccatccaccagcgcatccacacgggtgagcggccctacccgtgccccgagtgcggccgccgcttcagccagaagcccaacctgacgcggcaccggcgcaaccacacaggcgagcggccctacctgtgtcccgcctgcggccgcggcttcagccagaagcagcacctgctcaagcaccagcgcgtgcaccgcgcggcccctgcgtgcagccccaaggaggaggcgcgc

SEQ ID NO: 5225 - DNA, 1344 bp, Homo sapiens
  source 1..1344: mol_type = genomic DNA
atggcggcggctgagccgatgggcccggcacaggttcccatgaactcagaagtaattgtggaccctatacaggggcaggtgaactttgaggacgtgttcgtgtacttctcccaggaggagtgggtgctccttgatgaggctcagaggctcctgtaccgtgatgtgatgctggagaactttgcacttatggcctctctgggttgttggcatggaatggaggatgaagagataccttttgagcagagcttttctataggaatgtcacagatcaggattcccaagggaggtccttctactcagaaggcttacccctgtgggacatgtggcctggtcttaaaagacattttgcacttggctgagcaccaggaaacacacccagggcagaaaccatacatgtgtgtgctgtgtgggaaacagttctgcttcagtgcaaaccttcaccagcaccagaagcagcacagtggagagaaaccctttagaagtgataagagcaggccctttcttctgaacaactgtgctgtgcaatcaatggagatgtcttttgtgacaggggaggcttgtaaggacttcctagccagctcaagcattttcgagcaccatgcccctcacaatgagtggaagccacacagcaacaccaagtgtgaggaggcctctcactgtggaaaaaggcattacaaatgcagtgaatgtgggaaaaccttcagccgcaaagactcacttgttcaacaccagagagtccacactggagaaaggccttatgagtgcggtgaatgtgggaaaacctttagccgcaaacccatacttgctcagcaccagagaatccacactggagaaatgccttatgagtgtggcatatgtgggaaagtttttaatcatagctctaaccttattgtacatcaaagagtacacactggagcaaggccttacaagtgcagtgaatgtgggaaagcctatagtcacaaatctacacttgttcagcatgagagtatccatactggagaaaggccatatgagtgcagcgaatgtggaaaatactttggtcacaaatacagactcattaaacattggagtgttcatactggagcaaggccttatgagtgcatcgcatgtgggaagttctttagccaaagctctgaccttattgcacatcaaagagttcataatggtgaaaagccttatgtgtgcagtgaatgtggaaaagcctttagccacaaacatgtacttgttcagcatcatagaattcacactggagaaaggccatataagtgcagtgaatgtgggaaggccttcaggcagagggcttccctcatccgccactggaaaattcacactggagaaaggcct

SEQ ID NO: 5226 - DNA, 1467 bp, Homo sapiens
  source 1..1467: mol_type = genomic DNA
atggcggcggctgagccgatgggcccggcacaggttcccatgaactcagaagtaattgtggaccctatacaggggcaggtgaactttgaggacgtgttcgtgtacttctcccaggaggagtgggtgctccttgatgaggctcagaggctcctgtaccgtgatgtgatgctggagaactttgcacttatggcctctctgggacatacatctttcatgtcccacatagttgcctcactggtgatgggtagtgagccctgggtacctgactgggtggacatgaccctagctgttgccacagagactccaggtgggagtgaccctggttgttggcatggaatggaggatgaagagataccttttgagcagagcttttctataggaatgtcacagatcaggattcccaagggaggtccttctactcagaaggcttacccctgtgggacatgtggcctggtcttaaaagacattttgcacttggctgagcaccaggaaacacacccagggcagaaaccatacatgtgtgtgctgtgtgggaaacagttctgcttcagtgcaaaccttcaccagcaccagaagcagcacagtggagagaaaccctttagaagtgataagagcaggccctttcttctgaacaactgtgctgtgcaatcaatggagatgtcttttgtgacaggggaggcttgtaaggacttcctagccagctcaagcattttcgagcaccatgcccctcacaatgagtggaagccacacagcaacaccaagtgtgaggaggcctctcactgtggaaaaaggcattacaaatgcagtgaatgtgggaaaaccttcagccgcaaagactcacttgttcaacaccagagagtccacactggagaaaggccttatgagtgcggtgaatgtgggaaaacctttagccgcaaacccatacttgctcagcaccagagaatccacactggagaaatgccttatgagtgtggcatatgtgggaaagtttttaatcatagctctaaccttattgtacatcaaagagtacacactggagcaaggccttacaagtgcagtgaatgtgggaaagcctatagtcacaaatctacacttgttcagcatgagagtatccatactggagaaaggccatatgagtgcagcgaatgtggaaaatactttggtcacaaatacagactcattaaacattggagtgttcatactggagcaaggccttatgagtgcatcgcatgtgggaagttctttagccaaagctctgaccttattgcacatcaaagagttcataatggtgaaaagccttatgtgtgcagtgaatgtggaaaagcctttagccacaaacatgtacttgttcagcatcatagaattcacactggagaaaggccatataagtgcagtgaatgtgggaaggccttcaggcagagggcttccctcatccgccactggaaaattcacactggagaaaggcct

SEQ ID NO: 5227 - DNA, 1131 bp, Homo sapiens
  source 1..1131: mol_type = genomic DNA
atggaggatgaagagataccttttgagcagagcttttctataggaatgtcacagatcaggattcccaagggaggtccttctactcagaaggcttacccctgtgggacatgtggcctggtcttaaaagacattttgcacttggctgagcaccaggaaacacacccagggcagaaaccatacatgtgtgtgctgtgtgggaaacagttctgcttcagtgcaaaccttcaccagcaccagaagcagcacagtggagagaaaccctttagaagtgataagagcaggccctttcttctgaacaactgtgctgtgcaatcaatggagatgtcttttgtgacaggggaggcttgtaaggacttcctagccagctcaagcattttcgagcaccatgcccctcacaatgagtggaagccacacagcaacaccaagtgtgaggaggcctctcactgtggaaaaaggcattacaaatgcagtgaatgtgggaaaaccttcagccgcaaagactcacttgttcaacaccagagagtccacactggagaaaggccttatgagtgcggtgaatgtgggaaaacctttagccgcaaacccatacttgctcagcaccagagaatccacactggagaaatgccttatgagtgtggcatatgtgggaaagtttttaatcatagctctaaccttattgtacatcaaagagtacacactggagcaaggccttacaagtgcagtgaatgtgggaaagcctatagtcacaaatctacacttgttcagcatgagagtatccatactggagaaaggccatatgagtgcagcgaatgtggaaaatactttggtcacaaatacagactcattaaacattggagtgttcatactggagcaaggccttatgagtgcatcgcatgtgggaagttctttagccaaagctctgaccttattgcacatcaaagagttcataatggtgaaaagccttatgtgtgcagtgaatgtggaaaagcctttagccacaaacatgtacttgttcagcatcatagaattcacactggagaaaggccatataagtgcagtgaatgtgggaaggccttcaggcagagggcttccctcatccgccactggaaaattcacactggagaaaggcct

SEQ ID NO: 5228 - DNA, 1326 bp, Homo sapiens
  source 1..1326: mol_type = genomic DNA
atggcggcggccacgctgagggaccccgctcagcagggctatgtgacctttgaggacgtggctgtctacttctcccaggaggaatggagattgcttgatgacgctcagaggctcctctaccgcaatgtgatgctggagaactttacacttctggcctctctgggacttgcatcttccaagacccatgaaataacccagctggagtcatgggaggagcccttcatgcctgcttgggaagttgtgacttcagccatactgagaggtagttggcaaggagccaaggctgaggcagctgctgagcagagtgcttctgtagaagtgcccagttcaaacgttcagcaacaccagaagcagcactgtggagagaaacccttaaaaagacaagagggcagggtcccagttttgaggagttgcagagtccacctatcagagaagtccttgcaaagcagggaagttgggaaggatcttctgaccagctcaggtgttctcaagcaccaggtgactcacacgggagagaagtcacataggagctccaaaagtagggaggcctttcatgctggaaaaaggcattacaaatgcagtgaatgtgggaaagcctttggtcagaaatatttacttgttcagcaccagagactgcacactggggaaaagccttatgaatgcagtgaatgtgggaagttatttagccataagtccaacctttttatacaccaaatagttcacactggagaaaggccttatgggtgtagtgactgtggaaaatcctttagccgtaatgctgacctcattcaacaccagagagttcacactggagaaaagccttttacatgcagtgaatgtggaaaagctttcaggcataattccacacttgttcagcatcacagaatccacactggagtaaggccttatgagtgcagtgaatgtggaaaattgtttagtttcaactccagcctcatgaaacatcagagagttcacactggagaaagaccttataagtgcagtgaatgtggaaaattctatagccacaagtccagccttatcaatcattggcgtgttcacactggagaaaggccttatgagtgcagtgaatgtgggaaattttttagccaaagctcaagcctcatgcaacatcgaaaagttcacactggagaaaaaccttttaagtgcaatgaatgtgggagattctttagtgagaattccagccttgttaaacatcagagggttcacactggagcaaagccttatgagtgcagggaatgtgggaaattttttcgccacagctccagtcttgttaaacatcgaaggattcacactggagaaatacaa

SEQ ID NO: 5229 - DNA, 1323 bp, Homo sapiens
  source 1..1323: mol_type = genomic DNA
atggcggcggccacgctgagggaccccgctcagggctatgtgacctttgaggacgtggctgtctacttctcccaggaggaatggagattgcttgatgacgctcagaggctcctctaccgcaatgtgatgctggagaactttacacttctggcctctctgggacttgcatcttccaagacccatgaaataacccagctggagtcatgggaggagcccttcatgcctgcttgggaagttgtgacttcagccatactgagaggtagttggcaaggagccaaggctgaggcagctgctgagcagagtgcttctgtagaagtgcccagttcaaacgttcagcaacaccagaagcagcactgtggagagaaacccttaaaaagacaagagggcagggtcccagttttgaggagttgcagagtccacctatcagagaagtccttgcaaagcagggaagttgggaaggatcttctgaccagctcaggtgttctcaagcaccaggtgactcacacgggagagaagtcacataggagctccaaaagtagggaggcctttcatgctggaaaaaggcattacaaatgcagtgaatgtgggaaagcctttggtcagaaatatttacttgttcagcaccagagactgcacactggggaaaagccttatgaatgcagtgaatgtgggaagttatttagccataagtccaacctttttatacaccaaatagttcacactggagaaaggccttatgggtgtagtgactgtggaaaatcctttagccgtaatgctgacctcattcaacaccagagagttcacactggagaaaagccttttacatgcagtgaatgtggaaaagctttcaggcataattccacacttgttcagcatcacagaatccacactggagtaaggccttatgagtgcagtgaatgtggaaaattgtttagtttcaactccagcctcatgaaacatcagagagttcacactggagaaagaccttataagtgcagtgaatgtggaaaattctatagccacaagtccagccttatcaatcattggcgtgttcacactggagaaaggccttatgagtgcagtgaatgtgggaaattttttagccaaagctcaagcctcatgcaacatcgaaaagttcacactggagaaaaaccttttaagtgcaatgaatgtgggagattctttagtgagaattccagccttgttaaacatcagagggttcacactggagcaaagccttatgagtgcagggaatgtgggaaattttttcgccacagctccagtcttgttaaacatcgaaggattcacactggagaaatacaa

SEQ ID NO: 5230 - DNA, 303 bp, Homo sapiens
  source 1..303: mol_type = genomic DNA
atggcggcggccacgctgagggaccccgctcagggctatgtgacctttgaggacgtggctgtctacttctcccaggaggaatggagattgcttgatgacgctcagaggctcctctaccgcaatgtgatgctggagaactttacacttctggcctctctgggacttgcatcttccaagacccatgaaataacccagctggagtcatgggaggagcccttcatgcctgcttgggaagttgtgacttcagccatactgagagtcccgaaccgacagccacaagtggcgcccgaacagggacgtgag

SEQ ID NO: 5231 - DNA, 1197 bp, Homo sapiens
  source 1..1197: mol_type = genomic DNA
atggcctttgtgaccagtggagaattggttcggcatcgtcgttacaaacacacccacgagaagccattcaagtgttccatgtgcgattacgccagtgtagaagtcagcaaattaaaacgtcacattcgctctcatactggagagcgtccgtttcagtgcagtttgtgcagttatgccagcagggacacatacaagctgaaaaggcacatgagaacccattcaggggaaaagccttatgaatgttatatttgtcatgctcggtttacccaaagtggtaccatgaagatgcacattttacagaagcacacagaaaatgtggccaaatttcactgtccccactgtgacacagtcatagcccgaaaaagtgatttgggtgtccacttgcgaaagcagcattcctatattgagcaaggcaagaaatgccgttactgtgatgctgtgtttcatgagcgctatgccctcatccagcatcagaagtcacacaagaatgagaagcgctttaagtgtgaccagtgtgattacgcttgtagacaggagaggcacatgatcatgcacaagcgcacccacaccggggagaagccttacgcctgcagccactgcgataagaccttccgccagaagcagcttctcgacatgcacttcaagcgctatcacgaccccaacttcgtccctgcggcttttgtctgttctaagtgtgggaaaacatttacacgtcggaataccatggcaagacatgctgataattgtgctggcccagatggcgtagagggggaaaatggaggagaaacgaagaagagtaaacgtggaagaaaaagaaagatgcgctctaagaaagaagattcctctgacagtgaaaatgctgaaccagatctggacgacaatgaggatgaggaggagcctgccgtagaaattgaacctgagccagagcctcagcctgtgaccccagccccaccacccgccaagaagcggagaggacgaccccctggcagaaccaaccagcccaaacagaaccagccaacagctatcattcaggttgaagaccagaatacaggtgcaattgagaacattatagttgaagtaaaaaaagagccagatgctgagcccgcagagggagaggaagaggaggcccagccagctgccacagatgcccccaacggagacctcacgcccgagatgatcctcagcatgatggaccgg

SEQ ID NO: 5232 - DNA, 951 bp, Homo sapiens
  source 1..951: mol_type = genomic DNA
atgcctggcgaacagcaggcagaggaagaggaggaggaagagatgcaggaggagatggtgctgctggtgaagggtgaggaggatgagggtgaggagaagtatgaggtggtgaaactcaagatccccatggacaacaaggaggtcccgggcgaggcgcccgcgccgtccgccgacccggcgcgtccccacgcgtgccccgactgcggccgcgccttcgcgcgccgctccacgctggcgaagcacgcgcgcacgcacacgggcgaacggcccttcgggtgcaccgagtgcgggcggcgcttctcacagaagtcggcgctgaccaaacacggccgcacgcacacgggcgagcggccctacgagtgccccgagtgcgacaaacgcttctcggccgcctcgaacctgcggcagcaccggcggcggcacacgggcgagaagccgtacgcatgcgcgcactgcggccgccgcttcgcgcagagctccaactacgcacagcacctgcgcgtgcacacgggcgagaagccgtacgcgtgcccggactgcggacgcgcctttggcggcagctcgtgcctggcgcgccaccgacgcacgcacacgggcgagcggccctacgcttgcgccgactgcggcacgcgcttcgctcagagctcggcgctggccaagcaccggcgcgtgcacacgggcgagaagccgcaccgctgcgctgtgtgtggccgtcgcttcggccaccgctccaacctggcggagcacgcgcgcacgcacacaggcgagcggccctacccctgcgccgagtgcggccgccgcttccgcctaagctcgcacttcattcgccaccgacgcgcgcacatgcggcgccgcctgtatatttgcgccggctgcggcagggacttcaagctgccccctggcgccacggccgccactgccaccgagcgttgcccggagtgtgagggcagc

SEQ ID NO: 5233 - DNA, 801 bp, Homo sapiens
  source 1..801: mol_type = genomic DNA
atgacaagagaaaatgtagcccacaatgctctgagacaagagggccttgtgaaggggaaggatgatacctggaaatggggaaccagcttccaaggaagtagctcctctgtttgggagacctcccacctacactttagacaattacgttaccatgagacatctggaccccaggaagccctgagccggctcagggaactctgtcgccggtggctgagaccagaagcacgcaccaaggcacagatcctggagctgctggtgctggagcagtttctgagcatcctgcctggggagattcggacctgggtacagctccatcaccctggaagtggcgaggaggctgtggccctggtagaggagctgcagaaagaccttgatggaccagcaatacaagttccagtccttgtcaaggatcaggacactctccagaaggtggtgagtgccccaggaacaacacttcctcctgtacttcctggcagccacatagcagctgaaatttgcccgcatcctcctactgacctagtggcattcaacctccaggatcctcagcatgattctcctgcccctgaagcttctgccctttcccaggaagagaacccaagaaatcaattaatggcacttatgctcctaacagcccagccccaggagttggtgatgttcgaggaggtgtcagtatgcttcacttcagaggaatgggcatgtctgggcccaatccagagggccttgtactgggatgtgatgctggagaattatggaaatgtgacctccctaggttacaggaaatacaggaggcagaggaacaaa

SEQ ID NO: 5234 - DNA, 3087 bp, Homo sapiens
  source 1..3087: mol_type = genomic DNA
atgacaagagaaaatgtagcccacaatgctctgagacaagagggccttgtgaaggggaaggatgatacctggaaatggggaaccagcttccaaggaagtagctcctctgtttgggagacctcccacctacactttagacaattacgttaccatgagacatctggaccccaggaagccctgagccggctcagggaactctgtcgccggtggctgagaccagaagcacgcaccaaggcacagatcctggagctgctggtgctggagcagtttctgagcatcctgcctggggagattcggacctgggtacagctccatcaccctggaagtggcgaggaggctgtggccctggtagaggagctgcagaaagaccttgatggaccagcaatacaagttccagtccttgtcaaggatcaggacactctccagaaggtggtgagtgccccaggaacaacacttcctcctgtacttcctggcagccacatagcagctgaaatttgcccgcatcctcctactgacctagtggcattcaacctccaggatcctcagcatgattctcctgcccctgaagcttctgccctttcccaggaagagaacccaagaaatcaattaatggcacttatgctcctaacagcccagccccaggagttggtgatgttcgaggaggtgtcagtatgcttcacttcagaggaatgggcatgtctgggcccaatccagagggccttgtactgggatgtgatgctggagaattatggaaatgtgacctccctagaatgggagaccatgaccgagaatgaggaggtgacatcaaagccaagtagttctcaaagagcagactctcataaaggaacatcaaaaagacttcaaggaagtgttccccaggtccttgattttgaagaagagtgtgaatggcaagttttggcaagtcagtggggaaatgaaacagatgaaagggcagatacagtgaagaaagtttccctttgtgaacgagacaagaagaaaaggactccaccagagaaacaaggccaaaagtggaaggaattaggagacagcttgactttcggttcagctatttctgaaagtttaataggtactgaaggaaagaagttttataaatgtgatatgtgttgtaaacattttaataaaatctcccatcttataaaccatcggagaatccacactggtgagaaacctcataaatgtaaggaatgtggaaaaggctttattcagcgttcgagccttctaatgcatttacggaaccattcaggggagaaaccttataaatgtaatgaatgtgggaaagcattttctcaaagtgcttaccttctaaaccatcagaggatccacactggggagaaaccttataagtgtaaggagtgtggaaagggcttctataggcactcaggcctaattatacatctaaggcgccattcaggggagagaccttataagtgtaatgaatgtgggaaagtcttctctcagaatgcttacctcattgaccatcagaggctccacaaaggggaagaaccttataaatgtaataagtgtcagaaagctttcattctgaagaagagcctcattctgcaccagagaatccactctggggaaaaaccctataaatgtgatgaatgtggaaagacctttgctcagaccacttatcttattgaccatcagcgactccacagtgcagagaacccttacaagtgtaaagaatgtggaaaagttttcattcgaagcaaaagcctcctcttacatcagagagtccacacagaaaagaaaacctttggttgtaaaaagtgtgggaagattttcagttctaagtcaaacttcattgaccataagaggatgcacagcagagagaaaccttacaaatgcactgaatgtgggaaagcctttactcaaagtgcttacctttttgaccaccagagactccacaatggggagaagccctatgaatgtaatgaatgtgggaaagtttttattctgaagaagagcctcattttacatcaaaggttccacactggagagaatctctatgaatgtaaagattgtggtaaggtcttcggttcaaacagaaacctcattgaccatgagagactccacaatggggagaagccatatgaatgtcgagagtgtgggaaaacctttattatgagcaaaagttttatggtccatcagaaactccatacacaagagaaagcctacaaatgtgaggattgtgggaaggctttcagttacaattcaagcctgcttgtacatcggagaatccacaccggagaaaaaccctttgaatgcagtgagtgtggaagagctttcagttcaaacagaaacctcattgagcataagagaatccacagtggtgagaaaccctatgagtgtgatgagtgtggcaaatgcttcattctgaagaaaagcctcattggacatcagagaattcacacgagggaaaaatcttataaatgcaatgactgtgggaaggtcttcagttaccgctcaaaccttatagcccatcagaggatccatactggtgagaagccctatgcgtgtagtgagtgtggaaaaggttttacgtacaacagaaacctgattgaacatcaaagaattcacagtggagaaaaaacctacgaatgtcatgtatgtaggaaagtccttacctctagtagaaatcttatggtacatcaaagaatccatactggagagaaaccttataaatgtaatgagtgtggaaaagactttagtcagaataaaaaccttgttgtacatcagagaatgcacactggggaaaaaccttatgagtgtgacaagtgtaggaaatcctttacttctaagaggaatttagttggccaccagagaattcacacaggggagaaaccctatgggtgtaatgattgtagtaaagtttttaggcaaagaaaaaaccttactgtacatcagaaaatccacacagatgaaaaaccttgtgaatgtgatgtgtctgaaaaagaattctctcagacttccaaccttcatcttcaacagaaaatccataccattgaggaattctcttggctacaaaacaccaatgagtccaagattgagattcagaaaatc

SEQ ID NO: 5235 - DNA, 1818 bp, Homo sapiens
  source 1..1818: mol_type = genomic DNA
atgactctgttgacgttcagggatgtggccatagaattctccctggaggagtggaaatgcctggacctcgctcagcagaatttgtacagggatgtgatgttggagaactacagaaacttgttctccgttggtctcactgtctgtaagccaggcctgatcacctgcctggagcaacgaaaagagccctggaatgtgaagagacaggaggcagcagacggacatccagagatgggatttcaccatgctactcaggcttgtcttgaactcctgggctcaagcgatctgcctgcctcagcctcccaaagtgctgggattacaggtgtgaaccaccgtgcccagccaggcctcaatgtttctgtggacaaattcactgctatgtcttctcattttacccaagaccttctgccagagcagggcatacaagatgcattcccaaaaagaatactgagaggatatggaaattgtggccttgataatttatatttaaggaaagactgggaaagtttagatgagtgtaagttgcaaaaagattataatggacttaaccaatgttcatcaactacccatagcaaaatctttcaatataataaatatgttaaaatctttgataacttttcaaatttacatagacgtaatataagtaatactggagagaaacctttcaaatgtcaagaatgtggcaaatcctttcaaatgctctcattcctaactgaacatcagaaaattcacactggaaaaaaattccaaaaatgtggagaatgtggcaaaacctttatccagtgctcacactttactgaacctgagaacattgacactggagagaaaccttacaagtgtcaagaatgtaacaacgtcattaaaacttgctcagtccttactaaaaatagaatttatgccggaggggaacattacagatgtgaagaatttggcaaagtatttaaccagtgctcccaccttactgaacatgagcatggtactgaggaaaaaccctgcaaatatgaagagtgcagcagtgtctttatctcttgctcaagcctttctaatcaacagatgattcttgctggagagaagctctccaaatgtgaaacatggtacaaaggttttaaccacagcccaaatccttccaaacaccagagaaatgagattggagggaaacctttcaaatgtgaggaatgtgacagcatcttcaagtggttctcagaccttactaaacataagagaattcacactggtgagaaaccatacaaatgtgacgaatgtgggaaagcctatacacagtcctcacacctcagtgaacacaggaggattcacaccggagagaaaccctaccaatgtgaagaatgtgggaaggtcttcagaacttgctcaagcctttctaaccataagagaactcattctgaagaaaaaccctacacgtgtgaagaatgtggcaacatctttaagcagttatcagacctcactaagcataagaaaacccatactggagagaagccctacaaatgtgacgaatgtggaaaaaactttacccagtcctccaaccttattgtacataagagaattcatactggagagaaaccctacaagtgtgaagaatgtggcagagtcttcatgtggttctcagacattaccaaacataagaaaacccatactggagagaaaccctacaaatgtgacgaatgtggaaaaaactttacccagtcctcaaaccttattgtacataagagaattcatactggagagaaaccctacaagtgtgaaaagtgtggcaaagccttcacccagttctcacacctgactgtacatgaaagcattcatact

SEQ ID NO: 5236 - DNA, 1671 bp, Homo sapiens
  source 1..1671: mol_type = genomic DNA
atgactctgttgacgttcagggatgtggccatagaattctccctggaggagtggaaatgcctggacctcgctcagcagaatttgtacagggatgtgatgttggagaactacagaaacttgttctccgttggtctcactgtctgtaagccaggcctgatcacctgcctggagcaacgaaaagagccctggaatgtgaagagacaggaggcagcagacggacatccagctatgtcttctcattttacccaagaccttctgccagagcagggcatacaagatgcattcccaaaaagaatactgagaggatatggaaattgtggccttgataatttatatttaaggaaagactgggaaagtttagatgagtgtaagttgcaaaaagattataatggacttaaccaatgttcatcaactacccatagcaaaatctttcaatataataaatatgttaaaatctttgataacttttcaaatttacatagacgtaatataagtaatactggagagaaacctttcaaatgtcaagaatgtggcaaatcctttcaaatgctctcattcctaactgaacatcagaaaattcacactggaaaaaaattccaaaaatgtggagaatgtggcaaaacctttatccagtgctcacactttactgaacctgagaacattgacactggagagaaaccttacaagtgtcaagaatgtaacaacgtcattaaaacttgctcagtccttactaaaaatagaatttatgccggaggggaacattacagatgtgaagaatttggcaaagtatttaaccagtgctcccaccttactgaacatgagcatggtactgaggaaaaaccctgcaaatatgaagagtgcagcagtgtctttatctcttgctcaagcctttctaatcaacagatgattcttgctggagagaagctctccaaatgtgaaacatggtacaaaggttttaaccacagcccaaatccttccaaacaccagagaaatgagattggagggaaacctttcaaatgtgaggaatgtgacagcatcttcaagtggttctcagaccttactaaacataagagaattcacactggtgagaaaccatacaaatgtgacgaatgtgggaaagcctatacacagtcctcacacctcagtgaacacaggaggattcacaccggagagaaaccctaccaatgtgaagaatgtgggaaggtcttcagaacttgctcaagcctttctaaccataagagaactcattctgaagaaaaaccctacacgtgtgaagaatgtggcaacatctttaagcagttatcagacctcactaagcataagaaaacccatactggagagaagccctacaaatgtgacgaatgtggaaaaaactttacccagtcctccaaccttattgtacataagagaattcatactggagagaaaccctacaagtgtgaagaatgtggcagagtcttcatgtggttctcagacattaccaaacataagaaaacccatactggagagaaaccctacaaatgtgacgaatgtggaaaaaactttacccagtcctcaaaccttattgtacataagagaattcatactggagagaaaccctacaagtgtgaaaagtgtggcaaagccttcacccagttctcacacctgactgtacatgaaagcattcatact

SEQ ID NO: 5237 - DNA, 1683 bp, Homo sapiens
  source 1..1683: mol_type = genomic DNA
atggctggtgctcagactctgttgacgttcagggatgtggccatagaattctccctggaggagtggaaatgcctggacctcgctcagcagaatttgtacagggatgtgatgttggagaactacagaaacttgttctccgttggtctcactgtctgtaagccaggcctgatcacctgcctggagcaacgaaaagagccctggaatgtgaagagacaggaggcagcagacggacatccagctatgtcttctcattttacccaagaccttctgccagagcagggcatacaagatgcattcccaaaaagaatactgagaggatatggaaattgtggccttgataatttatatttaaggaaagactgggaaagtttagatgagtgtaagttgcaaaaagattataatggacttaaccaatgttcatcaactacccatagcaaaatctttcaatataataaatatgttaaaatctttgataacttttcaaatttacatagacgtaatataagtaatactggagagaaacctttcaaatgtcaagaatgtggcaaatcctttcaaatgctctcattcctaactgaacatcagaaaattcacactggaaaaaaattccaaaaatgtggagaatgtggcaaaacctttatccagtgctcacactttactgaacctgagaacattgacactggagagaaaccttacaagtgtcaagaatgtaacaacgtcattaaaacttgctcagtccttactaaaaatagaatttatgccggaggggaacattacagatgtgaagaatttggcaaagtatttaaccagtgctcccaccttactgaacatgagcatggtactgaggaaaaaccctgcaaatatgaagagtgcagcagtgtctttatctcttgctcaagcctttctaatcaacagatgattcttgctggagagaagctctccaaatgtgaaacatggtacaaaggttttaaccacagcccaaatccttccaaacaccagagaaatgagattggagggaaacctttcaaatgtgaggaatgtgacagcatcttcaagtggttctcagaccttactaaacataagagaattcacactggtgagaaaccatacaaatgtgacgaatgtgggaaagcctatacacagtcctcacacctcagtgaacacaggaggattcacaccggagagaaaccctaccaatgtgaagaatgtgggaaggtcttcagaacttgctcaagcctttctaaccataagagaactcattctgaagaaaaaccctacacgtgtgaagaatgtggcaacatctttaagcagttatcagacctcactaagcataagaaaacccatactggagagaagccctacaaatgtgacgaatgtggaaaaaactttacccagtcctccaaccttattgtacataagagaattcatactggagagaaaccctacaagtgtgaagaatgtggcagagtcttcatgtggttctcagacattaccaaacataagaaaacccatactggagagaaaccctacaaatgtgacgaatgtggaaaaaactttacccagtcctcaaaccttattgtacataagagaattcatactggagagaaaccctacaagtgtgaaaagtgtggcaaagccttcacccagttctcacacctgactgtacatgaaagcattcatact

SEQ ID NO: 5238 - DNA, 1830 bp, Homo sapiens
  source 1..1830: mol_type = genomic DNA
atggctggtgctcagactctgttgacgttcagggatgtggccatagaattctccctggaggagtggaaatgcctggacctcgctcagcagaatttgtacagggatgtgatgttggagaactacagaaacttgttctccgttggtctcactgtctgtaagccaggcctgatcacctgcctggagcaacgaaaagagccctggaatgtgaagagacaggaggcagcagacggacatccagagatgggatttcaccatgctactcaggcttgtcttgaactcctgggctcaagcgatctgcctgcctcagcctcccaaagtgctgggattacaggtgtgaaccaccgtgcccagccaggcctcaatgtttctgtggacaaattcactgctatgtcttctcattttacccaagaccttctgccagagcagggcatacaagatgcattcccaaaaagaatactgagaggatatggaaattgtggccttgataatttatatttaaggaaagactgggaaagtttagatgagtgtaagttgcaaaaagattataatggacttaaccaatgttcatcaactacccatagcaaaatctttcaatataataaatatgttaaaatctttgataacttttcaaatttacatagacgtaatataagtaatactggagagaaacctttcaaatgtcaagaatgtggcaaatcctttcaaatgctctcattcctaactgaacatcagaaaattcacactggaaaaaaattccaaaaatgtggagaatgtggcaaaacctttatccagtgctcacactttactgaacctgagaacattgacactggagagaaaccttacaagtgtcaagaatgtaacaacgtcattaaaacttgctcagtccttactaaaaatagaatttatgccggaggggaacattacagatgtgaagaatttggcaaagtatttaaccagtgctcccaccttactgaacatgagcatggtactgaggaaaaaccctgcaaatatgaagagtgcagcagtgtctttatctcttgctcaagcctttctaatcaacagatgattcttgctggagagaagctctccaaatgtgaaacatggtacaaaggttttaaccacagcccaaatccttccaaacaccagagaaatgagattggagggaaacctttcaaatgtgaggaatgtgacagcatcttcaagtggttctcagaccttactaaacataagagaattcacactggtgagaaaccatacaaatgtgacgaatgtgggaaagcctatacacagtcctcacacctcagtgaacacaggaggattcacaccggagagaaaccctaccaatgtgaagaatgtgggaaggtcttcagaacttgctcaagcctttctaaccataagagaactcattctgaagaaaaaccctacacgtgtgaagaatgtggcaacatctttaagcagttatcagacctcactaagcataagaaaacccatactggagagaagccctacaaatgtgacgaatgtggaaaaaactttacccagtcctccaaccttattgtacataagagaattcatactggagagaaaccctacaagtgtgaagaatgtggcagagtcttcatgtggttctcagacattaccaaacataagaaaacccatactggagagaaaccctacaaatgtgacgaatgtggaaaaaactttacccagtcctcaaaccttattgtacataagagaattcatactggagagaaaccctacaagtgtgaaaagtgtggcaaagccttcacccagttctcacacctgactgtacatgaaagcattcatact

SEQ ID NO: 5239 - DNA, 1887 bp, Homo sapiens
  source 1..1887: mol_type = genomic DNA
atgactctgttgacgttcagggatgtggccatagaattctccctggaggagtggaaatgcctggacctcgctcagcagaatttgtacagggatgtgatgttggagaactacagaaacttgttctccgttggtctcactgtctgtaagccaggcctgatcacctgcctggagcaacgaaaagagccctggaatgtgaagagacaggaggcagcagacggacatccagagatgggatttcaccatgctactcaggcttgtcttgaactcctgggctcaagcgatctgcctgcctcagcctcccaaagtgctgggattacaggtgtgaaccaccgtgcccagccaggcctcaatgtttctgtggacaaattcactgcactgtgctcacctggggtgctgcaaactgtgaaatggtttttagagttcagatgcatcttctcactagctatgtcttctcattttacccaagaccttctgccagagcagggcatacaagatgcattcccaaaaagaatactgagaggatatggaaattgtggccttgataatttatatttaaggaaagactgggaaagtttagatgagtgtaagttgcaaaaagattataatggacttaaccaatgttcatcaactacccatagcaaaatctttcaatataataaatatgttaaaatctttgataacttttcaaatttacatagacgtaatataagtaatactggagagaaacctttcaaatgtcaagaatgtggcaaatcctttcaaatgctctcattcctaactgaacatcagaaaattcacactggaaaaaaattccaaaaatgtggagaatgtggcaaaacctttatccagtgctcacactttactgaacctgagaacattgacactggagagaaaccttacaagtgtcaagaatgtaacaacgtcattaaaacttgctcagtccttactaaaaatagaatttatgccggaggggaacattacagatgtgaagaatttggcaaagtatttaaccagtgctcccaccttactgaacatgagcatggtactgaggaaaaaccctgcaaatatgaagagtgcagcagtgtctttatctcttgctcaagcctttctaatcaacagatgattcttgctggagagaagctctccaaatgtgaaacatggtacaaaggttttaaccacagcccaaatccttccaaacaccagagaaatgagattggagggaaacctttcaaatgtgaggaatgtgacagcatcttcaagtggttctcagaccttactaaacataagagaattcacactggtgagaaaccatacaaatgtgacgaatgtgggaaagcctatacacagtcctcacacctcagtgaacacaggaggattcacaccggagagaaaccctaccaatgtgaagaatgtgggaaggtcttcagaacttgctcaagcctttctaaccataagagaactcattctgaagaaaaaccctacacgtgtgaagaatgtggcaacatctttaagcagttatcagacctcactaagcataagaaaacccatactggagagaagccctacaaatgtgacgaatgtggaaaaaactttacccagtcctccaaccttattgtacataagagaattcatactggagagaaaccctacaagtgtgaagaatgtggcagagtcttcatgtggttctcagacattaccaaacataagaaaacccatactggagagaaaccctacaaatgtgacgaatgtggaaaaaactttacccagtcctcaaaccttattgtacataagagaattcatactggagagaaaccctacaagtgtgaaaagtgtggcaaagccttcacccagttctcacacctgactgtacatgaaagcattcatact

SEQ ID NO: 5240 - DNA, 270 bp, Homo sapiens
  source 1..270: mol_type = genomic DNA
atggctggtgctcagactctgttgacgttcagggatgtggccatagaattctccctggaggagtggaaatgcctggacctcgctcagcagaatttgtacagggatgtgatgttggagaactacagaaacttgttctccgttggtctcactgtctgtaagccaggcctgatcacctgcctggagcaacgaaaagagccctggaatgtgaagagacaggaggcagcagacggacatccaggtattttctttgtggttaccatggaaattata

SEQ ID NO: 5241 - DNA, 1899 bp, Homo sapiens
  source 1..1899: mol_type = genomic DNA
atggctggtgctcagactctgttgacgttcagggatgtggccatagaattctccctggaggagtggaaatgcctggacctcgctcagcagaatttgtacagggatgtgatgttggagaactacagaaacttgttctccgttggtctcactgtctgtaagccaggcctgatcacctgcctggagcaacgaaaagagccctggaatgtgaagagacaggaggcagcagacggacatccagagatgggatttcaccatgctactcaggcttgtcttgaactcctgggctcaagcgatctgcctgcctcagcctcccaaagtgctgggattacaggtgtgaaccaccgtgcccagccaggcctcaatgtttctgtggacaaattcactgcactgtgctcacctggggtgctgcaaactgtgaaatggtttttagagttcagatgcatcttctcactagctatgtcttctcattttacccaagaccttctgccagagcagggcatacaagatgcattcccaaaaagaatactgagaggatatggaaattgtggccttgataatttatatttaaggaaagactgggaaagtttagatgagtgtaagttgcaaaaagattataatggacttaaccaatgttcatcaactacccatagcaaaatctttcaatataataaatatgttaaaatctttgataacttttcaaatttacatagacgtaatataagtaatactggagagaaacctttcaaatgtcaagaatgtggcaaatcctttcaaatgctctcattcctaactgaacatcagaaaattcacactggaaaaaaattccaaaaatgtggagaatgtggcaaaacctttatccagtgctcacactttactgaacctgagaacattgacactggagagaaaccttacaagtgtcaagaatgtaacaacgtcattaaaacttgctcagtccttactaaaaatagaatttatgccggaggggaacattacagatgtgaagaatttggcaaagtatttaaccagtgctcccaccttactgaacatgagcatggtactgaggaaaaaccctgcaaatatgaagagtgcagcagtgtctttatctcttgctcaagcctttctaatcaacagatgattcttgctggagagaagctctccaaatgtgaaacatggtacaaaggttttaaccacagcccaaatccttccaaacaccagagaaatgagattggagggaaacctttcaaatgtgaggaatgtgacagcatcttcaagtggttctcagaccttactaaacataagagaattcacactggtgagaaaccatacaaatgtgacgaatgtgggaaagcctatacacagtcctcacacctcagtgaacacaggaggattcacaccggagagaaaccctaccaatgtgaagaatgtgggaaggtcttcagaacttgctcaagcctttctaaccataagagaactcattctgaagaaaaaccctacacgtgtgaagaatgtggcaacatctttaagcagttatcagacctcactaagcataagaaaacccatactggagagaagccctacaaatgtgacgaatgtggaaaaaactttacccagtcctccaaccttattgtacataagagaattcatactggagagaaaccctacaagtgtgaagaatgtggcagagtcttcatgtggttctcagacattaccaaacataagaaaacccatactggagagaaaccctacaaatgtgacgaatgtggaaaaaactttacccagtcctcaaaccttattgtacataagagaattcatactggagagaaaccctacaagtgtgaaaagtgtggcaaagccttcacccagttctcacacctgactgtacatgaaagcattcatact

SEQ ID NO: 5242 - DNA, 1881 bp, Homo sapiens
  source 1..1881: mol_type = genomic DNA
atggcggcggccgagctgacggccccggcccagggcattgtgacctttgaggacgtggctgtttacttctcctggaaggagtggggtcttcttgatgaggctcagaaatgcctgtaccacgatgtgatgctggagaacttgacacttacaacctccctgggtggttctggagcaggggatgaggaggcaccttatcagcagagcacttctccacagcgggtgtcacaggttaggattcctaaggcccttccttctccccagaagaccaacccctgtgagatatgtggcccagtcttgagacagattttgcacttggttgaacaccaaggaacacaccatggtcagaaactgtatacagacggggcatgtaggaaacaattacaatttactgcataccttcatcagcaccagaagcagcatgttggacagaaacacttcagaagcaatgggggcagagacatgtttttgagcagctgcacatttgaagtatctgggaagcccttcacttgcaaggaggttgggaaggatttcctggtgagatcaagatttcttcagcaacaggctgctcacaccagaaagaagtcaaacagaaccaagagtgcagtggcctttcacagtgtaaaaaatcattacaactggggagaatgtgtgaaagctttcagctacaaacatgtacgtgttcagcaccagggagacctcattagggaaagatcttacatgtgcagtgaatgtgggaaatcttttagcacaagctgtagcctcagtgatcatttgagagttcacacttcagaaaagccttatacatgtggagaatgtgggaaatcctataggcaaagctctagccttattacgcaccgaagaattcacactggagtaagacctcatcaatgtgatgaatgtggaaaattatttaacaggaagtatgaccttcttatacatcagagagttcatactggagaaaggccttacaagtgcagtgaatgtgggaaatcctttagccatagctctagcctcattacacaccagagaattcatactggaatgaggccttatgagtgcagtgaatgtgggaaatcttttatccatagttctagccttattacacaccagagagttcacactggtacaaggccttatatgtgcagtgaatgtgggaaatcctttagccagagctgtcacctcattaaacaccggagacttcacattggagaagggccttatgagtgtagtgaatgtgggaaattgtttacttatagatctcgtttcttccaacaccagagagttcatactggagtaagatctcatgaatgtcatgaatgtggaaaattatttagcaggaaatttgacctcattgtacatgagagagttcacacaggagaaaggccatatgagtgcagtgaatgtggaaaatcctttacctgtaaatcctacctcatctcacactggaaagttcatactggagcaaggccttatgaatgtggggagtgtgggaaatcatttactcatagctctacgctccttcaacaccagagagttcacactggagaaaggccttatgagtgcaatgaatgtgggaagttttttagccagagctccagcctcattagacataggagaagtcacaccggagaaaggccttatgagtgcagtgagtgttggaaatcctttagtaaccactctagcctcgttaaacaccgaagagttcataccggagaaaggccttatgaatgcagtgaatgtggaaaatcctttagccagagctctaacctcactaatcaccagcgaattcacagtggggaaaggccttatgagtgtagtgactgtggaaaattttttaccttcaactccaacctcctaaaacatcagaacgttcacaaggga

SEQ ID NO: 5243 - DNA, 1551 bp, Homo sapiens
  source 1..1551: mol_type = genomic DNA
atgccgcctcctgggaaagttccccgaaaggagaatctgtggctacagtgtgagtgggggtcctgctcctttgtgtgctcaaccatggaaaagttctttgagcatgtcactcagcacctgcagcagcacctgcatggctctggggaggaggaggaagaggaagaggaggatgacccacttgaggaagaattctcctgcttgtggcaggaatgtggcttttgttctctggacagttctgctgacctcatccgccatgtctacttccactgctaccacaccaagctgaaacagtgggggctgcaggccttgcaaagccaggctgaccttggcccctgcatcctggacttccagagccggaacgtcatccctgatatccctgaccacttcctgtgtctgtgggagcactgtgagaattccttcgacaatcctgagtggttttatcggcatgtggaagcacacagtctgtgctgtgaatacgaagcagtcggcaaggacaacccggtggtgctgtgtggctggaaaggctgtacctgcaccttcaaggaccgcagtaaacttcgagagcacctccgcagccatacccaggagaaagtggtagcctgccccacctgtgggggcatgtttgccaacaataccaagttcttagatcacatccgtcgccagacctcattggatcagcagcacttccagtgttctcactgttccaagagatttgccacagagcggctattgcgggaccacatgcgcaaccatgtgaatcactataagtgccctctgtgtgacatgacctgcccgctgccttcctccctccgcaaccacatgcgctttcgtcacagtgaggaccggccctttaaatgtgactgttgtgactacagctgcaagaatcttattgacctccagaagcacctggatacccacagcgaggagccagcctacaggtgtgattttgagaactgcaccttcagtgcccgatccctctgctctatcaagtcccattaccgcaaagtacatgaaggagactctgagccaaggtacaaatgtcatgtgtgtgacaaatgcttcacacggggcaacaacctcaccgtgcaccttcgcaagaagcaccagttcaagtggccctcagggcatccccgttttcggtacaaggaacatgaagatggctatatgcggctgcagctggttcgctacgagagtgtagagctgacacagcaactgctgcggcaaccacaagagggatcgggcctgggaacgtcgctgaacgagagcagcctgcagggcattattctagaaacagtgccaggggagccaggacgtaaggaagaggaagaggagggcaagggtagcgaagggacagccctctcagcctctcaggacaaccccagttctgtcatccacgtggtgaatcagaccaatgcccaaggccagcaagagatcgtctactatgtgctgtctgaagccccaggggagcctcccccagcccctgagccaccttcagggggcatcatggaaaagcttcaaggaatagctgaggagccagagatccagatggtt

SEQ ID NO: 5244 - DNA, 1257 bp, Homo sapiens
  source 1..1257: mol_type = genomic DNA
atgccgcctcctgggaaagttccccgaaaggagaatctgtggctacagtgtgagtgggggtcctgctcctttgtgtgctcaaccatggaaaagttctttgagcatgtcactcagcacctgcagcagcacctgcatggctctggggaggaggaggaagaggaagaggaggatgacccacttgaggaagaattctcctgcttgtggcaggaatgtggcttttgttctctggacagttctgctgacctcatccgccatgtctacttccactgctaccacaccaagctgaaacagtgggggctgcaggccttgcaaagccaggctgaccttggcccctgcatcctggacttccagagccggaacgtcatccctgatatccctgaccacttcctgtgtctgtgggagcactgtgagaattccttcgacaatcctgagtggttttatcggcatgtggaagcacacagtctgtgctgtgaatacgaagcagtcggcaaggacaacccggtggtgctgtgtggctggaaaggctgtacctgcaccttcaaggaccgcagtaaacttcgagagcacctccgcagccatacccaggagaaagtggtagcctgccccacctgtgggggcatgtttgccaacaataccaagttcttagatcacatccgtcgccagacctcattggatcagcagcacttccagtgttctcactgttccaagagatttgccacagagcggctattgcgggaccacatgcgcaaccatgtgaatcactataagtgccctctgtgtgacatgacctgcccgctgccttcctccctccgcaaccacatgcgctttcgtcacagtgaggaccggccctttaaatgtgactgttgtgactacagctgcaagaatcttattgacctccagaagcacctggatacccacagcgaggagccagcctacaggtgtgattttgagaactgcaccttcagtgcccgatccctctgctctatcaagtcccattaccgcaaagtacatgaaggagactctgagccaaggtacaaatgtcatgtgtgtgacaaatgcttcacacggggcaacaacctcaccgtgcaccttcgcaagaagcaccagttcaagtggccctcagggcatccccgttttcgcctcggccatttctgtatccccctgcctgggtttgctgccctttatgctcctacctcaccaggtacaaggaacatgaagatggctatatgcggctgcagctggttcgctacgagagtg

SEQ ID NO: 5245 - DNA, 5715 bp, Homo sapiens
  source 1..5715: mol_type = genomic DNA
atggaaatggaggcaaacgaccattttaactttactggccttccccctgcacctgctgcctcaggactgaaaccctctccttcctcaggggagggcctctacactaacgggtctcccatgaacttcccccagcaagggaaaagtttgaatggggatgtgaatgttaatggcttatctactgtatctcacactactacttcagggattttgaactctgctccccactcctccagcacctcacacctccatcaccccagcgtggcctacgactgtctctggaactactcacagtacccatctgccaatcctggcagcaacctcaaggacccaccccttctctcccagttctcggggggacaatacccactcaacggcatccttgggggcagccggcaaccttcatccccaagtcataacactaaccttcgggctgggagccaagagttctgggccaacggtacccagagtcccatggggcttaactttgattcacaagaactgtatgattcctttcctgaccagaattttgaggtgatgcccaatggaccccctagttttttcacctccccacagacttctcctatgttgggatctagcattcaaacctttgcaccctcccaggaggtaggcagtggtatccatcctgatgaggcagcagaaaaggagatgacttcagttgtggcagagaatggcactggcttggtaggcagcttggagctggaagaagagcagccagaactgaagatgtgtggctacaatggctctgtcccttctgtggaatcgttacaccaagaggtctcagtcctggtccctgaccccacagtgagctgtttagatgatccttcacatcttcctgatcaactggaagacactccaatcctcagtgaagactctctggagcccttcaactctctggcaccagagccagtgagtggaggactatatggtattgatgacacggagctgatgggtgcagaggacaagctgcctcttgaggacagccctgtgatttctgcccttgattgcccttccctcaataatgctactgccttcagtctcctggcagatgatagtcaaacatcaacctctatctttgccagtcccacctctccacctgtcctaggggagtctgtcctgcaagataacagctttgacctgaataatggtagtgacgctgaacaggaagaaatggaaactcaatcttcagacttcccaccatccctgacccagccagctcctgatcagtcatccactattcagctacatccagcaacctcaccagcagtctcgccaacaacctccccagcagtctccctagtggtttctccagcagcctccccagaaatctctccagaagtttgtcccgcagcttctacagttgtctctccagcagtcttctcagtggtctctccagcttcctcagcagtcctcccagcagtctccttagaagtcccgttgacggcttcagtgacatccccaaaagcctctcccgtaacttccccagcagctgcctttccaacagcctccccagcaaataaggatgtcagcagctttctagaaaccactgctgacgtggaagagatcactggagaaggactcactgcttctggtagtggtgatgtcatgaggagacgtattgctaccccagaagaagttcgtcttcccctccaacatgggtggcggagagaggtgcgcatcaagaagggcagccaccgatggcagggggagacctggtattatggcccctgtgggaagaggatgaagcaatttccagaagtgatcaagtacctgagccgcaacgtggtacacagtgtccgccgagagcacttcagcttcagtccccgtatgcctgttggagatttctttgaagaaagagacacgccagagggcttgcagtgggtgcagctctcagcagaggagatcccgtcgaggattcaggcaattactggcaaacggggtcgacctcgaaacactgagaaggctaagactaaggaagtccccaaggtgaaacggggtcgaggtcggccacctaaggtcaaaatcactgagctattgaacaagacagacaaccgccccctaaagaaactggaggcccaagaaacattgaatgaggaggataaagcaaagattgctaaaagcaagaagaagatgaggcagaaggttcaacggggagagtgtcagactactatccaagggcaggccagaaataagcggaaacaagagaccaagagcttaaagcagaaggaagctaagaagaaatccaaggctgagaaagaaaaaggaaagacaaagcaggaaaaactgaaggaaaaagtcaagagggaaaagaaggagaaggtaaaaatgaaggaaaaggaggaggtgaccaaagccaagccagcctgtaaagcagataagaccctggccacacagaggcgcttggaggaacggcagaggcagcagatgatcttggaggaaatgaagaagccgacagaggatatgtgtctgactgaccaccagcccctgcctgacttctcacgagtccctggtctgacattgcccagtggagccttctcagactgcttgaccattgtggagttcctgcatagctttggcaaggtgctgggctttgatcctgccaaagatgtgcctagcctgggggtcctgcaggagggactcctgtgtcaaggtgacagcttgggtgaggtgcaagacctgctggtcaggctgctgaaggctgcactccatgatcctggctttccctcctactgtcagtccctaaagatcttgggggagaaggtgtctgagatcccactgacaagagacaatgtgtcagagatcctgcgctgcttccttatggcatatggagtagagccagccctctgtgaccgcctgcgcacccagccttttcaggcccagccaccccagcagaaggctgctgtcctggccttccttgtgcatgagctcaatggctccaccctcatcatcaatgagattgacaagactctggagagtatgtccagctacaggaaaaacaagtggattgttgaaggccggctccggaggctgaaaactgttctggccaagcgaactgggcggtctgaagtagagatggaagggccagaggaatgcctgggacggaggcgcagttctcggatcatggaggagaccagtggcatggaagaagaggaagaagaggagtctatagcagctgtccctggccgcaggggtcgaagagatggagaggttgatgccacagcatctagcatcccagagctagagcgccagatagaaaaactcagcaagcgtcagcttttctttcgcaaaaagctgcttcactcatcccagatgcttcgggcggtctccctgggtcaggaccgctacagacgtcgctactgggtattgccgtatttggctggtatctttgtagaaggaacagaggggaacttagttcctgaggaggtgataaagaaggaaactgactccttaaaagtggcagcccatgcgtcactcaaccctgccctcttctctatgaagatggagttagctggctccaacaccactgccagttctcctgcccgggcccgaggccgacctcgaaaaactaagcccgggtctatgcaacctaggcatcttaagtcccctgtcaggggtcaggattcagaacagccccaggcccagcttcagcctgaggctcagcttcatgctcctgcccagccccagcctcagcttcagcttcagcttcagtcccataaggggttcctggagcaagaaggctcccctttgtcactgggtcagagccagcatgacctcagccagtcagccttcctgtcttggctgagccagactcagagccatagctccctgttgagcagctcagtcctcacacctgatagcagtccgggaaaactagacccagctccatcacaacccccggaggagccagagcctgatgaggcagaatccagccctgatcctcaagcactctggtttaacatctcagcccagatgccctgcaatgctgcccccacaccgccccctgcagtttctgaggaccaacccactccctcccctcagcagcttgcctcctccaagccaatgaatagacctagtgctgccaacccttgttctccagtgcagttctcttccacgcccttggctgggttggcccctaagaggcgagcaggagaccctggagaaatgccacagagtcccacagggctgggacagcccaaacggagagggagacctcccagtaagttcttcaaacagatggaacagcgttacctaacccagctgacagcccagcctgtcccacctgagatgtgctcaggctggtggtggatacgagatcctgagatgttggatgccatgctcaaggccctacacccccgaggtatccgggagaaggcacttcacaaacaccttaacaagcacagggacttcttgcaggaagtctgcctgcggccctcagctgaccccatctttgagcccaggcaactacctgcctttcaagaagggattatgagctggtcccccaaagagaagacatacgagacagacctagcagtgcttcaatgggtagaggagctggagcagcgggttatcatgtctgatctgcagattcggggctggacatgtcctagcccagactctacccgtgaagacttggcctactgtgagcacctctccgactcccaggaggatatcacctggcgaggtcggggcagggagggactggcacctcagcgtaaaactaccaaccctttggacctggctgtgatgcggctggctgccctggaacagaatgtagaacggcggtacctgcgggagcccctctggccaactcatgaggttgtgctggagaaggccctgcttagcacacctaatggtgcccctgagggcaccactacagagatatcatatgagatcacccctcgcattcgtgtctggcgccagaccctcgagcggtgccggagcgcagcccaggtgtgcttgtgcctgggccagctggagaggtccattgcctgggagaagtctgtcaacaaagtgacatgtctagtctgccggaagggtgacaatgatgagtttcttctgctttgtgatgggtgtgaccgtggctgccacatttactgccatcgtcccaagatggaggctgtcccagaaggagattggttctgtactgtctgtttggctcagcaggtggagggagaattcactcagaagcctggtttcccaaagcgtggccagaagcggaaaagtggttattcgctgaacttctcagagggtgatggccgccgacgccgggtactgttgaggggccgagaaagcccagcagcagggcctcggtactcggaagaagggctctccccctccaagcggcggcgactctctatgcggaaccaccacagtgatctcacattttgcgagattatcctgatggagatggagtcccatgatgcagcctggcctttcctagagcctgtgaacccacgtttggtgagtgggtaccggcgcatcatcaaaaatcctatggatttttccaccatgcgggagcggctgctcaggggagggtacaccagctcagaggagtttgcggctgatgccctcctggtatttgacaactgccagactttcaacgaggatgactctgaagtaggcaaggctgggcacatcatgcgccgcttcttcgagagccgctgggaggagttttatcagggaaaacaggccaatctg

SEQ ID NO: 5246 - DNA, 5709 bp, Homo sapiens
  source 1..5709: mol_type = genomic DNA
atggaggcaaacgaccattttaactttactggccttccccctgcacctgctgcctcaggactgaaaccctctccttcctcaggggagggcctctacactaacgggtctcccatgaacttcccccagcaagggaaaagtttgaatggggatgtgaatgttaatggcttatctactgtatctcacactactacttcagggattttgaactctgctccccactcctccagcacctcacacctccatcaccccagcgtggcctacgactgtctctggaactactcacagtacccatctgccaatcctggcagcaacctcaaggacccaccccttctctcccagttctcggggggacaatacccactcaacggcatccttgggggcagccggcaaccttcatccccaagtcataacactaaccttcgggctgggagccaagagttctgggccaacggtacccagagtcccatggggcttaactttgattcacaagaactgtatgattcctttcctgaccagaattttgaggtgatgcccaatggaccccctagttttttcacctccccacagacttctcctatgttgggatctagcattcaaacctttgcaccctcccaggaggtaggcagtggtatccatcctgatgaggcagcagaaaaggagatgacttcagttgtggcagagaatggcactggcttggtaggcagcttggagctggaagaagagcagccagaactgaagatgtgtggctacaatggctctgtcccttctgtggaatcgttacaccaagaggtctcagtcctggtccctgaccccacagtgagctgtttagatgatccttcacatcttcctgatcaactggaagacactccaatcctcagtgaagactctctggagcccttcaactctctggcaccagagccagtgagtggaggactatatggtattgatgacacggagctgatgggtgcagaggacaagctgcctcttgaggacagccctgtgatttctgcccttgattgcccttccctcaataatgctactgccttcagtctcctggcagatgatagtcaaacatcaacctctatctttgccagtcccacctctccacctgtcctaggggagtctgtcctgcaagataacagctttgacctgaataatggtagtgacgctgaacaggaagaaatggaaactcaatcttcagacttcccaccatccctgacccagccagctcctgatcagtcatccactattcagctacatccagcaacctcaccagcagtctcgccaacaacctccccagcagtctccctagtggtttctccagcagcctccccagaaatctctccagaagtttgtcccgcagcttctacagttgtctctccagcagtcttctcagtggtctctccagcttcctcagcagtcctcccagcagtctccttagaagtcccgttgacggcttcagtgacatccccaaaagcctctcccgtaacttccccagcagctgcctttccaacagcctccccagcaaataaggatgtcagcagctttctagaaaccactgctgacgtggaagagatcactggagaaggactcactgcttctggtagtggtgatgtcatgaggagacgtattgctaccccagaagaagttcgtcttcccctccaacatgggtggcggagagaggtgcgcatcaagaagggcagccaccgatggcagggggagacctggtattatggcccctgtgggaagaggatgaagcaatttccagaagtgatcaagtacctgagccgcaacgtggtacacagtgtccgccgagagcacttcagcttcagtccccgtatgcctgttggagatttctttgaagaaagagacacgccagagggcttgcagtgggtgcagctctcagcagaggagatcccgtcgaggattcaggcaattactggcaaacggggtcgacctcgaaacactgagaaggctaagactaaggaagtccccaaggtgaaacggggtcgaggtcggccacctaaggtcaaaatcactgagctattgaacaagacagacaaccgccccctaaagaaactggaggcccaagaaacattgaatgaggaggataaagcaaagattgctaaaagcaagaagaagatgaggcagaaggttcaacggggagagtgtcagactactatccaagggcaggccagaaataagcggaaacaagagaccaagagcttaaagcagaaggaagctaagaagaaatccaaggctgagaaagaaaaaggaaagacaaagcaggaaaaactgaaggaaaaagtcaagagggaaaagaaggagaaggtaaaaatgaaggaaaaggaggaggtgaccaaagccaagccagcctgtaaagcagataagaccctggccacacagaggcgcttggaggaacggcagaggcagcagatgatcttggaggaaatgaagaagccgacagaggatatgtgtctgactgaccaccagcccctgcctgacttctcacgagtccctggtctgacattgcccagtggagccttctcagactgcttgaccattgtggagttcctgcatagctttggcaaggtgctgggctttgatcctgccaaagatgtgcctagcctgggggtcctgcaggagggactcctgtgtcaaggtgacagcttgggtgaggtgcaagacctgctggtcaggctgctgaaggctgcactccatgatcctggctttccctcctactgtcagtccctaaagatcttgggggagaaggtgtctgagatcccactgacaagagacaatgtgtcagagatcctgcgctgcttccttatggcatatggagtagagccagccctctgtgaccgcctgcgcacccagccttttcaggcccagccaccccagcagaaggctgctgtcctggccttccttgtgcatgagctcaatggctccaccctcatcatcaatgagattgacaagactctggagagtatgtccagctacaggaaaaacaagtggattgttgaaggccggctccggaggctgaaaactgttctggccaagcgaactgggcggtctgaagtagagatggaagggccagaggaatgcctgggacggaggcgcagttctcggatcatggaggagaccagtggcatggaagaagaggaagaagaggagtctatagcagctgtccctggccgcaggggtcgaagagatggagaggttgatgccacagcatctagcatcccagagctagagcgccagatagaaaaactcagcaagcgtcagcttttctttcgcaaaaagctgcttcactcatcccagatgcttcgggcggtctccctgggtcaggaccgctacagacgtcgctactgggtattgccgtatttggctggtatctttgtagaaggaacagaggggaacttagttcctgaggaggtgataaagaaggaaactgactccttaaaagtggcagcccatgcgtcactcaaccctgccctcttctctatgaagatggagttagctggctccaacaccactgccagttctcctgcccgggcccgaggccgacctcgaaaaactaagcccgggtctatgcaacctaggcatcttaagtcccctgtcaggggtcaggattcagaacagccccaggcccagcttcagcctgaggctcagcttcatgctcctgcccagccccagcctcagcttcagcttcagcttcagtcccataaggggttcctggagcaagaaggctcccctttgtcactgggtcagagccagcatgacctcagccagtcagccttcctgtcttggctgagccagactcagagccatagctccctgttgagcagctcagtcctcacacctgatagcagtccgggaaaactagacccagctccatcacaacccccggaggagccagagcctgatgaggcagaatccagccctgatcctcaagcactctggtttaacatctcagcccagatgccctgcaatgctgcccccacaccgccccctgcagtttctgaggaccaacccactccctcccctcagcagcttgcctcctccaagccaatgaatagacctagtgctgccaacccttgttctccagtgcagttctcttccacgcccttggctgggttggcccctaagaggcgagcaggagaccctggagaaatgccacagagtcccacagggctgggacagcccaaacggagagggagacctcccagtaagttcttcaaacagatggaacagcgttacctaacccagctgacagcccagcctgtcccacctgagatgtgctcaggctggtggtggatacgagatcctgagatgttggatgccatgctcaaggccctacacccccgaggtatccgggagaaggcacttcacaaacaccttaacaagcacagggacttcttgcaggaagtctgcctgcggccctcagctgaccccatctttgagcccaggcaactacctgcctttcaagaagggattatgagctggtcccccaaagagaagacatacgagacagacctagcagtgcttcaatgggtagaggagctggagcagcgggttatcatgtctgatctgcagattcggggctggacatgtcctagcccagactctacccgtgaagacttggcctactgtgagcacctctccgactcccaggaggatatcacctggcgaggtcggggcagggagggactggcacctcagcgtaaaactaccaaccctttggacctggctgtgatgcggctggctgccctggaacagaatgtagaacggcggtacctgcgggagcccctctggccaactcatgaggttgtgctggagaaggccctgcttagcacacctaatggtgcccctgagggcaccactacagagatatcatatgagatcacccctcgcattcgtgtctggcgccagaccctcgagcggtgccggagcgcagcccaggtgtgcttgtgcctgggccagctggagaggtccattgcctgggagaagtctgtcaacaaagtgacatgtctagtctgccggaagggtgacaatgatgagtttcttctgctttgtgatgggtgtgaccgtggctgccacatttactgccatcgtcccaagatggaggctgtcccagaaggagattggttctgtactgtctgtttggctcagcaggtggagggagaattcactcagaagcctggtttcccaaagcgtggccagaagcggaaaagtggttattcgctgaacttctcagagggtgatggccgccgacgccgggtactgttgaggggccgagaaagcccagcagcagggcctcggtactcggaagaagggctctccccctccaagcggcggcgactctctatgcggaaccaccacagtgatctcacattttgcgagattatcctgatggagatggagtcccatgatgcagcctggcctttcctagagcctgtgaacccacgtttggtgagtgggtaccggcgcatcatcaaaaatcctatggatttttccaccatgcgggagcggctgctcaggggagggtacaccagctcagaggagtttgcggctgatgccctcctggtatttgacaactgccagactttcaacgaggatgactctgaagtaggcaaggctgggcacatcatgcgccgcttcttcgagagccgctgggaggagttttatcagggaaaacaggccaatctg

SEQ ID NO: 5247 - DNA, 6396 bp, Homo sapiens
  source 1..6396: mol_type = genomic DNA
atggagtctggagaacggttaccatcctcagcagcctcctctactacaccaacttcatcttcgacaccttctgtggcttcagtagtttcaaaaggtggcctttccactggagttgcttcacttagctctacaatcaacccatgtggacatttattcagaacagctggggatcaaccgtttaacctgtccacagtgtcgagtgccttcccaatggtcagccacccagtctttggtctacattcagccagctcagggcattcagaatttggtggtttggggacacttggtacacccacagccttagccgcacatccccaactagcatcttttccagaatggtggcgaacaactgatgctcatactcgtacaggagcaaccttctttccaccattactgggaattccaccactatttgctcccccagcccagaatcatgattcttcttcattccattcaaggacttcgggaaaaagtaatcgaaatggtcccgaaaaaggtgtaaatgggtcaataaatggaagtaatacatcatctgtaattggtatcaacacatctgtactatccactactgcttcaagttccatgggacaaactaaaagtacaagctcaggtggaggaaatcgaaaatgtaatcaggaacaaagcaaaaaccagcctttggatgctagagttgacaaaatcaaagataagaaaccaaggaagaaagcaatggaaagttctagcaacagtgatagtgattcaggcacatcatcagacacctcaagtgaaggcattagtagcagtgattcagatgatctagaagaagatgaagaagaagaagatcaaagtattgaagaaagtgaagatgatgattctgattcagagagtgaagcacaacataaaagtaacaaccaggtgctattacatggtatttcagacccaaaagcagatggacagaaagcaactgaaaaagcccaggaaaaaagaatacaccagccattacctcttgcgtctgaatcccagactcactcattccaatcccagcagaagcagcctcaggttttgtcacagcagcttccatttattttccaaagctctcaggcaaaggaggaatctgtgaacaaacacaccagtgtaatacagtctacgggattggtgtccaatgtgaaacctttatctttggtaaatcaagccaaaaaggaaacttacatgaaactcatagttccttctcctgatgttcttaaagcagggaataaaaatacctctgaagaatctagtttattgaccagtgaattgagatccaaacgggaacaatataaacaggcattcccatcacagttaaagaaacaagagtcatcgaagagcctgaagaaggttattgcagctttgtcaaatccaaaagcaacctctagttcaccagcacatccaaaacaaacattagaaaacaaccacccaaatccattcttgacaaatgcacttttaggtaatcaccaaccaaatggagttattcaaagtgtcattcaagaagctcctctagcacttactaccaaaactaaaatgcagagcaagattaatgaaaacattgctgctgcaagtagcacccctttttcctcacctgtaaatctgagtacaagtgggagaagaacccctggcaatcagacacctgtaatgccctctgcctctcccatcctgcatagtcaagggaaggaaaaagcagttagcaataatgtaaacccagtaaaaacacagcatcactcccatcctgcaaaatctttagtggaacaattcagaggaacagattcagacattcccagtagtaaagattctgaagattcaaatgaggatgaagaggaagatgatgaagaagaagatgaggaagatgatgaagatgatgaatctgatgacagccaatcagaatcagatagtaattcagaatcagatacagaaggatcagaagaagaagatgatgatgataaagaccaagatgaatcagatagtgatactgaaggagagaaaacttcaatgaaactgaataaaacaacttcctctgtcaaaagcccttccatgagtctcacaggtcactcaacacctcgtaacctccacatagcaaaagccccaggctctgctcctgctgccttatgttctgaatcccagtcacctgcttttcttggtacatcttcttccacacttacttcaagcccacactctggcacttccaaaagaagaagagtaacagatgaacgtgaactgcgtattccattggaatatggctggcagagagagacaagaataagaaactttggagggcgccttcaaggagaagtagcatattatgctccatgtggaaagaaacttaggcagtaccctgaagtaataaagggaatgcagtggtgtcttttgaaagaagaggatgtcattcctcgtatcagggcaatggaaggtcgtagaggaagaccaccaaatccagatagacaacgagcaagagaggaatccaggatgagacgtcggaaaggtcgacctccaaatgttggcaatgctgaattcctagataacgcagatgcaaagttgctaagaaaactgcaagctcaagaaatagccaggcaagcagcacaaataaagcttttgagaaaacttcaaaagcaggaacaggctcgggttgctaaagaagccaaaaaacaacaagcaataatggctgctgaggagaagcggaagcaaaaagaacagataaagattatgaaacagcaggaaaaaattaagagaatacagcaaatcagaatggaaaaagaacttcgagctcagcaaattctagaggctaaaaagaaaaagaaggaagaagcggcaaatgccaaattattggaggccgagaaacgaataaaggaaaaagaaatgagaagacaacaagctgttcttctgaaacatcaggaacgagagcgaaggcgacaacacatgatgcttatgaaagctatggaagctcgtaaaaaagcagaagaaaaagagcggttgaaacaagaaaaacgtgatgagaaaagattaaataaagagcgtaaactagagcagcgaagattagaattagaaatggcaaaggaactaaagaagcctaatgaagacatgtgcttagcagaccaaaagcctttgccagagttgcctcgtattccaggacttgttctctctggaagtacattttcagactgtctcatggtggtgcagttcttacgaaactttggtaaagttttgggctttgatgtgaatattgatgttccaaacctgagtgttcttcaagagggattgctaaatataggggacagcatgggtgaagtacaagacttgcttgtgaggctcctctcagctgctgtatgtgatccaggtctaataacaggatacaaggctaaaacagctcttggagaacatttgctgaatgttggtgtgaatcgagacaatgtttccgagattttacagatatttatggaagcccactgtggacaaactgagcttactgaaagtctgaagaccaaagcttttcaggctcacactccagcacagaaagcttcagtcctggctttcctgatcaatgaactggcatgcagcaagagtgtggtcagtgaaatcgacaagaacattgattatatgtcaaacttgaggagagataaatgggtggtagaaggtaaactccgcaagctcagaatcattcatgctaagaaaacaggcaaaagagacacttcaggtggcattgatctgggagaagagcagcatcccttgggcacacccactccaggacgcaagcgaagaaggaagggaggagacagtgattatgacgatgatgatgacgatgacagtgatgaccaaggggatgaagatgatgaggatgaagaagataaagaagacaaaaaaggaaaaaagactgatatctgtgaagatgaggatgaaggtgaccaagcagcaagtgttgaagagctggaaaaacagattgaaaaactgagtaaacaacagagtcagtacagaaggaagctctttgatgcgtctcactcattgcgttcagtgatgtttggccaagatcgttacagacgccggtactggattcttccccaatgtggggggatttttgtagaaggcatggagagtggtgaaggactagaagaaattgcaaaagaaagagaaaaactgaaaaaggcagaaagtgtccagatcaaagaagaaatgtttgagacttctggggacagtttaaattgttcaaatacagatcactgtgaacaaaaggaagatcttaaagaaaaagataacacaaatctattccttcagaaacctggctctttttccaaattaagcaagcttttggaagtagctaagatgcctcctgagtcagaggttatgacccccaaaccaaatgctggtgcaaatgggtgcacgttgtcttatcagaacagtggaaaacattcactgggcagcgttcagtcaacagcaacgcaaagcaatgtggaaaaggcagactctaataatctgtttaatactggttcaagtggtccagggaagttctacagtcctctccccaatgaccagttactaaaaacgctgactgaaaagaatagacaatggtttagtcttttgccacgaacaccctgtgatgacacttcacttactcatgccgatatgtcaactgcttctttggtgactcctcagtctcagccaccatctaagtcaccttcacctaccccagctcctcttggatcttctgctcagaatcctgttggcttaaatccatttgctttatcacctcttcaggtgaaaggtggagtatctatgatgggacttcagttttgtggatggcccactggtgtggttacttctaatattccatttacatcatctgtacctagtctaggatcggggttagggttatcagaaggaaatggtaattcattcttgacttccaatgttgcttcaagtaaaagtgaatctccagtaccacagaatgaaaaggccacttcagctcaacctgcagctgttgaagtagcaaaaccagtagattttcctagtccaaaacctattccagaagaaatgcagtttggttggtggagaattattgacccagaggacctaaaagctttgctcaaagtgctgcatctcagaggaataagagaaaaggcattacaaaaacaaattcagaaacatttggattatattactcaagcctgcctcaagaataaggatgttgctattattgaactgaatgaaaatgaagaaaaccaagtaactcgagatattgtggagaactggtcagtagaagaacaagcaatggaaatggatttgagtgtccttcaacaggtagaagatctagaaaggagagttgcatcagcaagtttgcaagtgaagggttggatgtgtccagagcctgcatcagaaagggaggacttggtatattttgaacataaatcatttactaaattgtgcaaggagcatgatggagaatttactggcgaagacgaaagcagtgcacatgcactagaacggaagagtgacaaccccctagatatagctgtaaccaggctggctgatttggagcggaacattgaaagaagaattgaagaggatattgctccagggctcagggtatggagaagggcattatcagaagctcgcagtgctgcacaggtagctctgtgcattcagcaattacagaaatcaatagcatgggaaaaatcaattatgaaagtttactgccaaatctgtcgaaagggagataatgaagaactgcttcttctttgtgatggctgtgacaaaggctgtcatacctactgccatagacccaagattacaacaatcccagatggagactggttttgtccagcttgcattgctaaggcaagtggtcaaactctaaaaatcaaaaaacttcatgtcaaaggaaaaaagactaatgagtcaaagaaaggcaagaaggtaactttaacaggagatactgaagatgaagactctgcatctacaagtagttcactaaaaagaggaaacaaagacctcaagaaaagaaaaatggaggaaaacacttctattaacttgtcaaaacaagaaagttttacttcagttaagaaacctaaaagagatgactccaaggacctagctctttgcagtatgattctgactgaaatggaaactcatgaggatgcatggccttttctacttcctgtaaacttgaaacttgttcctggttataagaaagttattaagaagcctatggatttttccacaattagagagaaactaagtagtggacagtatccaaaccttgaaacctttgctctagatgtcaggcttgtttttgacaactgtgaaacatttaatgaagatgattctgatataggcagagctggccacaatatgaggaagtattttgaaaaaaagtggacagatactttcaaagtgagc

SEQ ID NO: 5248 - DNA, 6504 bp, Homo sapiens
  source 1..6504: mol_type = genomic DNA
atggagtctggagaacggttaccatcctcagcagcctcctctactacaccaacttcatcttcgacaccttctgtggcttcagtagtttcaaaaggtggcctttccactggagttgcttcacttagctctacaatcaacccatgtggacatttattcagaacagctggggatcaaccgtttaacctgtccacagtgtcgagtgccttcccaatggtcagccacccagtctttggtctacattcagccagctcagggcattcagaatttggtggtttggggacacttggtacacccacagccttagccgcacatccccaactagcatcttttccaggtgcagaatggtggcgaacaactgatgctcatactcgtacaggagcaaccttctttccaccattactgggaattccaccactatttgctcccccagcccagaatcatgattcttcttcattccattcaaggacttcgggaaaaagtaatcgaaatggtcccgaaaaaggtgtaaatgggtcaataaatggaagtaatacatcatctgtaattggtatcaacacatctgtactatccactactgcttcaagttccatgggacaaactaaaagtacaagctcaggtggaggaaatcgaaaatgtaatcaggaacaaagcaaaaaccagcctttggatgctagagttgacaaaatcaaagataagaaaccaaggaagaaagcaatggaaagttctagcaacagtgatagtgattcaggcacatcatcagacacctcaagtgaaggcattagtagcagtgattcagatgatctagaagaagatgaagaagaagaagatcaaagtattgaagaaagtgaagatgatgattctgattcagagagtgaagcacaacataaaagtaacaaccaggtgctattacatggtatttcagacccaaaagcagatggacagaaagcaactgaaaaagcccaggaaaaaagaatacaccagccattacctcttgcgtctgaatcccagactcactcattccaatcccagcagaagcagcctcaggttttgtcacagcagcttccatttattttccaaagctctcaggcaaaggaggaatctgtgaacaaacacaccagtgtaatacagtctacgggattggtgtccaatgtgaaacctttatctttggtaaatcaagccaaaaaggaaacttacatgaaactcatagttccttctcctgatgttcttaaagcagggaataaaaatacctctgaagaatctagtttattgaccagtgaattgagatccaaacgggaacaatataaacaggcattcccatcacagttaaagaaacaagagtcatcgaagagcctgaagaaggttattgcagctttgtcaaatccaaaagcaacctctagttcaccagcacatccaaaacaaacattagaaaacaaccacccaaatccattcttgacaaatgcacttttaggtaatcaccaaccaaatggagttattcaaagtgtcattcaagaagctcctctagcacttactaccaaaactaaaatgcagagcaagattaatgaaaacattgctgctgcaagtagcacccctttttcctcacctgtaaatctgagtacaagtgggagaagaacccctggcaatcagacacctgtaatgccctctgcctctcccatcctgcatagtcaagggaaggaaaaagcagttagcaataatgtaaacccagtaaaaacacagcatcactcccatcctgcaaaatctttagtggaacaattcagaggaacagattcagacattcccagtagtaaagattctgaagattcaaatgaggatgaagaggaagatgatgaagaagaagatgaggaagatgatgaagatgatgaatctgatgacagccaatcagaatcagatagtaattcagaatcagatacagaaggatcagaagaagaagatgatgatgataaagaccaagatgaatcagatagtgatactgaaggagagaaaacttcaatgaaactgaataaaacaacttcctctgtcaaaagcccttccatgagtctcacaggtcactcaacacctcgtaacctccacatagcaaaagccccaggctctgctcctgctgccttatgttctgaatcccagtcacctgcttttcttggtacatcttcttccacacttacttcaagcccacactctggcacttccaaaagaagaagagtaacagatgaacgtgaactgcgtattccattggaatatggctggcagagagagacaagaataagaaactttggagggcgccttcaaggagaagtagcatattatgctccatgtggaaagaaacttaggcagtaccctgaagtaataaagtatctcagcagaaatggaataatggatatctcaagggacaatttcagcttcagtgcaaaaataagagtgggtgacttctatgaagccagagatggaccgcagggaatgcagtggtgtcttttgaaagaagaggatgtcattcctcgtatcagggcaatggaaggtcgtagaggaagaccaccaaatccagatagacaacgagcaagagaggaatccaggatgagacgtcggaaaggtcgacctccaaatgttggcaatgctgaattcctagataacgcagatgcaaagttgctaagaaaactgcaagctcaagaaatagccaggcaagcagcacaaataaagcttttgagaaaacttcaaaagcaggaacaggctcgggttgctaaagaagccaaaaaacaacaagcaataatggctgctgaggagaagcggaagcaaaaagaacagataaagattatgaaacagcaggaaaaaattaagagaatacagcaaatcagaatggaaaaagaacttcgagctcagcaaattctagaggctaaaaagaaaaagaaggaagaagcggcaaatgccaaattattggaggccgagaaacgaataaaggaaaaagaaatgagaagacaacaagctgttcttctgaaacatcaggaacgagagcgaaggcgacaacacatgatgcttatgaaagctatggaagctcgtaaaaaagcagaagaaaaagagcggttgaaacaagaaaaacgtgatgagaaaagattaaataaagagcgtaaactagagcagcgaagattagaattagaaatggcaaaggaactaaagaagcctaatgaagacatgtgcttagcagaccaaaagcctttgccagagttgcctcgtattccaggacttgttctctctggaagtacattttcagactgtctcatggtggtgcagttcttacgaaactttggtaaagttttgggctttgatgtgaatattgatgttccaaacctgagtgttcttcaagagggattgctaaatataggggacagcatgggtgaagtacaagacttgcttgtgaggctcctctcagctgctgtatgtgatccaggtctaataacaggatacaaggctaaaacagctcttggagaacatttgctgaatgttggtgtgaatcgagacaatgtttccgagattttacagatatttatggaagcccactgtggacaaactgagcttactgaaagtctgaagaccaaagcttttcaggctcacactccagcacagaaagcttcagtcctggctttcctgatcaatgaactggcatgcagcaagagtgtggtcagtgaaatcgacaagaacattgattatatgtcaaacttgaggagagataaatgggtggtagaaggtaaactccgcaagctcagaatcattcatgctaagaaaacaggcaaaagagacacttcaggtggcattgatctgggagaagagcagcatcccttgggcacacccactccaggacgcaagcgaagaaggaagggaggagacagtgattatgacgatgatgatgacgatgacagtgatgaccaaggggatgaagatgatgaggatgaagaagataaagaagacaaaaaaggaaaaaagactgatatctgtgaagatgaggatgaaggtgaccaagcagcaagtgttgaagagctggaaaaacagattgaaaaactgagtaaacaacagagtcagtacagaaggaagctctttgatgcgtctcactcattgcgttcagtgatgtttggccaagatcgttacagacgccggtactggattcttccccaatgtggggggatttttgtagaaggcatggagagtggtgaaggactagaagaaattgcaaaagaaagagaaaaactgaaaaaggcagaaagtgtccagatcaaagaagaaatgtttgagacttctggggacagtttaaattgttcaaatacagatcactgtgaacaaaaggaagatcttaaagaaaaagataacacaaatctattccttcagaaacctggctctttttccaaattaagcaagcttttggaagtagctaagatgcctcctgagtcagaggttatgacccccaaaccaaatgctggtgcaaatgggtgcacgttgtcttatcagaacagtggaaaacattcactgggcagcgttcagtcaacagcaacgcaaagcaatgtggaaaaggcagactctaataatctgtttaatactggttcaagtggtccagggaagttctacagtcctctccccaatgaccagttactaaaaacgctgactgaaaagaatagacaatggtttagtcttttgccacgaacaccctgtgatgacacttcacttactcatgccgatatgtcaactgcttctttggtgactcctcagtctcagccaccatctaagtcaccttcacctaccccagctcctcttggatcttctgctcagaatcctgttggcttaaatccatttgctttatcacctcttcaggtgaaaggtggagtatctatgatgggacttcagttttgtggatggcccactggtgtggttacttctaatattccatttacatcatctgtacctagtctaggatcggggttagggttatcagaaggaaatggtaattcattcttgacttccaatgttgcttcaagtaaaagtgaatctccagtaccacagaatgaaaaggccacttcagctcaacctgcagctgttgaagtagcaaaaccagtagattttcctagtccaaaacctattccagaagaaatgcagtttggttggtggagaattattgacccagaggacctaaaagctttgctcaaagtgctgcatctcagaggaataagagaaaaggcattacaaaaacaaattcagaaacatttggattatattactcaagcctgcctcaagaataaggatgttgctattattgaactgaatgaaaatgaagaaaaccaagtaactcgagatattgtggagaactggtcagtagaagaacaagcaatggaaatggatttgagtgtccttcaacaggtagaagatctagaaaggagagttgcatcagcaagtttgcaagtgaagggttggatgtgtccagagcctgcatcagaaagggaggacttggtatattttgaacataaatcatttactaaattgtgcaaggagcatgatggagaatttactggcgaagacgaaagcagtgcacatgcactagaacggaagagtgacaaccccctagatatagctgtaaccaggctggctgatttggagcggaacattgaaagaagaattgaagaggatattgctccagggctcagggtatggagaagggcattatcagaagctcgcagtgctgcacaggtagctctgtgcattcagcaattacagaaatcaatagcatgggaaaaatcaattatgaaagtttactgccaaatctgtcgaaagggagataatgaagaactgcttcttctttgtgatggctgtgacaaaggctgtcatacctactgccatagacccaagattacaacaatcccagatggagactggttttgtccagcttgcattgctaaggcaagtggtcaaactctaaaaatcaaaaaacttcatgtcaaaggaaaaaagactaatgagtcaaagaaaggcaagaaggtaactttaacaggagatactgaagatgaagactctgcatctacaagtagttcactaaaaagaggaaacaaagacctcaagaaaagaaaaatggaggaaaacacttctattaacttgtcaaaacaagaaagttttacttcagttaagaaacctaaaagagatgactccaaggacctagctctttgcagtatgattctgactgaaatggaaactcatgaggatgcatggccttttctacttcctgtaaacttgaaacttgttcctggttataagaaagttattaagaagcctatggatttttccacaattagagagaaactaagtagtggacagtatccaaaccttgaaacctttgctctagatgtcaggcttgtttttgacaactgtgaaacatttaatgaagatgattctgatataggcagagctggccacaatatgaggaagtattttgaaaaaaagtggacagatactttcaaagtgagc

SEQ ID NO: 5249 - DNA, 1227 bp, Homo sapiens
  source 1..1227: mol_type = genomic DNA
atgatagatctttggttgtacagttatcagagactattacagacgattgctgtactcgaggctcagcgttctcaagcagtccaagaccttgaaagtttaggcaggcaccagagagaagcactgaaaaatcccattggatttgtggaaaaactccagaagaaggctgatattgggcttccatatccacagagagttgttcaattgcctgagatcgtatgggaccaatatacccatagccttgggaattttgaaagagaatttaaaaatcgtaaaagacatactagaagagttaagctagtttttgataaagtaggtttacctgctagaccaaaaagtcctttagatcctaagaaggatggagagtccctttcatattctatgttgcctttgagtgatggtccagaaggctcaagcagtcgtcctcagatgataagaggacgcttgtgtgatgataccaaacctgaaacatttaaccagttgtggactgttgaagaacagaaaaagctggaacagctactcatcaaataccctcctgaagaagtagaatctcgacgctggcagaagatagcagatgaattgggcaacaggacagcaaaacaggttgccagccgagtacagaagtatttcataaagctaactaaagctggcattccagtaccaggcagaacaccaaacttatatatatactccaaaaagtcttcaacaagcagacgacagcaccctcttaataagcatctctttaagccttccactttcatgacttcacatgaaccgccagtgtatatggatgaagatgatgaccgatcttgttttcatagccacatgaacactgctgttgaagatgcatcagatgacgaaagtattcctatcatgtataggaatttacctgaatataaagaactattacagtttaaaaagttaaagaagcagaaacttcagcaaatgcaagctgaaagtggatttgtgcaacatgtgggctttaagtgtgataactgtggcatagaacccatccagggtgttcggtggcattgccaggattgtcctccagaaatgtctttggatttctgtgattcttgttcagactgtctacatgaaacagatattcacaaggaagatcaccaattagaacctatttataggtcagagacattcttagacagagactactgtgtgtctcagggcaccagttacaattaccttgacccaaactactttccagcaaacaga

SEQ ID NO: 5250 - DNA, 2709 bp, Homo sapiens
  source 1..2709: mol_type = genomic DNA
atggctgcttcccgatctactcgtgttacaagatcaacagtggggttaaacggcttggatgaatctttttgtggtagaactttaaggaatcgtagcattgcgcatcctgaagaaatctcttctaattctcaagtacgatcaagatcaccaaagaagagaccagagcctgtgccaattcagaaaggaaataataatgggagaaccactgatttaaaacagcagagtacccgagaatcatgggtaagccctaggaaaagaggactttcttcttcagaaaaggataacatagaaaggcaggctatagaaaattgtgagagaaggcaaacagaacctgtttcaccagttttaaaaagaattaagcgttgtcttagatctgaagcaccaaacagttcagaagaagattctcctataaaatcagacaaggagtcagtagaacagaggagtacagtagtggacaatgatgcagattttcaagggactaaacgagcttgtcgatgtcttatactggatgattgtgagaaaagggaaattaaaaaggtgaatgtcagtgaggaagggccacttaattctgcagtagttgaagaaatcacaggctatttggctgtcaatggtgttgatgacagtgattcagctgttataaactgtgatgactgtcagcctgatgggaacactaaacaaaatagcattggttcctatgtgttacaggaaaaatcagtagctgaaaatggggatacggatacccaaacttcaatgttccttgatagtaggaaggaggacagttatatagaccataaggtgccttgcacagattcacaagtgcaggtcaagttggaggaccacaaaatagtaactgcctgcttgcctgtggaacatgttaatcagctgactactgagccagctacagggcccttttctgaaactcagtcatctttaagggattctgaggaggaagtagatgtggtgggagatagcagtgcctcaaaagagcagtgtaaagaaaacaccaataacgaactggacacaagtcttgagagtatgccagcctccggagaacctgaaccatctcctgttctagactgtgtttcagctcaaatgatgtctttatcagaacctcaagaacatcgttatactctgagaacctcaccacgaagggcagcccctaccagaggtagtcccactaaaaacagttctccttacagagaaaatggacaatttgaggagaataatcttagtcctaatgaaacaaatgcaactgttagtgataatgtaagtcaatctcctacaaatcctggtgaaatttctcaaaatgaaaaagggatatgttgtgactctcaaaataatggaagtgaaggagtaagtaaaccaccctcagaggcaagactcaatattggacatttgccatctgccaaagagagtgccagtcagcacattacagaagaggaagatgatgatcctgatgtttattactttgaatcagatcatgtggcactgaaacacaacaaagattatcagagactattacagacgattgctgtactcgaggctcagcgttctcaagcagtccaagaccttgaaagtttaggcaggcaccagagagaagcactgaaaaatcccattggatttgtggaaaaactccagaagaaggctgatattgggcttccatatccacagagagttgttcaattgcctgagatcgtatgggaccaatatacccatagccttgggaattttgaaagagaatttaaaaatcgtaaaagacatactagaagagttaagctagtttttgataaagtaggtttacctgctagaccaaaaagtcctttagatcctaagaaggatggagagtccctttcatattctatgttgcctttgagtgatggtccagaaggctcaagcagtcgtcctcagatgataagaggacgcttgtgtgatgataccaaacctgaaacatttaaccagttgtggactgttgaagaacagaaaaagctggaacagctactcatcaaataccctcctgaagaagtagaatctcgacgctggcagaagatagcagatgaattgggcaacaggacagcaaaacaggttgccagccgagtacagaagtatttcataaagctaactaaagctggcattccagtaccaggcagaacaccaaacttatatatatactccaaaaagtcttcaacaagcagacgacagcaccctcttaataagcatctctttaagccttccactttcatgacttcacatgaaccgccagtgtatatggatgaagatgatgaccgatcttgttttcatagccacatgaacactgctgttgaagatgcatcagatgacgaaagtattcctatcatgtataggaatttacctgaatataaagaactattacagtttaaaaagttaaagaagcagaaacttcagcaaatgcaagctgaaagtggatttgtgcaacatgtgggctttaagtgtgataactgtggcatagaacccatccagggtgttcggtggcattgccaggattgtcctccagaaatgtctttggatttctgtgattcttgttcagactgtctacatgaaacagatattcacaaggaagatcaccaattagaacctatttataggtcagagacattcttagacagagactactgtgtgtctcagggcaccagttacaattaccttgacccaaactactttccagcaaacaga

SEQ ID NO: 5251 - DNA, 912 bp, Homo sapiens
  source 1..912: mol_type = genomic DNA
atgtcgcgctccttctatgtcgactcgctcatcatcaaggacacctcacggcctgcgccctcgctgcctgaaccgcaccccgggccggatttcttcatcccgcttggcatgccgcccccattggtgatgtccgtgtccggccccggctgcccgtcccgcaagagcggcgcgttctgcgtgtgccctctctgcgtcacttcgcacctgcactcctctcgggggtctgtgggcgccggcagcgggggcgcaggggccggggttaccggggccggaggcagtggggtggcaggggccgcaggggcactgcctctgcttaagggccagttctcttcggctcctggggacgcgcagttttgcccgcgggtgaaccatgcgcatcatcaccaccacccgccgcagcaccaccatcaccatcatcagccccagcagcctggctcggccgcggcggcggcagcagcagcagcggcggcggcggccgcggcggccttggggcacccgcagcaccacgcacctgtctgcaccgccaccacctacaacgtggcggacccgcggagattccactgcctcaccatgggaggctctgacgccagccaggtacccaatggcaagaggatgaggacggcgttcactagcacgcaactcctggagctggagagagaattctcttccaacatgtacctgtctcgactccggaggattgaaatcgccacttacctgaacctgtcggagaagcaggtgaaaatctggtttcagaaccgccgagtgaagcacaagaaggaggggaagggcacgcagaggaacagtcacgcgggctgcaagtgcgtcgggagccaggtgcactacgcgcgctccgaggatgaggactccctgtcgccggcctcagccaacgatgacaaggagatttccccctta

SEQ ID NO: 5252 - DNA, 915 bp, Homo sapiens
  source 1..915: mol_type = genomic DNA
atggaccgtttgggttcctttagcaatgatccctctgataagccaccttgccgaggctgctcctcctacctcatggagccttatatcaagtgtgctgaatgtgggccacctccttttttcctctgcttgcagtgtttcactcgaggctttgagtacaagaaacatcaaagcgatcatacttatgaaataatgacttcagattttcctgtccttgatcccagctggactgctcaagaagaaatggcccttttagaagctgtgatggactgtggctttggaaattggcaggatgtagccaatcaaatgtgcaccaagaccaaggaggagtgtgagaagcactatatgaagcatttcatcaataaccctctgtttgcatctaccctgctgaacctgaaacaagcagaggaagcaaaaactgctgacacagccattccatttcactctacagatgaccctccccgacctacctttgactccttgctttctcgggacatggccgggtacatgccagctcgagcagatttcattgaggaatttgacaattatgcagaatgggacttgagagacattgattttgttgaagatgactcggacattttacatgctctgaagatggctgtggtagatatctatcattccaggttaaaggagagacaaagacgaaaaaaaattataagagaccatggattaatcaaccttagaaagtttcaattaatggaacggcggtatcccaaggaggtccaggacctgtatgaaacaatgaggcgatttgcaagaattgtggggccagtggaacatgacaaattcattgaaagccatgcatgtaggtggtttttgagccttgagcagtatttgtgtgtgtatatttatataaataggagagataatggtgtgttttatgtgaagttctataaa

SEQ ID NO: 5253 - DNA, 1329 bp, Homo sapiens
  source 1..1329: mol_type = genomic DNA
atggaccgtttgggttcctttagcaatgatccctctgataagccaccttgccgaggctgctcctcctacctcatggagccttatatcaagtgtgctgaatgtgggccacctccttttttcctctgcttgcagtgtttcactcgaggctttgagtacaagaaacatcaaagcgatcatacttatgaaataatgacttcagattttcctgtccttgatcccagctggactgctcaagaagaaatggcccttttagaagctgtgatggactgtggctttggaaattggcaggatgtagccaatcaaatgtgcaccaagaccaaggaggagtgtgagaagcactatatgaagcatttcatcaataaccctctgtttgcatctaccctgctgaacctgaaacaagcagaggaagcaaaaactgctgacacagccattccatttcactctacagatgaccctccccgacctacctttgactccttgctttctcgggacatggccgggtacatgccagctcgagcagatttcattgaggaatttgacaattatgcagaatgggacttgagagacattgattttgttgaagatgactcggacattttacatgctctgaagatggctgtggtagatatctatcattccaggttaaaggagagacaaagacgaaaaaaaattataagagaccatggattaatcaaccttagaaagtttcaattaatggaacggcggtatcccaaggaggtccaggacctgtatgaaacaatgaggcgatttgcaagaattgtggggccagtggaacatgacaaattcattgaaagccatgcattggaatttgaactccgaagggaaatcaagaggctccaagaatacaggacagcaggcattaccaatttttgtagtgccagaacctacgatcacctcaagaagacacgggaggaagagcgccttaaacgcactatgctctcagaagttctccagtatatccaggacagtagtgcttgccagcagtggctccgccggcaagctgacattgattccggcctgagtccttccattccaatggcttcgaattcaggtagacggagtgcaccacccttgaacctcactggcctccctggcacagagaagctgaatgaaaaagaaaaggagctctgtcagatggtgaggttggtccctggagcctatttagaatacaaatctgctctattgaacgaatgtaacaagcaaggaggcttaagactggcgcaggcaagagcactcatcaagatagatgtgaacaaaacccggaaaatctatgatttcctcatcagagaaggatacatcactaaaggc

SEQ ID NO: 5254 - DNA, 1260 bp, Homo sapiens
  source 1..1260: mol_type = genomic DNA
atggcggagctggggaagaagtactgcgtgtactgcctggccgaggtgagcccgctgcgcttccgctgcaccgagtgccaggacatcgagctgtgccccgagtgcttctcggccggcgccgagatcggccaccaccgccgctaccacggctaccagctggtggacggcgggcgcttcacgctctgggggcccgaggccgagggcggctggaccagtcgcgaggagcagctgctgctggacgccatcgagcagttcggcttcggaaactgggaagatatggctgcccacgttggtgcttcccggactccccaagaggtgatggagcattacgtgagcatgtacatccacgggaacctggggaaggcctgcatccccgacaccatccccaaccgcgtgacagaccacacctgtcccagcggaggccccctctcacccagcctcaccaccccgctgcccccgctggacatctctgtggctgagcagcagcagctgggctacatgccgctgcgggatgattacgagatcgagtatgaccaggatgccgagacgctcatcagcgggctctctgtcaactatgatgacgacgacgtggagatcgagctgaagcgcgcccacgtggacatgtacgtgcggaagctgaaagagagacagcggcggaagaacatcgcccgtgactacaatctggtgccagccttcctggggaaggacaagaaggagaaggaaaaggcgctgaagcgcaagatcaccaaggaggagaaggagctgcgcctgaagctgaggccgctgtaccagttcatgtcatgcaaggagtttgatgacctttttgaaaacatgcacaaagaaaaaatgctccgggccaagatccgagaactgcagcggtaccggcgaaacgggatcaccaagatggaagagtcggcagagtacgaggcagcgcggcataaacgggagaagaggaaggagaacaaaaacctagccggctccaaacggggaaaggaggacggcaaagacagcgagttcgccgccattgagaaccttccaggcttcgagctcctgtcagatcgcgagaaggtgctctgcagctctttaaacttgagtccagcccgctacgtgactgtgaagactattataattaaagaccacctccagaagcggcaaggaatcccctccaaaagccgccttcctagctacctggacaaagtcctaaagaaaaggattttgaatttcctcacagaaagcggctggatctccagggacgcgtct

SEQ ID NO: 5255 - DNA, 792 bp, Homo sapiens
  source 1..792: mol_type = genomic DNA
atgccgcgctccttcctggtggactcgctagtgctgcgcgaggcgggcgagaagaaggcgcccgagggcagcccgccgccgctcttcccctacgctgtgcccccgccgcacgcgctgcacggtctctcgcctggcgcctgccacgcgcgcaaggctgggctgctgtgcgtgtgcccgctctgcgtcaccgcctcgcagctgcatgggccccccgggccgcccgcgctgcctctactcaaggcttccttcccacccttcggctcgcagtactgccacgcgcccctgggccgccagcactctgctgtgtcgcccggggtcgctcacggcccggccgccgctgctgctgccgccgcgctctaccagacctcctacccgctgcctgaccccaggcagttccactgcatctctgtggacagcagctctaaccagctgcccagcagcaagaggatgcgcacggctttcaccagcacgcagctgctagagctggagcgcgagttcgcttctaatatgtacctgtcccgcctacgtcgcatcgagatcgcgacctacctgaatctgtccgagaagcaggtgaagatctggtttcagaaccgccgagtgaagcacaagaaggagggcaagggcagcaaccatcgtggcggcggcggcgggggtgccggtggtggcgggagcgcaccgcaaggctgcaagtgcgcatcgctctcctcagccaagtgctccgaggatgacgacgaattgcccatgtctccgtcctcctcagggaaggacgaccgggatcttacggtcactccc

SEQ ID NO: 5256 - DNA, 1620 bp, Homo sapiens
  source 1..1620: mol_type = genomic DNA
atggaactcttaacattcagggatgtggccatagaattctctccagaagagtggaaatgcctagaccctgcccaacagaatttatatagagatgtgatgttggagaactacagaaacctcgtctccctggctgtgtattcttattacaaccaaggcattttaccagagcaaggcatacaagattcattcaaaaaagcaacactgggaagatatgggagctgtggccttgaaaatatatgcttatggaaaaactgggaaagtataggtgaaggtgaaggacaaaaggaatgttataatctatgtagccaatatttgacaactagtcataacaaacatttaactgtgaaaggagacaaagaatatagaatatttcagaagaagcctcagtttctgtcagctgctcctacagaaccatgtattcctatgaataaatatcaacataaatttttgaaatctgtcttttgtaataaaaatcagataaattttaaccatgactcaaatattagtaaacatcatagtactcattttctagaaaactattacaattgtaatgaatgtgaaaaagtattttaccaatcctcaaagcttattttccctgaaaatatccatattcaaaaaaagccttacaactctaatgaatgtggtgaaacttctgacccattctcaaagcttactcaacatcaaagaatttatattggagagagctcacaaagatgtaataaaaaatgtataatagtctttagtcaatcacatctaaagggacataagataattaacactggagaaaaatcagtgaaatataaagaacgtggcaaagcttttaccaggggcttacatcttggacatcagaaaattcatactggagagaaaccttacaaatgtaaaaaatgtgacaaagcctttaacaagagttcacaccttgctcaacatcagagaatccatactggagagaagcctttcaagtgtaaggaatgtggcaaagcttttaacagaggctcataccttactcaacatcagagaatccatactggagagagagctttcaaatgtgaagaatgtggcaaagcctttaacagggggtcataccttactcaacaccagagaatccataccggagagaaacctttcagatgtaaggaatgtggcaaagcctttaatagaagctcatacgttactcagcatcagagaatgcatactggagagaaacctttcaagtgtaaggaatgtggcaaagcttttaacagagcttcacaccttactcaacatcagagaatccatactggagagaaacacttcaaatgtaaagaatgtggcaaagcctttaacaggggctcacaccttactcgacatcaaagaatccatactggagagaagtctttcaaatgtgaagaatgtggcaaagcttttatctggggctcacaccttactcaacatcagagagtccatactggagagaaattcttcaaatgtaaagaatgtggcaaagcttttaccaggagctcacaccttactcaacatcagagaattcatactggagagaaacctttcaaatgtaaagaatgtggcaaagcttttaacagacgctcaacccttactcaacatcaaataattcataccagg

SEQ ID NO: 5257 - DNA, 1779 bp, Homo sapiens
  source 1..1779: mol_type = genomic DNA
atggccgcgcacaggccggtggaatgggtccaggccgtggtcagccgcttcgacgagcagcttccaataaaaacaggacagcagaacacacataccaaagtcagtactgagcacaacaaggaatgtctaatcaatatttccaaatacaagttttctttggttataagcggcctcactactattttaaagaatgttaacaatatgagaatatttggagaagctgctgaaaaaaatttatatctctctcagttgattatattggatacactggaaaaatgtcttgctgggcaaccaaaggacacaatgagattagatgaaacgatgctggtcaaacagttgctgccagaaatctgccattttcttcacacctgtcgtgaaggaaaccagcatgcagctgaacttcggaattctgcctctggggttttattttctctcagctgcaacaacttcaatgcagtctttagtcgcatttctaccaggttacaggaattaactgtttgttcagaagacaatgttgatgttcatgatatagaattgttacagtatatcaatgtggattgtgcaaaattaaaacgactcctgaaggaaacagcatttaaatttaaagccctaaagaaggttgcgcagttagcagttataaatagcctggaaaaggcattttggaactgggtagaaaattatccagatgaatttacaaaactgtaccagatcccacagactgatatggctgaatgtgcagaaaagctatttgacttggtggatggttttgctgaaagcaccaaacgtaaagcagcagtttggccactacaaatcattctccttatcttgtgtccagaaataatccaggatatatccaaagacgtggttgatgaaaacaacatgaataagaagttatttctggacagtctacgaaaagctcttgctggccatggaggaagtaggcagctgacagaaagtgctgcaattgcctgtgtcaaactgtgtaaagcaagtacttacatcaattgggaagataactctgtcattttcctacttgttcagtccatggtggttgatcttaagaacctgctttttaatccaagtaagccattctcaagaggcagtcagcctgcagatgtggatctaatgattgactgccttgtttcttgctttcgtataagccctcacaacaaccaacactttaagatctgcctggctcagaattcaccttctacatttcactatgtgctggtaaattcactccatcgaatcatcaccaattccgcattggattggtggcctaagattgatgctgtgtattgtcactcggttgaacttcgaaatatgtttggtgaaacacttcataaagcagtgcaaggttgtggagcacacccagcaatacgaatggcaccgagtcttacatttaaagaaaaagtaacaagccttaaatttaaagaaaaacctacagacctggagacaagaagctataagtatcttctcttgtccatggtgaaactaattcatgcagatccaaagctcttgctttgtaatccaagaaaacaggggcccgaaacccaaggcagtacagcagaattaattacagggctcgtccaactggtccctcagtcacacatgccagagattgctcaggaagcaatggaggctctgctggttcttcatcagttagatagcattgatttgtggaatcctgatgctcctgtagaaacattttgggagattaggtatatgtacttttattttttaaattcaacttttaaattttattttgtatttttgtct

SEQ ID NO: 5258 - DNA, 8517 bp, Homo sapiens
  source 1..8517: mol_type = genomic DNA
atggccgcgcacaggccggtggaatgggtccaggccgtggtcagccgcttcgacgagcagcttccaataaaaacaggacagcagaacacacataccaaagtcagtactgagcacaacaaggaatgtctaatcaatatttccaaatacaagttttctttggttataagcggcctcactactattttaaagaatgttaacaatatgagaatatttggagaagctgctgaaaaaaatttatatctctctcagttgattatattggatacactggaaaaatgtcttgctgggcaaccaaaggacacaatgagattagatgaaacgatgctggtcaaacagttgctgccagaaatctgccattttcttcacacctgtcgtgaaggaaaccagcatgcagctgaacttcggaattctgcctctggggttttattttctctcagctgcaacaacttcaatgcagtctttagtcgcatttctaccaggttacaggaattaactgtttgttcagaagacaatgttgatgttcatgatatagaattgttacagtatatcaatgtggattgtgcaaaattaaaacgactcctgaaggaaacagcatttaaatttaaagccctaaagaaggttgcgcagttagcagttataaatagcctggaaaaggcattttggaactgggtagaaaattatccagatgaatttacaaaactgtaccagatcccacagactgatatggctgaatgtgcagaaaagctatttgacttggtggatggttttgctgaaagcaccaaacgtaaagcagcagtttggccactacaaatcattctccttatcttgtgtccagaaataatccaggatatatccaaagacgtggttgatgaaaacaacatgaataagaagttatttctggacagtctacgaaaagctcttgctggccatggaggaagtaggcagctgacagaaagtgctgcaattgcctgtgtcaaactgtgtaaagcaagtacttacatcaattgggaagataactctgtcattttcctacttgttcagtccatggtggttgatcttaagaacctgctttttaatccaagtaagccattctcaagaggcagtcagcctgcagatgtggatctaatgattgactgccttgtttcttgctttcgtataagccctcacaacaaccaacactttaagatctgcctggctcagaattcaccttctacatttcactatgtgctggtaaattcactccatcgaatcatcaccaattccgcattggattggtggcctaagattgatgctgtgtattgtcactcggttgaacttcgaaatatgtttggtgaaacacttcataaagcagtgcaaggttgtggagcacacccagcaatacgaatggcaccgagtcttacatttaaagaaaaagtaacaagccttaaatttaaagaaaaacctacagacctggagacaagaagctataagtatcttctcttgtccatggtgaaactaattcatgcagatccaaagctcttgctttgtaatccaagaaaacaggggcccgaaacccaaggcagtacagcagaattaattacagggctcgtccaactggtccctcagtcacacatgccagagattgctcaggaagcaatggaggctctgctggttcttcatcagttagatagcattgatttgtggaatcctgatgctcctgtagaaacattttgggagattagctcacaaatgcttttttacatctgcaagaaattaactagtcatcaaatgcttagtagcacagaaattctcaagtggttgcgggaaatattgatctgcaggaataaatttcttcttaaaaataagcaggcagatagaagttcctgtcactttctccttttttacggggtaggatgtgatattccttctagtggaaataccagtcaaatgtccatggatcatgaagaattactacgtactcctggagcctctctccggaagggaaaagggaactcctctatggatagtgcagcaggatgcagcggaacccccccgatttgccgacaagcccagaccaaactagaagtggccctgtacatgtttctgtggaaccctgacactgaagctgttctggttgccatgtcctgtttccgccacctctgtgaggaagcagatatccggtgtggggtggatgaagtgtcagtgcataacctcttgcccaactataacacattcatggagtttgcctctgtcagcaatatgatgtcaacaggaagagcagcacttcagaaaagagtgatggcactgctgaggcgcattgagcatcccactgcaggaaacactgaggcttgggaagatacacatgcaaaatgggaacaagcaacaaagctaatccttaactatccaaaagccaaaatggaagatggccaggctgctgaaagccttcacaagaccattgttaagaggcgaatgtcccatgtgagtggaggaggatccatagatttgtctgacacagactccctacaggaatggatcaacatgactggcttcctttgtgcccttgggggagtgtgcctccagcagagaagcaattctggcctggcaacctatagcccacccatgggtccagtcagtgaacgtaagggttctatgatttcagtgatgtcttcagagggaaacgcagatacacctgtcagcaaatttatggatcggctgttgtccttaatggtgtgtaaccatgagaaagtgggacttcaaatacggaccaatgttaaggatctggtgggtctagaattgagtcctgctctgtatccaatgctatttaacaaattgaagaataccatcagcaagttttttgactcccaaggacaggttttattgactgataccaatactcaatttgtagaacaaaccatagctataatgaagaacttgctagataatcatactgaaggcagctctgaacatctagggcaagctagcattgaaacaatgatgttaaatctggtcaggtatgttcgtgtgcttgggaatatggtccatgcaattcaaataaaaacgaaactgtgtcaattagttgaagtaatgatggcaaggagagatgacctctcattttgccaagagatgaaatttaggaataagatggtagaatacctgacagactgggttatgggaacatcaaaccaagcagcagatgatgatgtaaaatgtcttacaagagatttggaccaggcaagcatggaagcagtagtttcacttctagctggtctccctctgcagcctgaagaaggagatggtgtggaattgatggaagccaaatcacagttatttcttaaatacttcacattatttatgaaccttttgaatgactgcagtgaagttgaagatgaaagtgcgcaaacaggtggcaggaaacgtggcatgtctcggaggctggcatcactgaggcactgtacggtccttgcaatgtcaaacttactcaatgccaacgtagacagtggtctcatgcactccataggcttaggttaccacaaggatctccagacaagagctacatttatggaagttctgacaaaaatccttcaacaaggcacagaatttgacacacttgcagaaacagtattggctgatcggtttgagagattggtggaactggtcacaatgatgggtgatcaaggagaactccctatagcgatggctctggccaatgtggttccttgttctcagtgggatgaactagctcgagttctggttactctgtttgattctcggcatttactctaccaactgctctggaacatgttttctaaagaagtagaattggcagactccatgcagactctcttccgaggcaacagcttggccagtaaaataatgacattctgtttcaaggtatatggtgctacctatctacaaaaactcctggatcctttattacgaattgtgatcacatcctctgattggcaacatgttagctttgaagtggatcctaccaggttagaaccatcagagagccttgaggaaaaccagcggaacctccttcagatgactgaaaagttcttccatgccatcatcagttcctcctcagaattcccccctcaacttcgaagtgtgtgccactgtttataccaggcaacttgccactccctactgaataaagctacagtaaaagaaaaaaaggaaaacaaaaaatcagtggttagccagcgtttccctcagaacagcatcggtgcagtaggaagtgccatgttcctcagatttatcaatcctgccattgtctcaccgtatgaagcagggattttagataaaaagccaccacctagaatcgaaaggggcttgaagttaatgtcaaagatacttcagagtattgccaatcatgttctcttcacaaaagaagaacatatgcggcctttcaatgattttgtgaaaagcaactttgatgcagcacgcaggtttttccttgatatagcatctgattgtcctacaagtgatgcagtaaatcatagtctttccttcataagtgacggcaatgtgcttgctttacatcgtctactctggaacaatcaggagaaaattgggcagtatctttccagcaacagggatcataaagctgttggaagacgaccttttgataagatggcaacacttcttgcatacctgggtcctccagagcacaaacctgtggcagatacacactggtccagccttaaccttaccagttcaaagtttgaggaatttatgactaggcatcaggtacatgaaaaagaagaattcaaggctttgaaaacgttaagtattttctaccaagctgggacttccaaagctgggaatcctattttttattatgttgcacggaggttcaaaactggtcaaatcaatggtgatttgctgatataccatgtcttactgactttaaagccatattatgcaaagccatatgaaattgtagtggaccttacccataccgggcctagcaatcgctttaaaacagactttctctctaagtggtttgttgtttttcctggctttgcttacgacaacgtctccgcagtctatatctataactgtaactcctgggtcagggagtacaccaagtatcatgagcggctgctgactggcctcaaaggtagcaaaaggcttgttttcatagactgtcctgggaaactggctgagcacatagagcatgaacaacagaaactacctgctgccaccttggctttagaagaggacctgaaggtattccacaatgctctcaagctagctcacaaagacaccaaagtttctattaaagttggttctactgctgtccaagtaacttcagcagagcgaacaaaagtcctagggcaatcagtctttctaaatgacatttattatgcttcggaaattgaagaaatctgcctagtagatgagaaccagttcaccttaaccattgcaaaccagggcacgccgctcaccttcatgcaccaggagtgtgaagccattgtccagtctatcattcatatccggacccgctgggaactgtcacagcccgactctatcccccaacacaccaagattcggccaaaagatgtccctgggacactgctcaatatcgcattacttaatttaggcagttctgacccgagtttacggtcagctgcctataatcttctgtgtgccttaacttgtacctttaatttaaaaatcgagggccagttactagagacatcaggtttatgtatccctgccaacaacaccctctttattgtctctattagtaagacactggcagccaatgagccacacctcacgttagaatttttggaagagtgtatttctggatttagcaaatctagtattgaattgaaacacctttgtttggaatacatgactccatggctgtcaaatctagttcgtttttgcaagcataatgatgatgccaaacgacaaagagttactgctattcttgacaagctgataacaatgaccatcaatgaaaaacagatgtacccatctattcaagcaaaaatatggggaagccttgggcagattacagatctgcttgatgttgtactagacagtttcatcaaaaccagtgcaacaggtggcttgggatcaataaaagctgaggtgatggcagatactgctgtagctttggcttctggaaatgtgaaattggtttcaagcaaggttattggaaggatgtgcaaaataattgacaagacatgcttatctccaactcctactttagaacaacatcttatgtgggatgatattgctattttagcacgctacatgctgatgctgtccttcaacaattcccttgatgtggcagctcatcttccctacctcttccacgttgttactttcttagtagccacaggtccgctctcccttagagcttccacacatggactggtcattaatatcattcactctctgtgtacttgttcacagcttcattttagtgaagagaccaagcaagttttgagactcagtctgacagagttctcattacccaaattttacttgctgtttggcattagcaaagtcaagtcagctgctgtcattgccttccgttccagttaccgggacaggtcattctctcctggctcctatgagagagagacttttgctttgacatccttggaaacagtcacagaagctttgttggagatcatggaggcatgcatgagagatattccaacgtgcaagtggctggaccagtggacagaactagctcaaagatttgcattccaatataatccatccctgcaaccaagagctcttgttgtctttgggtgtattagcaaacgagtgtctcatgggcagataaagcagataatccgtattcttagcaaggcacttgagagttgcttaaaaggacctgacacttacaacagtcaagttctgatagaagctacagtaatagcactaaccaaattacagccacttcttaataaggactcgcctctgcacaaagccctcttttgggtagctgtggctgtgctgcagcttgatgaggtcaacttgtattcagcaggtaccgcacttcttgaacaaaacctgcatactttagatagtctccgtatattcaatgacaagagtccagaggaagtatttatggcaatccggaatcctctggagtggcactgcaagcaaatggatcattttgttggactcaatttcaactctaactttaactttgcattggttggacaccttttaaaagggtacaggcatccttcacctgctattgttgcaagaacagtcagaattttacatacactactaactctggttaacaaacacagaaattgtgacaaatttgaagtgaatacacagagcgtggcctacttagcagctttacttacagtgtctgaagaagttcgaagtcgctgcagcctaaaacatagaaagtcacttcttcttactgatatttcaatggaaaatgttcctatggatacatatcccattcatcatggtgacccttcctataggacactaaaggagactcagccatggtcctctcccaaaggttctgaaggataccttgcagccacctatccaactgtcggccagaccagtccccgagccaggaaatccatgagcctggacatggggcaaccttctcaggccaacactaagaagttgcttggaacaaggaaaagttttgatcacttgatatcagacacaaaggctcctaaaaggcaagaaatggaatcagggatcacaacaccccccaaaatgaggagagtagcagaaactgattatgaaatggaaactcagaggatttcctcatcacaacagcacccacatttacgtaaagtttcagtgtctgaatcaaatgttctcttggatgaagaagtacttactgatccgaagatccaggcgctgcttcttactgttctagctacactggtaaaatataccacagatgagtttgatcaacgaattctttatgaatacttagcagaggccagtgttgtgtttcccaaagtctttcctgttgtgcataatttgttggactctaagatcaacaccctgttatcattgtgccaagatccaaatttgttaaatccaatccatggaattgtgcagagtgtggtgtaccatgaagaatccccaccacaataccaaacatcttacctgcaaagttttggttttaatggcttgtggcggtttgcaggaccgttttcaaagcaaacacaaattccagactatgctgagcttattgttaagtttcttgatgccttgattgacacgtacctgcctggaattgatgaagaaaccagtgaagaatccctcctgactcccacatctccttaccctcctgcactgcagagccagcttagtatcactgccaaccttaacctttctaattccatgacctcacttgcaacttcccagcattccccaggaatcgacaaggagaacgttgaactctcccctaccactggccactgtaacagtggacgaactcgccacggatccgcaagccaagtgcagaagcaaagaagcgctggcagtttcaaacgtaatagcattaagaagatcgtg

SEQ ID NO: 5259 - DNA, 8454 bp, Homo sapiens
  source 1..8454: mol_type = genomic DNA
atggccgcgcacaggccggtggaatgggtccaggccgtggtcagccgcttcgacgagcagcttccaataaaaacaggacagcagaacacacataccaaagtcagtactgagcacaacaaggaatgtctaatcaatatttccaaatacaagttttctttggttataagcggcctcactactattttaaagaatgttaacaatatgagaatatttggagaagctgctgaaaaaaatttatatctctctcagttgattatattggatacactggaaaaatgtcttgctgggcaaccaaaggacacaatgagattagatgaaacgatgctggtcaaacagttgctgccagaaatctgccattttcttcacacctgtcgtgaaggaaaccagcatgcagctgaacttcggaattctgcctctggggttttattttctctcagctgcaacaacttcaatgcagtctttagtcgcatttctaccaggttacaggaattaactgtttgttcagaagacaatgttgatgttcatgatatagaattgttacagtatatcaatgtggattgtgcaaaattaaaacgactcctgaaggaaacagcatttaaatttaaagccctaaagaaggttgcgcagttagcagttataaatagcctggaaaaggcattttggaactgggtagaaaattatccagatgaatttacaaaactgtaccagatcccacagactgatatggctgaatgtgcagaaaagctatttgacttggtggatggttttgctgaaagcaccaaacgtaaagcagcagtttggccactacaaatcattctccttatcttgtgtccagaaataatccaggatatatccaaagacgtggttgatgaaaacaacatgaataagaagttatttctggacagtctacgaaaagctcttgctggccatggaggaagtaggcagctgacagaaagtgctgcaattgcctgtgtcaaactgtgtaaagcaagtacttacatcaattgggaagataactctgtcattttcctacttgttcagtccatggtggttgatcttaagaacctgctttttaatccaagtaagccattctcaagaggcagtcagcctgcagatgtggatctaatgattgactgccttgtttcttgctttcgtataagccctcacaacaaccaacactttaagatctgcctggctcagaattcaccttctacatttcactatgtgctggtaaattcactccatcgaatcatcaccaattccgcattggattggtggcctaagattgatgctgtgtattgtcactcggttgaacttcgaaatatgtttggtgaaacacttcataaagcagtgcaaggttgtggagcacacccagcaatacgaatggcaccgagtcttacatttaaagaaaaagtaacaagccttaaatttaaagaaaaacctacagacctggagacaagaagctataagtatcttctcttgtccatggtgaaactaattcatgcagatccaaagctcttgctttgtaatccaagaaaacaggggcccgaaacccaaggcagtacagcagaattaattacagggctcgtccaactggtccctcagtcacacatgccagagattgctcaggaagcaatggaggctctgctggttcttcatcagttagatagcattgatttgtggaatcctgatgctcctgtagaaacattttgggagattagctcacaaatgcttttttacatctgcaagaaattaactagtcatcaaatgcttagtagcacagaaattctcaagtggttgcgggaaatattgatctgcaggaataaatttcttcttaaaaataagcaggcagatagaagttcctgtcactttctccttttttacggggtaggatgtgatattccttctagtggaaataccagtcaaatgtccatggatcatgaagaattactacgtactcctggagcctctctccggaagggaaaagggaactcctctatggatagtgcagcaggatgcagcggaacccccccgatttgccgacaagcccagaccaaactagaagtggccctgtacatgtttctgtggaaccctgacactgaagctgttctggttgccatgtcctgtttccgccacctctgtgaggaagcagatatccggtgtggggtggatgaagtgtcagtgcataacctcttgcccaactataacacattcatggagtttgcctctgtcagcaatatgatgtcaacaggaagagcagcacttcagaaaagagtgatggcactgctgaggcgcattgagcatcccactgcaggaaacactgaggcttgggaagatacacatgcaaaatgggaacaagcaacaaagctaatccttaactatccaaaagccaaaatggaagatggccaggctgctgaaagccttcacaagaccattgttaagaggcgaatgtcccatgtgagtggaggaggatccatagatttgtctgacacagactccctacaggaatggatcaacatgactggcttcctttgtgcccttgggggagtgtgcctccagcagagaagcaattctggcctggcaacctatagcccacccatgggtccagtcagtgaacgtaagggttctatgatttcagtgatgtcttcagagggaaacgcagatacacctgtcagcaaatttatggatcggctgttgtccttaatggtgtgtaaccatgagaaagtgggacttcaaatacggaccaatgttaaggatctggtgggtctagaattgagtcctgctctgtatccaatgctatttaacaaattgaagaataccatcagcaagttttttgactcccaaggacaggttttattgactgataccaatactcaatttgtagaacaaaccatagctataatgaagaacttgctagataatcatactgaaggcagctctgaacatctagggcaagctagcattgaaacaatgatgttaaatctggtcaggtatgttcgtgtgcttgggaatatggtccatgcaattcaaataaaaacgaaactgtgtcaattagttgaagtaatgatggcaaggagagatgacctctcattttgccaagagatgaaatttaggaataagatggtagaatacctgacagactgggttatgggaacatcaaaccaagcagcagatgatgatgtaaaatgtcttacaagagatttggaccaggcaagcatggaagcagtagtttcacttctagctggtctccctctgcagcctgaagaaggagatggtgtggaattgatggaagccaaatcacagttatttcttaaatacttcacattatttatgaaccttttgaatgactgcagtgaagttgaagatgaaagtgcgcaaacaggtggcaggaaacgtggcatgtctcggaggctggcatcactgaggcactgtacggtccttgcaatgtcaaacttactcaatgccaacgtagacagtggtctcatgcactccataggcttaggttaccacaaggatctccagacaagagctacatttatggaagttctgacaaaaatccttcaacaaggcacagaatttgacacacttgcagaaacagtattggctgatcggtttgagagattggtggaactggtcacaatgatgggtgatcaaggagaactccctatagcgatggctctggccaatgtggttccttgttctcagtgggatgaactagctcgagttctggttactctgtttgattctcggcatttactctaccaactgctctggaacatgttttctaaagaagtagaattggcagactccatgcagactctcttccgaggcaacagcttggccagtaaaataatgacattctgtttcaaggtatatggtgctacctatctacaaaaactcctggatcctttattacgaattgtgatcacatcctctgattggcaacatgttagctttgaagtggatcctaccaggttagaaccatcagagagccttgaggaaaaccagcggaacctccttcagatgactgaaaagttcttccatgccatcatcagttcctcctcagaattcccccctcaacttcgaagtgtgtgccactgtttataccaggtggttagccagcgtttccctcagaacagcatcggtgcagtaggaagtgccatgttcctcagatttatcaatcctgccattgtctcaccgtatgaagcagggattttagataaaaagccaccacctagaatcgaaaggggcttgaagttaatgtcaaagatacttcagagtattgccaatcatgttctcttcacaaaagaagaacatatgcggcctttcaatgattttgtgaaaagcaactttgatgcagcacgcaggtttttccttgatatagcatctgattgtcctacaagtgatgcagtaaatcatagtctttccttcataagtgacggcaatgtgcttgctttacatcgtctactctggaacaatcaggagaaaattgggcagtatctttccagcaacagggatcataaagctgttggaagacgaccttttgataagatggcaacacttcttgcatacctgggtcctccagagcacaaacctgtggcagatacacactggtccagccttaaccttaccagttcaaagtttgaggaatttatgactaggcatcaggtacatgaaaaagaagaattcaaggctttgaaaacgttaagtattttctaccaagctgggacttccaaagctgggaatcctattttttattatgttgcacggaggttcaaaactggtcaaatcaatggtgatttgctgatataccatgtcttactgactttaaagccatattatgcaaagccatatgaaattgtagtggaccttacccataccgggcctagcaatcgctttaaaacagactttctctctaagtggtttgttgtttttcctggctttgcttacgacaacgtctccgcagtctatatctataactgtaactcctgggtcagggagtacaccaagtatcatgagcggctgctgactggcctcaaaggtagcaaaaggcttgttttcatagactgtcctgggaaactggctgagcacatagagcatgaacaacagaaactacctgctgccaccttggctttagaagaggacctgaaggtattccacaatgctctcaagctagctcacaaagacaccaaagtttctattaaagttggttctactgctgtccaagtaacttcagcagagcgaacaaaagtcctagggcaatcagtctttctaaatgacatttattatgcttcggaaattgaagaaatctgcctagtagatgagaaccagttcaccttaaccattgcaaaccagggcacgccgctcaccttcatgcaccaggagtgtgaagccattgtccagtctatcattcatatccggacccgctgggaactgtcacagcccgactctatcccccaacacaccaagattcggccaaaagatgtccctgggacactgctcaatatcgcattacttaatttaggcagttctgacccgagtttacggtcagctgcctataatcttctgtgtgccttaacttgtacctttaatttaaaaatcgagggccagttactagagacatcaggtttatgtatccctgccaacaacaccctctttattgtctctattagtaagacactggcagccaatgagccacacctcacgttagaatttttggaagagtgtatttctggatttagcaaatctagtattgaattgaaacacctttgtttggaatacatgactccatggctgtcaaatctagttcgtttttgcaagcataatgatgatgccaaacgacaaagagttactgctattcttgacaagctgataacaatgaccatcaatgaaaaacagatgtacccatctattcaagcaaaaatatggggaagccttgggcagattacagatctgcttgatgttgtactagacagtttcatcaaaaccagtgcaacaggtggcttgggatcaataaaagctgaggtgatggcagatactgctgtagctttggcttctggaaatgtgaaattggtttcaagcaaggttattggaaggatgtgcaaaataattgacaagacatgcttatctccaactcctactttagaacaacatcttatgtgggatgatattgctattttagcacgctacatgctgatgctgtccttcaacaattcccttgatgtggcagctcatcttccctacctcttccacgttgttactttcttagtagccacaggtccgctctcccttagagcttccacacatggactggtcattaatatcattcactctctgtgtacttgttcacagcttcattttagtgaagagaccaagcaagttttgagactcagtctgacagagttctcattacccaaattttacttgctgtttggcattagcaaagtcaagtcagctgctgtcattgccttccgttccagttaccgggacaggtcattctctcctggctcctatgagagagagacttttgctttgacatccttggaaacagtcacagaagctttgttggagatcatggaggcatgcatgagagatattccaacgtgcaagtggctggaccagtggacagaactagctcaaagatttgcattccaatataatccatccctgcaaccaagagctcttgttgtctttgggtgtattagcaaacgagtgtctcatgggcagataaagcagataatccgtattcttagcaaggcacttgagagttgcttaaaaggacctgacacttacaacagtcaagttctgatagaagctacagtaatagcactaaccaaattacagccacttcttaataaggactcgcctctgcacaaagccctcttttgggtagctgtggctgtgctgcagcttgatgaggtcaacttgtattcagcaggtaccgcacttcttgaacaaaacctgcatactttagatagtctccgtatattcaatgacaagagtccagaggaagtatttatggcaatccggaatcctctggagtggcactgcaagcaaatggatcattttgttggactcaatttcaactctaactttaactttgcattggttggacaccttttaaaagggtacaggcatccttcacctgctattgttgcaagaacagtcagaattttacatacactactaactctggttaacaaacacagaaattgtgacaaatttgaagtgaatacacagagcgtggcctacttagcagctttacttacagtgtctgaagaagttcgaagtcgctgcagcctaaaacatagaaagtcacttcttcttactgatatttcaatggaaaatgttcctatggatacatatcccattcatcatggtgacccttcctataggacactaaaggagactcagccatggtcctctcccaaaggttctgaaggataccttgcagccacctatccaactgtcggccagaccagtccccgagccaggaaatccatgagcctggacatggggcaaccttctcaggccaacactaagaagttgcttggaacaaggaaaagttttgatcacttgatatcagacacaaaggctcctaaaaggcaagaaatggaatcagggatcacaacaccccccaaaatgaggagagtagcagaaactgattatgaaatggaaactcagaggatttcctcatcacaacagcacccacatttacgtaaagtttcagtgtctgaatcaaatgttctcttggatgaagaagtacttactgatccgaagatccaggcgctgcttcttactgttctagctacactggtaaaatataccacagatgagtttgatcaacgaattctttatgaatacttagcagaggccagtgttgtgtttcccaaagtctttcctgttgtgcataatttgttggactctaagatcaacaccctgttatcattgtgccaagatccaaatttgttaaatccaatccatggaattgtgcagagtgtggtgtaccatgaagaatccccaccacaataccaaacatcttacctgcaaagttttggttttaatggcttgtggcggtttgcaggaccgttttcaaagcaaacacaaattccagactatgctgagcttattgttaagtttcttgatgccttgattgacacgtacctgcctggaattgatgaagaaaccagtgaagaatccctcctgactcccacatctccttaccctcctgcactgcagagccagcttagtatcactgccaaccttaacctttctaattccatgacctcacttgcaacttcccagcattccccaggaatcgacaaggagaacgttgaactctcccctaccactggccactgtaacagtggacgaactcgccacggatccgcaagccaagtgcagaagcaaagaagcgctggcagtttcaaacgtaatagcattaagaagatcgtg

SEQ ID NO: 5260 - DNA, 1701 bp, Homo sapiens
  source 1..1701: mol_type = genomic DNA
atgtcttccagactcggtgctgtacccgccacttcgggacccacaacctttaagcagcagaggagcacgaggatcgtgggagctaagaatagcaggacccagtgctccataaaggataatagtttccagtacactatccctcatgatgactccttaagtggttcatcgtctgcatcttcgtgtgaaccagtgagtgattttccagcatctttccgaaaatctacctactggatgaagatgagaagaatcaagccagctgctacttctcatgtcgaagggtcaggtggagtatcagccaaggggaaaaggaaacccaggcaggaagaagatgaagactatcgagaatttcctcagaagaagcataagctttatgggaggaagcaacggcctaaaactcagcccaatcccaaatcccaggcccgtcgtattcggaaggaaccaccagtttatgcagcaggcagtttggaggagcaatggtacttagaaatcgttgataaaggcagtgtctcctgccctacctgccaggcagtggggaggaagaccatagagggtttaaagaaacacatggaaaactgcaagcaggaaatgtttacttgtcatcattgtgggaaacaacttcgttcactggcagggatgaagtatcatgtcatggcaaatcataatagtttgcccattttgaaagccggagatgaaatagatgagccaagtgagagggaaaggctccgaacagttctaaagagactgggaaagctcaggtgcatgcgtgagagttgctccagtagcttcaccagcatcatgggatatctctaccatgtcagaaaatgtggcaaaggggctgcagagctggaaaagatgaccctgaaatgtcaccactgtggaaaaccatataggtcgaaggctggacttgcatatcacctgaggtcagagcatgggcctatatccttctttccagagtcaggacagccagagtgcttaaaggagatgaacctagagtcaaagagtgggggccgagttcagagacgttctgccaagatagctgtataccacctacaggagctggcctctgctgaactggccaaggaatggcccaagaggaaggtgcttcaggacctggtacctgatgatcgaaagttaaaatatactcgtccagggctccctaccttcagccaggaagtactacataaatggaagacagatatcaagaaatatcatcgtattcagtgtcctaaccagggctgtgaggctgtctacagcagtgtatctggccttaaagctcacctgggctcttgtacattgggaaactttgtggctggaaaatacaaatgtcttctatgtcagaaagaatttgtgtcagagagtggtgtcaagtatcacatcaactccgtccatgctgaggactggttcgttgtaaacccaacaacaaccaaaagctttgaaaagctgatgaagataaagcagcggcagcaagaagaagaaaagcggaggcagcagcacaggagcagaaggtctctaagaaggcggcagcagcctggcattgagcttcccgagacagagctgagtcttagagtagggaaggatcagaggaggaataatgaggaactggtagtgtcagcctcctgtaaggaaccagagcaggagccagtgccagcacagttccagaaagtaaagcccccaaagactaatcataaacgaggaaggaaa

SEQ ID NO: 5261 - DNA, 1614 bp, Homo sapiens
  source 1..1614: mol_type = genomic DNA
atgtcttccagactcggtgctgtacccgccacttcgggacccacaacctttaagcagcagaggagcacgaggatcgtgggagctaagaacaggacccagtgctccataaaggataatagtttccagtacactatccctcatgatgactccttaagtggttcatcgtctgcatcttcgtgtgaaccagtgagtgattttccagcatctttccgaaaatctacctactggatgaagatgagaagaatcaagccagctgctacttctcatgtcgaagggtcaggtggagtatcagccaaggggaaaaggaaacccaggcaggaagaagatgaagactatcgagaatttcctcagaagaagcataagctttatggcagtttggaggagcaatggtacttagaaatcgttgataaaggcagtgtctcctgccctacctgccaggcagtggggaggaagaccatagagggtttaaagaaacacatggaaaactgcaagcaggaaatgtttacttgtcatcattgtgggaaacaacttcgttcactggcagggatgaagtatcatgtcatggcaaatcataatagtttgcccattttgaaagccggagatgaaatagatgagccaagtgagagggaaaggctccgaacagttctaaagagactgggaaagctcaggtgcatgcgtgagagttgctccagtagcttcaccagcatcatgggatatctctaccatgtcagaaaatgtggcaaaggggctgcagagctggaaaagatgaccctgaaatgtcaccactgtggaaaaccatataggtcgaaggctggacttgcatatcacctgaggtcagagcatgggcctatatccttctttccagagtcaggacagccagagtgcttaaaggagatgaacctagagtcaaagagtgggggccgagttcagagacgttctgccaagatagctgtataccacctacaggagctggcctctgctgaactggccaaggaatggcccaagaggaaggtgcttcaggacctggtacctgatgatcgaaagttaaaatatactcgtccagggctccctaccttcagccaggaagtactacataaatggaagacagatatcaagaaatatcatcgtattcagtgtcctaaccagggctgtgaggctgtctacagcagtgtatctggccttaaagctcacctgggctcttgtacattgggaaactttgtggctggaaaatacaaatgtcttctatgtcagaaagaatttgtgtcagagagtggtgtcaagtatcacatcaactccgtccatgctgaggactggttcgttgtaaacccaacaacaaccaaaagctttgaaaagctgatgaagataaagcagcggcagcaagaagaagaaaagcggaggcagcagcacaggagcagaaggtctctaagaaggcggcagcagcctggcattgagcttcccgagacagagctgagtcttagagtagggaaggatcagaggaggaataatgaggaactggtagtgtcagcctcctgtaaggaaccagagcaggagccagtgccagcacagttccagaaagtaaagcccccaaagactaatcataaacgaggaaggaaa

SEQ ID NO: 5262 - DNA, 1437 bp, Homo sapiens
  source 1..1437: mol_type = genomic DNA
atgggcttcgagagagactcggaaggagactctctgggggccaggcctgggcttccctatgggctgagcgacgatgagtctgggggcggccgggcactaagtgcggagagtgaagttgaggagccagccaggggtccaggggaggccaggggtgagaggccaggcccagcctgccagctgtgtggggggccgacaggtgaggggccgtgttgtggggcaggagggccgggtggggggcccctgctgcccccacggctactgtactcatgccgcctctgcaccttcgtgtcccactactcgagccacctgaagcggcacatgcagacacacagcggagagaagccgttccgctgtggccgctgcccctacgcctcagcccagctcgtcaacctgacacgacatacccgcacccacactggcgagaagccctaccgctgtccccactgcccctttgcctgcagcagcctgggcaacctgaggcggcatcagcgtacccacgcagggccccccactcctccctgcccgacctgtggcttccgctgctgtactccacgaccagcccggcctcccagtcccacagagcaggagggggcggtgccccggcgacctgaagatgctctgctccttccagatttgagcctccatgtgccaccaggtggtgccagtttcctgccagactgtgggcagctgcggggtgaaggggagggcctctgcgggactggatcagaaccactgccagagctgctattcccttggacctgccggggctgtggacaagagctggaggagggtgagggtagtcggctgggagctgccatgtgtgggcgctgcatgcgaggagaggctggagggggtgccagtggggggccccagggccccagtgacaaaggctttgcctgtagcctctgcccctttgccactcactatcccaaccacctggcccggcacatgaagacacacagtggtgagaagcccttccgctgcgcccgctgtccttatgcctctgctcatctggataacctgaaacggcaccagcgcgtccatacaggagagaagccctacaagtgccccctctgcccttatgcctgtggcaatctggccaacctcaagcgtcatggtcgcatccactctggtgacaaaccttttcggtgtagcctttgcaactacagctgcaaccagagcatgaacctcaaacgtcacatgctgcggcacacaggcgagaagcccttccgctgtgccacctgcgcctataccacgggccactgggacaactacaagcgccaccagaaggtgcatggccacggtggggcaggagggcctggtctctctgcctctgagggctgggccccacctcatagcccaccctctgttttgagctctcggggcccaccagccctggggactgctggcagccgggctgtccacacagactcatcc

SEQ ID NO: 5263 - DNA, 2049 bp, Homo sapiens
  source 1..2049: mol_type = genomic DNA
atgtcgccacatccagaagccatcacagattgtgtgacactgaacactgtgggccaacttgcagaaggtggttatcctttacggttctccacactctttcaggagcagcagaaaatgaacatatctcaggcatcagtgtcattcaaggacgtgactatagaattcacccaggaggagtggcagcaaatggcccctgttcagaagaatctgtacagagatgtgatgctggagaactacagcaacctcgtctcagtggggtactgctgtttcaaaccagaggtgatcttcaagttggagcaaggagaggagccttggttctcagaggaggaattctcaaaccagagtcacccaaaagattacagaggtgatgacctgatcaagcagaacaagaaaatcaaagacaaacacttggagcaagcaatatgtatcaataataaaacattgactacagaggaagagaaagttttggggaaaccatttactctgcatgtagctgctgttgcttcaacaaaaatgtcctgcaaatgcaactcatgggaagtgaatttgcaaagtatttctgaatttatcattaataatagaaactattcaacaaagaaaataggttgcggtaatgtatgtgagaattcacctttcaaaattaactttgagaaaactcagactggagagaaattttatgaacataataaaaacatgaaagctctcaattataatgaaaatcttcccaagcatccaaagtttcaaactttggagcaagcttttgaatgtaataaaattggaaaagcctttaatgataaggctaactgtgttaaacataacagttctcacacaggagaaacatcctctaaagatgatgaatttaggaaaaattgtgataagaaaactctctttgaccacaggagaactggcacagggaagaaacacctgcatcttaatcaatgtgggaaatcctttgagaagtcaactgtggaggaatataataaacttaatatgggtataaaacattatgaattaaatccaagtggaaataatttcaacagaaaggcacacctcactgatcctcaaacagctgtcatagaagagaacccattggtaagtaatgacagaacacagacttgggttaaatcctctgaatatcatgaaaataagaaatcctaccagacgtcggttcacagagttcgccgaagaagtcactcaatgatgaaaccctataaatgtaatgaatgtgggaaatccttctgtcagaaaggacatctcattcaacatcagagaactcacacaggagagaaaccatttgaatgtagtgaatgtggaaaaactttctcccagaagtcacacctcagtactcatcagagaattcatacagcagaaaaaccctataaatgtaatgaatgtggaaaaacatttgtccagaagtcaaccctcaggggacatcaaagaattcacacaggagaaaaaccctatgaatgtagtgaatgtgggaaaacttttgttcagaagtccaccctcagagatcatcacagaattcacacaggggagaaatcctttcaatgcaatcaatgtggaaaaacatttggccagaagtcaaacctcagaatacatcagagaactcacactggggagaaaacttaccagtgtaatgaatgtgaaaaatccttctggcgaaaagatcatctcattcaacatcagaaaactcacacgggagagaaaccattcaaatgtaacgaatgtgggaaaacttttgcccggacatcaaccctcagagtgcatcaaagaattcacactggggagaaaccatttaaatgtaatgaatgtgggaagaaatttgtccggaaagcaatccttagtgatcatcagagaattcacacaggggagaaaccctttcagtgtaataaatgtgggaaaacttttggccagaaatcaaacctcagaatacatcaaaggactcacagtggggagaaatcttatgaatgcaatgaatatgggaaattatgtaagaagtctaccctaagcttataccagaaaattcagggagaggggaatccctat

SEQ ID NO: 5264 - DNA, 3489 bp, Homo sapiens
  source 1..3489: mol_type = genomic DNA
atggatcgcaacagagaggccgagatggagctgaggcgaggccccagccccaccagggccggccggggccacgaggtggatggggacaaggctacctgccacacctgctgcatctgcggcaagagcttccccttccagagctcgctttcgcagcacatgcgcaagcacacgggcgagaagccctacaagtgtccctactgcgaccaccgggcttcccagaagggcaacctgaagattcacatccggagccaccgcacggggactctgattcagggacacgagccggaggcgggcgaggcgccgctgggtgagatgcgcgcctccgagggcctggacgcctgcgccagccccaccaagagcgcctcggcctgcaaccggctgctgaacggggcctcgcaggccgacggcgccagggtcctgaacggggcctcgcaggccgacagcggcagagtcctgctgcggagcagcaagaagggggcagaggggtccgcatgcgccccgggggaggccaaggcagcggtccagtgctccttctgcaagagccagttcgagcgtaagaaggacctggagctgcacgtgcaccaggcgcacaagccgttcaagtgcaggctgtgcagctacgcgacgctgcgggaggagtcgctgctgagccacatcgagagggaccacatcaccgcgcaggggcccggcagcggcgaggcctgcgtggagaacggcaagcccgagctgagccccggggagttcccgtgcgaggtgtgtggccaggccttcagccagacctggttcctgaaggcgcacatgaagaagcaccggggctccttcgaccacggctgccacatctgcggccgtaggttcaaggagccctggttcctcaagaaccacatgaaggcgcacggccccaagacgggcagcaagaacaggcccaagagtgagctggaccccatcgccaccatcaacaacgtggtccaggaggaggtgatcgtcgccggcctgagcctctacgaggtctgcgccaagtgcgggaacctgtttacaaacctggacagcttgaacgcccacaatgccatccaccgcagagtcgaggccagccgcacgcgcgccccggccgaggagggggcggaggggccctcggacaccaagcagttcttcctccagtgcctgaacctgaggccgtcggcggccggcgactcgtgccctggcacgcaggccggacggcgggtggctgagctggacccggtcaacagctaccaggcctggcagctggccacgcggggtaaggtggccgagccggccgagtacctcaagtacggggcctgggacgaggcgctggccggggacgtggccttcgacaaggacaggcgcgagtacgtcctggtgagccaggagaagcgcaagcgtgagcaggatgcaccagccgcgcaggggcccccgcggaagcgcgcgagcgggcctggggaccccgcgcccgccggccacctcgatccccgctcggccgcgcgccccaaccgcagggccgcagccaccaccggccagggcaagtcctccgagtgcttcgagtgcggcaagatcttccgcacctatcatcagatggtgctgcactcacgcgtgcatcgccgcgcgcgccgcgagagggacagtgacggggacagggcggcgcgggcccgctgcggatcactcagtgagggtgactcggcctcccagcccagcagccctggctccgcctgtgccgctgctgactccccgggctctggcctggccgacgaggctgccgaagacagtggtgaggagggcgcccctgaacctgcaccagggggacagccgcgccgctgctgcttttccgaagaggtgacttcgaccgagctctccagtggagaccagagtcacaagatgggagataacgcctcggaaagagacaccggcgagtccaaggcagggatcgcagcttctgtgtccatacttgaaaacagtagcagagagacttctagaaggcaagagcagcacagattttctatggacttaaagatgccagcatttcaccccaagcaggaggtgcccgtccctggtgatggtgtggagttcccttccagtacgggagcggagggccagacgggtcaccctgcagaaaagctgtccgatttgcacaacaaggaacactctgggggagggaagcgggcgctggccccagacctcatgccgctagatttaagtgcgaggtcgacgcgggatgaccccagcaataaggagacggcctcctccctgcaggcggctttagtcgttcacccgtgtccttactgcagccacaagacctactaccccgaggtcctgtggatgcacaaacgcatctggcaccgcgtcagctgcaactccgtggctcccccgtggattcagcccaatggttacaaaagcatcagaagcaatttggttttcctttcccggagcggacgcacgggccccccgcctgccctcggtggcaaagaatgccagcctttgctccttgctcggttcacccgcactcaggtgccaggggggatgccggggtccaaaagtggctcttctcccctgggagtggtcacaaaagccgctagcatgcctaagaataaggagagccattccggaggtccctgcgctctgtgggcgcccggccctgacgggtatcgacagaccaaaccttgtcacggccaggagccacatggcgcggccacacaggggcccctggccaagcccaggcaggaggctagctccaaaccggtgcctgccccgggtggcgggggcttcagcaggagcgccacccctacgcccaccgtcatcgcccgggctggcgcgcagccctcggccaatagcaagcctgtggagaagtttggggtccccccagcgggggctggctttgcccccacaaataagcacagtgccccggactccctgaaagccaaattcagtgctcagcctcagggtccacctcctgcaaagggcgaagggggcgctcctcctctacctccccgcgagcccccctcgaaggcagcccaggagctgaggactctggccacctgtgctgcggggtccaggggcgacgcggccttgcaggcccagcccggcgtggctggggcgccccccgtcctacactccatcaaacaggagccggtggccgaggggcatgagaagcgcctggacatcctcaacatctttaagacgtacattccaaaggactttgcgaccctctaccagggatggggtgtcagcggccctgggttggagcacagagggacactccggacgcaggcccggccaggagagttcgtctgcatcgagtgcggaaagagcttccaccagcccggccacctcagggcccacatgcgggcacactcagtggtgtttgagtccgatgggcctcggggttctgaagttcataccacctccgcagacgcccccaaacaagggagagaccattctaacacaggtaccgtccagacagtgcctctgagaaagggaacc

SEQ ID NO: 5265 - DNA, 1476 bp, Homo sapiens
  source 1..1476: mol_type = genomic DNA
atggcgatggcactcccgatgcctggacctcaggaggcggttgtgttcgaggatgtggctgtgtacttcacaaggatagagtggagttgcctggcccccgaccagcaggcactctacagggacgtgatgctggagaactatgggaacctggcctcactaggctttcttgttgccaaaccagcactgatctccctattggagcaaggagaggagccgggggccttgattctgcaggtggctgaacagagcgtggccaaagccagcctgtgcacagattccaggatggaggctgggatcatggagtctcctctgcagagaaagctctccaggcaggcaggactgccgggcaccgtgtgggggtgcctcccctgggggcaccctgtgggggggcaccctgcaccaccccacccgcatggcggtcctgaggacgggtcagataaacccacccacccccgggctcgggagcacagcgcctccccaagggttctgcaggaagacctgggccggcctgtggggagctcagccccccgctacaggtgcgtgtgcggcaaggcgttcagatacaactcgctgcttctcaggcaccagatcatccacaccggcgccaagcccttccagtgcacagagtgcgggaaggccttcaagcaaagctccatcctgctgcggcaccagctgatccacactgaggagaagccgttccagtgcggcgagtgcgggaaggccttccggcagagcacgcagctggctgcccaccaccgcgtccacacccgcgagcggccctacgcatgcggcgagtgcggcaaggccttcagccgcagctcccggctgctgcagcaccagaagttccacaccggggagaagcccttcgcgtgcacagagtgcggcaaggcgttctgccgcaggttcaccctcaacgagcacggccgcatccacagcggggagcggccctaccggtgcctgcggtgtgggcagcgcttcatccgagggtcctcgctcctgaagcaccaccggctgcacgcgcaggagggtgcccaggacggcggcgtggggcagggcgccctgctcggagctgcgcagaggccccaggcgggggacccgccccacgagtgcccggtgtgcgggaggccgttccgacacaactccctgctgctgctgcacctgcgcctacacacgggcgagaagccgttcgagtgcgcggagtgcggcaaggccttcggtcgcaagtccaacctcactctgcaccagaagatccacaccaaggagaagcccttcgcgtgcaccgagtgcggcaaggcgttccgcaggagctacacgctgaacgagcactaccggctccacagcggcgagaggccataccggtgccgcgcctgcgggagggcctgcagccggctgtccaccctcatccagcaccagaaggtgcacggccgcgagcccggggaggacacagagggcaggcgggcgccctgttgggcttcc

SEQ ID NO: 5266 - DNA, 1200 bp, Homo sapiens
  source 1..1200: mol_type = genomic DNA
atgacatttgaagatgtggctgtggaattcagccagtgggagtgggggcagctgaaccctgctcagaaggacctctacagggaggtgatgctggagaacttcaggaacttggccattctgggccttctagtatccaaaccatatgtgatctgccagttggaggaagggggtgagcccttcatggtggagagagaaatctcaacaggagcccactcagactggaagagaaggtctaaatccaaggaatcaatgccaagttggggaatttccaaagaagaattattccaggtagtatcagtggaaaaacacattcaagatgtgctgcagttctcgaagttgaaagcagcctgcggttgtgatggccagttagagatgcagcagataaaacaggagagacacctgaaacaaatgtcaaccattcacaaatctgccaccacccttagcagagattataaatggaatggatttgggagaagcttaggtttaagatcagtccttgttaaccaacacagcattctcatgggagaaggatcttataaatgtgatacagaattcaggcagactttagggggaaacaactctcagagaacccacccagaaaagaaatcttgtaaatgtaatgagtgtgggaagtcctttcacttccagtcagaacttaggcgccatcagcgatgtcacactggagaaaagccgtatgaatgcagtgactgtggaagagcctttggtcatatttcatcccttattaaacatcaaagaactcatactggagaaaagccctatgaatgcagtgaatgtgggagagccttcagccagagttcgtctcttgttctgcactatagatttcacactggagagaaaccctacaaatgtaatgaatgtggacgagcctttggtcacacttcatcccttattaagcatcagaggactcatactggagaaaagccctatgaatgccgggaatgtgggagaaccttcagccagagctcatcactcattgtgcattacagatttcatactggagagaaaccttacaaatgtaataaatgtgggagagccttcagccagagttcatctctcactcaacattacagatttcacactggagagaaaccctacaaatgtaatgagtgtggaagggcctttgctcatactgcatcccttattaaacatcagagaagtcatgctggaaaaaaaacccta

SEQ ID NO: 5267 - DNA, 1866 bp, Homo sapiens
  source 1..1866: mol_type = genomic DNA
atgggtttgtatggacaggcttgtccatctgtaacttcattaaggatgacatctgaactggagagcagcctaacgtctatggactggttaccacagctcaccatgagagcagccatccaaaaatctgatgctacacaaaatgcacatggaacaggaatttctaagaagaatgcactccttgacccaaatacaactctggaccaggaagaagtccaacagcacaaagatgggaaacctccatacagttatgccagcctcattacatttgcaattaatagctcacccaaaaagaaaatgactttaagtgaaatttatcagtggatttgtgataacttcccatattatagagaggctggcagtggttggaagaattccatacgacataatctgtcattgaacaaatgtttccttaaagtgcctcgatctaaggatgaccctggaaaggggtcctactgggcaatagacaccaatccgaaggaagatgtgctgcctactcggccaaagaagagggcacgatctgtagaacgggcctcaactccatatagcatagattcagattctttgggaatggagtgtattatttcgggaagtgcctctccaactctggcaatcaacactgtgactaacaaagtaacattgtataacactgatcaggatggtagtgatagcccacgcagtagccttaacaacagtctctcagaccagagtttggcatctgttaatttgaacagtgttggaagtgtgcatagttatacaccggtgacaagccatccagaatcagtctctcaatcattaactcctcagcagcaaccacagtacaaccttccagaaagagacaagcaactacttttctcagaatataattttgaagatcttagtgcctcatttcggagcctttataagtcagtttttgagcagtcacttagtcaacaaggtttgatgaacatcccttctgaatcttcccagcagtcccacacttcatgtacctatcagcactctcccagcagtacagtgagcactcacccacacagcaaccaaagcagcctgtccaacagtcatggcagtggcctcaacaccacaggcagtaattcggttgcacaggtctcactgtctcacccccagatgcacacacagccatctccacatcctccccatcgaccgcatggtttaccgcagcatccgcagcgttccccacacccagcaccacacccacagcaacacagccagctccagtcccctcacccccagcatccctctccacatcaacacatacagcaccatccgaaccatcagcatcagacgttaacacatcaggcacccccacccccacaacaggtatcctgtaattctggtgtttcaaatgattggtatgcgacacttgatatgctaaaagaaagctgtcgaattgccagcagtgttaattggtcagatgtagacctttcacagtttcaaggtctgatggagagtatgagacaggcagatctcaagaactggtctttagaccaggttcagtttgccgatctttgttcttctcttaatcagttctttacacaaactggccttatacattcacagagtaatgttcaacaaaatgtttgtcatggtgccatgcatccaacaaaaccttcccaacacattggaacaggaaatttgtacatagattctaggcaaaatctccctccttcagtgatgccaccccctggttatcctcatatcccacaggcactcagcactccaggaacaacgatggcaggccatcacagagccatgaaccagcagcacatgatgccttcccaagccttccagatgcggcgttccctgcctccagatgacatccaggatgactttgattgggattcaattgtg

SEQ ID NO: 5268 - DNA, 1764 bp, Homo sapiens
  source 1..1764: mol_type = genomic DNA
atgggtttgtatggacaggcttgtccatctgtaacttcattaaggatgacatctgaactggagagcagcctaacgtctatggactggttaccacagctcaccatgagagcagccatccaaaaatctgatgctacacaaaatgcacatggaacaggaatttctaagaagaatgcactccttgacccaaatacaactctggaccaggaagaagtccaacagcacaaagatgggaaacctccatacagttatgccagcctcattacatttgcaattaatagctcacccaaaaagaaaatgactttaagtgaaatttatcagtggatttgtgataacttcccatattatagagaggctggcagtggttggaagaattccatacgacataatctgtcattgaacaaatgtttccttaaagtgcctcgatctaaggatgaccctggaaaggggtcctactgggcaatagacaccaatccgaaggaagatgtgctgcctactcggccaaagaagagggcacgatctgtagaacgggtaacattgtataacactgatcaggatggtagtgatagcccacgcagtagccttaacaacagtctctcagaccagagtttggcatctgttaatttgaacagtgttggaagtgtgcatagttatacaccggtgacaagccatccagaatcagtctctcaatcattaactcctcagcagcaaccacagtacaaccttccagaaagagacaagcaactacttttctcagaatataattttgaagatcttagtgcctcatttcggagcctttataagtcagtttttgagcagtcacttagtcaacaaggtttgatgaacatcccttctgaatcttcccagcagtcccacacttcatgtacctatcagcactctcccagcagtacagtgagcactcacccacacagcaaccaaagcagcctgtccaacagtcatggcagtggcctcaacaccacaggcagtaattcggttgcacaggtctcactgtctcacccccagatgcacacacagccatctccacatcctccccatcgaccgcatggtttaccgcagcatccgcagcgttccccacacccagcaccacacccacagcaacacagccagctccagtcccctcacccccagcatccctctccacatcaacacatacagcaccatccgaaccatcagcatcagacgttaacacatcaggcacccccacccccacaacaggtatcctgtaattctggtgtttcaaatgattggtatgcgacacttgatatgctaaaagaaagctgtcgaattgccagcagtgttaattggtcagatgtagacctttcacagtttcaaggtctgatggagagtatgagacaggcagatctcaagaactggtctttagaccaggttcagtttgccgatctttgttcttctcttaatcagttctttacacaaactggccttatacattcacagagtaatgttcaacaaaatgtttgtcatggtgccatgcatccaacaaaaccttcccaacacattggaacaggaaatttgtacatagattctaggcaaaatctccctccttcagtgatgccaccccctggttatcctcatatcccacaggcactcagcactccaggaacaacgatggcaggccatcacagagccatgaaccagcagcacatgatgccttcccaagccttccagatgcggcgttccctgcctccagatgacatccaggatgactttgattgggattcaattgtg

SEQ ID NO: 5269 - DNA, 2121 bp, Homo sapiens
  source 1..2121: mol_type = genomic DNA
atgaccacgttcaaggaggcaatgaccttcaaggacgtggctgtggtcttcactgaggaagagctggggctgctggaccttgctcagaggaagctgtatcgagatgtgatgctggagaacttcaggaacctgctctcagtgggacatcaagcattccacagggatactttccacttcctaagggaagaaaagatttggatgatgaagacagcaatccaaagggaagggaattcaggagacaagatccaaactgagatggagactgtttcagaagcaggaacacatcaagagtggtccttccagcaaatctgggaaaaaattgcaagtgatttaaccaggtctcaagacttgatgataaatagctctcagttctccaaagaaggtgatttcccctgccagactgaggcaggactatctgtaattcacacaagacagaaatcttcccagggcaatggatataaaccatccttcagtgatgtctcccactttgattttcatcaacaattacactcaggagagaaatctcatacgtgtgatgagtgtggaaagaacttttgttacatctcagcccttcgtattcatcagagagtccacatgggagagaaatgctataagtgtgacgtgtgtggtaaggaattcagtcagagttcacatctgcaaactcatcagagagtccacactggagagaaaccgttcaaatgtgtggaatgtgggaaaggcttcagtcgtagatcagcacttaatgttcatcataaattacacacaggagagaaaccttataattgtgaggaatgcgggaaggccttcattcacgattcccagcttcaagaacatcagagaatccatacgggggagaagccattcaaatgtgatatatgtggtaagagcttctgtggtagatcaagacttaataggcattccatggttcacacggcagagaaaccattccgatgtgatacgtgtgataagagctttcgtcagagatcagcacttaatagtcatcgcatgatccacacaggagagaaaccatacaaatgtgaggagtgtggaaaaggctttatttgtaggcgagatctttatacgcatcatatggtccacacgggagaaaagccatataattgtaaagagtgtgggaagagcttcagatgggcctcgtgtcttttgaaacatcagcgagtccacagtggagaaaaaccattcaaatgtgaagaatgtgggaaaggattttacacaaattcacaatgctattcccaccagagatcccatagtggagaaaaaccatacaaatgtgtggagtgtgggaagggctacaaaaggaggttggatcttgactttcaccagcgcgtccatacaggagagaaactgtataattgtaaggaatgtgggaagagctttagtcgggccccatgtcttttgaaacatgagagactccacagtggagaaaaaccattccaatgtgaagagtgtgggaagagatttactcaaaattcacatcttcattcccatcagagagttcacactggagaaaagccatacaaatgtgagaagtgtggaaagggctacaatagtaagtttaatcttgatatgcaccagaaggtccacacaggagagagaccatacaattgtaaggaatgtgggaagagttttggctgggcctcgtgtcttttgaaacatcagagactgcacagtggagaaaaaccattcaaatgtgaagagtgtgggaaaagatttactcagaattcacagcttcattctcatcaaagagtgcacactggagaaaagccatacaaatgtgatgagtgtgggaagggcttcagctggtcctcaactcgtctgacccatcagagacgccacagcagagaaacacctctcaaatgtgagcagcatgggaagaacattgtacagaattcattctctaaagtgcaagaaaaagttcacagtgtagaaaagccatacaaatgtgaggactgtgggaagggctacaacaggcgcttgaatcttgatatgcatcagagggtccacatgggagagaaaacatggaagtgtagggagtgtgatatgtgctttagtcaggcctcaagccttcgacttcatcagaatgttcatgttggagaaaaacct

SEQ ID NO: 5270 - DNA, 282 bp, Homo sapiens
  source 1..282: mol_type = genomic DNA
atgaatatgttcaaggaagcagtgaccttcaaggacgtggctgtggccttcacggaggaggaattggggctgctgggccctgcccagaggaagctgtaccgagatgtgatggtggagaactttaggaacctgctgtcagtggggcatccacccttcaaacaagatgtatcacctatagaaagaaatgagcagctttggataatgacgacagcaacccgaagacagggaaatttagataccttacttgtaaaagctcttttgctctatgacctggctcaaact

SEQ ID NO: 5271 - DNA, 2409 bp, Homo sapiens
  source 1..2409: mol_type = genomic DNA
atgaatatgttcaaggaagcagtgaccttcaaggacgtggctgtggccttcacggaggaggaattggggctgctgggccctgcccagaggaagctgtaccgagatgtgatggtggagaactttaggaacctgctgtcagtggggcatccacccttcaaacaagatgtatcacctatagaaagaaatgagcagctttggataatgacgacagcaacccgaagacagggaaatttaggagagaaaaatcaaagtaagttaattactgttcaagacagagaatcagaagaagagctttcttgttggcaaatctggcaacaaattgcaaatgacttaaccaggtgtcaagactccatgatcaataattctcagtgtcacaaacaaggtgatttcccttaccaggtagggacagaactgtctattcaaatttctgaagatgagaactatatagtaaataaagcagatggtcccaataatactgggaatccagagtttcctatcttgagaacccaggattcttggaggaaaacattcctgactgagtcacagagattgaacagagatcagcaaatttccataaaaaataaattatgtcaatgtaagaagggtgttgatcccatcggttggatttcacatcatgatggtcatagagtacacaaaagtgaaaaatcttatagacccaatgattatgaaaaagacaacatgaagattttgacatttgatcacaatagcatgattcacacaggacagaaatcgtaccagtgtaatgagtgtaaaaaacccttcagtgatctctccagctttgatcttcatcagcagttacaatcaggagagaagtctcttacatgtgttgagcgtggaaaaggcttctgttacagcccagttcttcctgttcatcagaaagtacatgtgggagaaaaacttaagtgtgatgagtgtggtaaggaattcagtcagggcgctcatctacagacccatcagaaagtccacgtgatagagaaaccatacaaatgtaagcaatgtgggaaaggtttcagtcgtagatcagcacttaatgttcattgcaaggtccacacggcagagaaaccttataattgtgaggagtgtgggagggccttcagtcaggcctctcatcttcaggaccatcagagactccacactggggagaagccattcaaatgtgatgcatgtggtaagagcttcagtcggaattcacatcttcaatcccatcaaagagttcatacaggagagaaaccatacaaatgtgaggagtgtggtaagggcttcatttgtagctcaaatctttacattcatcagagagtccacacaggagaaaaaccctataaatgtgaggaatgtggtaaaggctttagtcggccttcaagtcttcaggcccatcagggagttcacactggagagaagtcatacatatgtactgtatgtgggaaaggctttactctgagttcaaatcttcaagcccatcagagagtccacactggagagaagccatacaaatgcaatgagtgtgggaagagcttcaggaggaattcccattatcaagttcatctagtggtccacacaggagagaaaccctataaatgtgagatatgtgggaagggcttcagtcaaagttcgtatcttcaaatccatcagaaggcccacagtatagagaaaccttttaagtgtgaggagtgtgggcagggtttcaatcagagctcacgacttcagattcaccagctgatccatacgggtgagaaaccatacaaatgtgaagagtgtggcaagggatttagtcgtagagcagatcttaaaattcactgtaggatccacacaggagagaaaccatataattgtgaggagtgtgggaaggtcttcaggcaggcctcaaatcttttggcccatcagagagtccacagtggagaaaaaccattcaaatgtgaagaatgtgggaagagtttcggtcggagtgcacatcttcaagcccatcaaaaagtccacactggagataagccatacaaatgtgatgagtgtgggaagggcttcaagtggagcttgaaccttgacatgcatcagagggtgcacacaggagaaaaaccatataaatgtggggagtgtggtaagtacttcagtcaggcctcaagtcttcaacttcatcagagtgtccacacaggagagaaaccatacaaatgtgatgtgtgtggtaaagtcttcagtcggtcttcacaactacagtctcatcagcgagttcacactggggagaaaccttataaatgtgagatatgtggtaagagcttcagttggcgatcaaatcttacagttcatcacagaatccatgttggtgataaatcctataaaagtaataggggtggtaagaacatcagagaatccacacaggaaaaaaaatctataaaa

SEQ ID NO: 5272 - DNA, 2244 bp, Homo sapiens
  source 1..2244: mol_type = genomic DNA
atggtggagaacttcaagaacctggttgcagtggggcatcttcccttccaaccagatatggtatcccaattggaagcagaagaaaagctttggatgatggaaacagaaacccaaagaagcagcaagcatcaaaataagatggaaacactccaaaaatttgcattaaaatacctttcaaatcaagagctgtcctgctggcaaatctggaaacaggttgcaagtgaattaaccaggtgtcttcaggggaagagttcccagttattacaaggtgactctattcaggtttctgaaaatgagaacaatataatgaaccctaaaggagatagctctatttatattgaaaatcaagagtttccattttggagaacccagcattcttgcgggaatacatatctgagtgagtcacagattcagagtagaggtaagcaaattgatgtgaaaaataacctgcaaatacatgaagacttcatgaagaaatcaccatttcatgagcatattaaaactgacacagaaccaaaaccctgcaaaggtaatgaatatggcaaaatcattagtgatggctccaaccagaaattacccttaggagagaaaccccatccatgtggtgagtgtggaaggggcttcagttatagcccaaggcttccccttcatccgaatgttcatacaggagaaaaatgcttcagtcaaagctcacatctgcgaactcatcagagaattcacccaggagagaaactcaatagatgtcatgaatctggtgattgcttcaataagagctcttttcattcttatcaatctaatcatacaggagagaagtcttatagatgcgacagttgcggcaagggattcagtagcagcacgggtcttatcattcattacagaactcatactggagagaaaccctataaatgcgaggaatgtggtaaatgctttagtcaaagttcaaattttcagtgccatcagagagtccacactgaagaaaaaccatacaaatgcgaagagtgtggtaagggcttcggttggagtgttaatctccgtgttcaccagagggtccacaggggtgagaagccctataaatgtgaggaatgtggtaagggcttcactcaggctgcacattttcacatccatcagagagtccacactggagagaaaccctacaagtgtgatgtgtgtggtaagggcttcagccacaattcaccattaatatgccatcggagagtccacacaggagagaagccatacaagtgtgaggcgtgtgggaaaggctttacccgtaatacagatctgcatattcatttcagagttcacacgggagagaaaccctataaatgtaaggagtgtggtaagggcttcagtcaggcttcaaatcttcaagtccatcagaatgtccacactggggagaaacgattcaagtgtgaaacgtgtgggaagggcttcagtcagtcctcaaagcttcaaacccatcagcgagtccacactggagagaaaccatatagatgtgatgtgtgtggtaaggacttcagttatagttcaaatcttaaactacaccaagtaattcacactggagaaaaaccatataaatgtgaggaatgtgggaagggcttcagttggagatcaaatcttcatgcacatcaaagagttcactcaggagaaaaaccctataaatgtgagcagtgtgataagagcttcagtcaggccatagattttcgggtacatcagagagtccatactggagagaagccatacaaatgtggtgtctgtggtaagggcttcagtcagtcctctggtcttcaatcccatcagagagtccacacgggggaaaagccatacaaatgtgatgtgtgtggaaagggctttagatacagttcgcagtttatataccatcagagaggccacactggagaaaaaccttacaaatgtgaagagtgtgggaaaggctttggtaggagcttgaatcttcgccatcatcagagggtccacacgggagagaaaccccatatatgtgaggagtgtggtaaggccttcagtctcccctcaaatcttcgagtccacctgggtgttcacaccagggaaaaactctttaaatgtgaagagtgtggtaaaggcttcagtcagagtgcacgtcttgaagcccatcagagagtccacactggagaaaaaccatacaaatgtgacatatgtgataaggacttccgtcaccgttcacgtcttacatatcatcagaaagtccatactggtaaaaagctt

SEQ ID NO: 5273 - DNA, 2457 bp, Homo sapiens
  source 1..2457: mol_type = genomic DNA
atggagactttgacctcaaggcatgagaaaagagctcttcattctcaagcctcagccatttcccaagatagggaggagaagatcatgtctcaggagccattgagcttcaaggacgtggctgtggtcttcactgaggaggagctagagctgctggactctacccagaggcagctgtaccaagatgtgatgcaggagaatttcaggaacctactctcagtgggagacaagaatggaaaggatacggagtatattcaagatgaagaattaaggttcttttcacacaaagagctctcctcatgcaaaatctgggaagaggtggcaggtgaattacctgggagccaagactgtagagtaaatctgcaaggaaaagacttccagttctcagaagatgctgctccccatcaagggtgggaaggagcatctacgccgtgttttccaattgagaatttcctggacagtctacaaggggatgggcttatcggtctagaaaatcaacagtttccagcctggagagctataagaccaatccccattcaaggatcttgggcaaaagcgtttgtgaaccagttaggggatgttcaagaaagatgtaaaaatctcgacacagaagacacagtatataaatgtaactgggatgatgacagcttttgctggatatcttgtcatgttgatcacagattccctgaaatagacaagccgtgtggttgcaataaatgcagaaaagactgcattaaaaactctgtacttcatcgcattaaccctggagagaatggcttgaaaagtaacgaatacagaaatggcttcagggacgatgcagaccttcccccgcatccaagagtacctttgaaagagaaactctgtcaatatgatgagtttagtgagggcttgaggcacagtgcccatcttaacagacatcaaagagttcccacaggagagaaatctgttaagagtcttgagcgtggtcggggcgtcagacagaacacgcacatacgtaaccaccccagagcccctgtgggagacatgccctatagatgtgatgtctgtggaaaggggttcaggtataaatcggttcttcttattcatcaaggggtgcacacaggaaggagaccctataaatgtgaggagtgtgggaaggcatttggtcgaagttcaaacctgcttgtccatcagagggtccacactggagagaaaccatataaatgcagcgagtgtgggaagggcttcagttacagctcagtgcttcaagtccatcagaggctgcacacaggggagaagccctacacctgcagcgagtgtggcaaaggcttctgtgccaagtctgcactgcacaaacaccagcacattcaccctggagaaaagccctacagctgtggcgagtgtggaaagggattcagctgcagctcccacctcagcagtcatcagaagacacacaccggcgagaggccctaccagtgtgacaagtgtggcaaaggtttcagtcacaactcgtaccttcaagctcaccagagagttcacatggggcagcatctgtacaaatgtaacgtgtgtggtaagagtttcagttacagctcagggcttctcatgcatcagagactgcacacaggagagaaaccctacaaatgcgagtgcgggaagagctttggccggagctccgacctccacatccatcagagggtccacacaggagagaaaccctataaatgcagtgagtgtgggaagggcttccggcggaattcagaccttcacagccaccagagggtccacacgggagagaggccctacgtgtgtgacgtgtgtgggaagggtttcatctacagctccgacctccttatccatcagagggtccacactggagagaaaccctataaatgtgctgagtgtggcaaaggcttcagttacagctcagggcttctcattcaccagagagtccacacaggcgagaaaccttacagatgccaagagtgcggaaagggctttaggtgcacatcaagccttcacaaacatcagcgagtccacacgggaaaaaagccctatacgtgtgatcagtgtggcaagggattcagttatggctctaatcttcgcacccaccagaggttgcacacaggagagaaaccctacacttgttgtgaatgtgggaagggtttcagatatggctcaggtctccttagtcataagagagtgcacactggcgagaagccatacagatgccacgtgtgtgggaagggctatagtcagagctcacatcttcaaggtcatcagagggtccacactggtgagaaaccctataaatgtgaggagtgtgggaagggctttggccgcaactcctgtcttcatgttcatcagagagtccacactggagagaagccctatacgtgtggtgtgtgtgggaaaggcttcagttatacctcaggtctgcggaaccaccaaagagtgcatttaggcgagaacccttataag

SEQ ID NO: 5274 - DNA, 2475 bp, Homo sapiens
  source 1..2475: mol_type = genomic DNA
atggagactttgacctcaaggcatgagaaaagagctcttcattctcaagcctcagccatttcccaagatagggaggagaagatcatgtctcaggagccattgagcttcaaggacgtggctgtggtcttcactgaggaggagctagagctgctggactctacccagaggcagctgtaccaagatgtgatgcaggagaatttcaggaacctactctcagtgggtgagaggaatcctctgggagacaagaatggaaaggatacggagtatattcaagatgaagaattaaggttcttttcacacaaagagctctcctcatgcaaaatctgggaagaggtggcaggtgaattacctgggagccaagactgtagagtaaatctgcaaggaaaagacttccagttctcagaagatgctgctccccatcaagggtgggaaggagcatctacgccgtgttttccaattgagaatttcctggacagtctacaaggggatgggcttatcggtctagaaaatcaacagtttccagcctggagagctataagaccaatccccattcaaggatcttgggcaaaagcgtttgtgaaccagttaggggatgttcaagaaagatgtaaaaatctcgacacagaagacacagtatataaatgtaactgggatgatgacagcttttgctggatatcttgtcatgttgatcacagattccctgaaatagacaagccgtgtggttgcaataaatgcagaaaagactgcattaaaaactctgtacttcatcgcattaaccctggagagaatggcttgaaaagtaacgaatacagaaatggcttcagggacgatgcagaccttcccccgcatccaagagtacctttgaaagagaaactctgtcaatatgatgagtttagtgagggcttgaggcacagtgcccatcttaacagacatcaaagagttcccacaggagagaaatctgttaagagtcttgagcgtggtcggggcgtcagacagaacacgcacatacgtaaccaccccagagcccctgtgggagacatgccctatagatgtgatgtctgtggaaaggggttcaggtataaatcggttcttcttattcatcaaggggtgcacacaggaaggagaccctataaatgtgaggagtgtgggaaggcatttggtcgaagttcaaacctgcttgtccatcagagggtccacactggagagaaaccatataaatgcagcgagtgtgggaagggcttcagttacagctcagtgcttcaagtccatcagaggctgcacacaggggagaagccctacacctgcagcgagtgtggcaaaggcttctgtgccaagtctgcactgcacaaacaccagcacattcaccctggagaaaagccctacagctgtggcgagtgtggaaagggattcagctgcagctcccacctcagcagtcatcagaagacacacaccggcgagaggccctaccagtgtgacaagtgtggcaaaggtttcagtcacaactcgtaccttcaagctcaccagagagttcacatggggcagcatctgtacaaatgtaacgtgtgtggtaagagtttcagttacagctcagggcttctcatgcatcagagactgcacacaggagagaaaccctacaaatgcgagtgcgggaagagctttggccggagctccgacctccacatccatcagagggtccacacaggagagaaaccctataaatgcagtgagtgtgggaagggcttccggcggaattcagaccttcacagccaccagagggtccacacgggagagaggccctacgtgtgtgacgtgtgtgggaagggtttcatctacagctccgacctccttatccatcagagggtccacactggagagaaaccctataaatgtgctgagtgtggcaaaggcttcagttacagctcagggcttctcattcaccagagagtccacacaggcgagaaaccttacagatgccaagagtgcggaaagggctttaggtgcacatcaagccttcacaaacatcagcgagtccacacgggaaaaaagccctatacgtgtgatcagtgtggcaagggattcagttatggctctaatcttcgcacccaccagaggttgcacacaggagagaaaccctacacttgttgtgaatgtgggaagggtttcagatatggctcaggtctccttagtcataagagagtgcacactggcgagaagccatacagatgccacgtgtgtgggaagggctatagtcagagctcacatcttcaaggtcatcagagggtccacactggtgagaaaccctataaatgtgaggagtgtgggaagggctttggccgcaactcctgtcttcatgttcatcagagagtccacactggagagaagccctatacgtgtggtgtgtgtgggaaaggcttcagttatacctcaggtctgcggaaccaccaaagagtgcatttaggcgagaacccttataag

SEQ ID NO: 5275 - DNA, 912 bp, Homo sapiens
  source 1..912: mol_type = genomic DNA
atgtttaactcggtcaacctgggcaacttctgctctccgtcgcgcaaggagaggggcgcagatttcggcgagcgagggagctgcgcctccaacctctatctgcccagttgcacttactacatgcccgagttctccacggtctcctccttcctgccccaggccccctctcgtcagatctcctatccctactcggcccaagtgcccccggtccgggaggtctcctacggcctggagccatccggcaagtggcaccatcggaacagctactcctcctgctatgcggcggccgacgagcttatgcaccgggagtgcctgcctccttccaccgtcaccgagatcctcatgaaaaacgaaggctcctacggcggccaccaccaccccagcgccccgcacgcaacccccgccggcttctactcctcagtcaacaagaacagcgtcctgcctcaagccttcgaccgtttcttcgacaacgcctactgcggtggcggcgacccgcccgccgagcccccctgctccggcaagggcgaggccaagggggagcccgaggcacccccggcctcgggactggcgtcccgggctgaggcgggtgccgaggcggaggctgaggaggagaacacaaatcccagctcgtccggttcagcccactccgtggccaaggagccggccaaaggagccgcccccaacgccccccgcacccgcaagaagcgctgcccttattcgaaattccagatccgggaactggagcgagagtttttcttcaacgtgtatatcaacaaagagaagcggctgcagctgtcccggatgctgaacctgacggaccgacaagtgaaaatttggtttcagaacagaaggatgaaagaaaagaaactgagcagagaccggctgcagtatttctcgggaaatcctctgctg

SEQ ID NO: 5276 - DNA, 990 bp, Homo sapiens
  source 1..990: mol_type = genomic DNA
atgacgacttcgctgctcctgcatccacgctggccggagagccttatgtacgtctatgaggacagcgcggcggagagcggcatcggcggcggcggcggaggaggaggcggcggcacgggcggagcggggggtggctgcagcggagcgagccccggcaaagccccgagcatggatggtctgggcagcagctgcccggccagccactgccgcgacctgcttccgcaccccgtgctgggccgcccgccggctcccctgggcgcccctcagggcgccgtctatacggacatcccggccccggaggcggcgcgccagtgtgccccgccgcccgcaccccccacctcgtccagcgccaccctgggctacggctaccccttcgggggcagctactacggctgccgcctgtcgcacaacgtgaacctgcagcagaagccttgcgcctaccacccgggcgataaatacccggagccgtcgggcgccctgcccggtgacgacctgtcctctagggccaaggagttcgccttctaccccagcttcgccagctcctaccaggcgatgcccggctacctggacgtgtcggtggtgcccgggatcagcgggcacccggagccgcgtcacgacgccctcatccccgtcgaaggctaccagcactgggctctctccaatggctgggacagtcaggtgtactgctccaaggagcagtcgcagtccgcccacctctggaagtctcccttcccagacgtggttcccctgcagcccgaggtgagcagctaccggcgcgggcgcaagaaacgcgtgccctacactaaggtgcagctgaaggagctagagaaggaatacgcggctagcaagttcatcaccaaagagaagcgccggcgcatctccgccaccacgaacctctctgagcgccaggtaaccatctggttccagaaccggcgggtcaaagagaagaaggtggtcagcaaatcgaaagcgcctcatctccactccacc

SEQ ID NO: 5277 - DNA, 846 bp, Homo sapiens
  source 1..846: mol_type = genomic DNA
atgggcgagcataatctcctgaatcccgggtttgtggggccgctggtaaacatccacacgggagacaccttctacttccccaacttccgcgcgtccggggcgcagcttcccgggctgccttcgctgtcctacccacgccgcgacaacgtgtgctccctgtcctggccgtcggcggagccgtgcaatggctacccgcagccctacctcggcagcccagtgtctctcaaccctcccttcggccgcacgtgcgagctggcgcgcgtggaggacggcaagggttactaccgcgagccgtgcgccgagggtggcggcgggggcctgaagcgtgaggagcgcgggcgcgacccgggagccgggcccggggcagcgctgctcccgctggagccgtcggggccgcctgcgctcggcttcaagtacgactacgcggcgggcggcggcggtggcgacggcggcggcggcgcaggacctccgcacgacccgccctcctgccagtcgctggaatccgactccagttcgtccctgctcaacgagggcaacaagggcgccggcgcaggcgaccccggcagcttggtatcgccgttgaaccccggcggcgggctctcggccagcggcgcgccctggtacccgatcaacagccgctctcggaagaagcgcaagccctattcgaagttgcaactggcagagctggagggcgagtttctggtcaacgagttcatcacacgccagcgccggagggaactctcagaccgcttgaatcttagtgaccagcaggtcaagatctggtttcagaaccggagaatgaaaaagaaaagacttctgttgagggagcaagctctctccttcttt

SEQ ID NO: 5278 - DNA, 777 bp, Homo sapiens
  source 1..777: mol_type = genomic DNA
atgggcgacgcggccgcagatccgcccggccccgccctgccctgtgagttcctccggccgggctgcggggctccgctcagtccgggagcgcagctgggccgcggcgctccgacctccgctttcccaccgcccgcagctgaagcacatcccgcagcccggcgcggactccgatcgccgcagttgccctctggcgccatgtcgcagaacggagcgcccgggatgcaggaggagagcctgcagggctcctgggtagaactgcacttcagcaataatgggaacgggggcagcgttccagcctcggtttctatttataatggagacatggaaaaaatactgctggacgcacagcatgagtctggacggagtagctccaagagctctcactgtgacagcccacctcgctcgcagacaccacaagataccaacagagcttctgaaacagatacccatagcattggagagaaaaacagctcacagtctgaggaagatgatattgaaagaaggaaagaagttgaaagcatcttgaagaaaaactcagattggatatgggattggtcaagtcggccggaaaatattccccccaaggagttcctctttaaacacccgaagcgcacggccaccctcagcatgaggaacacgagcgtcatgaagaaagggggcatattctctgcagaatttctgaaagttttccttccatctctgctgctctctcatttgctggccatcggattggggatctatattggaaggcgtctgacaacctccaccagcaccttt

SEQ ID NO: 5279 - DNA, 1590 bp, Homo sapiens
  source 1..1590: mol_type = genomic DNA
atgactcgcgatttcaaacctggagacctcatcttcgccaagatgaaaggttatccccattggccagctcgagtagacgaagttcctgatggagctgtaaagccacccacaaacaaactacccattttcttttttggaactcatgagactgcttttttaggaccaaaggatatatttccttactcagaaaataaggaaaagtatggcaaaccaaataaaagaaaaggttttaatgaaggtttatgggagatagataacaatccaaaagtgaaattttcaagtcaacaggcagcaactaaacaatcaaatgcatcatctgatgttgaagttgaagaaaaggaaactagtgtttcaaaggaagataccgaccatgaagaaaaagccagcaatgaggatgtgactaaagcagttgacataactactccaaaagctgccagaagggggagaaagagaaaggcagaaaaacaagtagaaactgaggaggcaggagtagtgacaacagcaacagcatccgttaatctaaaagtgagtcctaaaagaggacgacctgcagctacagaagtcaagattccaaaaccaagaggcagacccaaaatggtaaaacagccctgtccttcagagagtgacatcattactgaagaggacaaaagtaagaaaaaggggcaagaggaaaaacaacctaaaaagcagcctaagaaggatgaagagggccagaaggaagaagataagccaagaaaagagccggataaaaaagaggggaagaaagaagttgaatcaaaaaggaaaaatttagctaaaacaggggttacttcaacctccgattctgaagaagaaggagatgatcaagaaggtgaaaagaagagaaaaggtgggaggaactttcagactgctcacagaaggaatatgctgaaaggccaacatgagaaagaagcagcagatcgaaaacgcaagcaagaggaacaaatggaaactgagcagcagaataaagatgaaggaaagaagccagaagttaagaaagtggagaagaagcgagaaacatcaatggattctcgacttcaaaggatacatgctgagattaaaaattcactcaaaattgataatcttgatgtgaacagatgcattgaggccttggatgaacttgcttcacttcaggtcacaatgcaacaagctcagaaacacacagagatgattactacactgaaaaaaatacggcgattcaaagttagtcaggtaatcatggaaaagtctacaatgttgtataacaagtttaagaacatgttcttggttggtgaaggagattccgtgatcacccaagtgctgaataaatctcttgctgaacaaagacagcatgaggaagcgaataaaaccaaagatcaagggaagaaagggccaaacaaaaagctagagaaggaacaaacagggtcaaagactctaaatggaggatctgatgctcaagatggtaatcagccacaacataacggggagagcaatgaagacagcaaagacaaccatgaagccagcacgaagaaaaagccatccagtgaagagagagagactgaaatatctctgaaggattctacactagataac

SEQ ID NO: 5280 - DNA, 999 bp, Homo sapiens
  source 1..999: mol_type = genomic DNA
atgactcgcgatttcaaacctggagacctcatcttcgccaagatgaaaggttatccccattggccagctcgagtagacgaagttcctgatggagctgtaaagccacccacaaacaaactacccattttcttttttggaactcatgagactgcttttttaggaccaaaggatatatttccttactcagaaaataaggaaaagtatggcaaaccaaataaaagaaaaggttttaatgaaggtttatgggagatagataacaatccaaaagtgaaattttcaagtcaacaggcagcaactaaacaatcaaatgcatcatctgatgttgaagttgaagaaaaggaaactagtgtttcaaaggaagataccgaccatgaagaaaaagccagcaatgaggatgtgactaaagcagttgacataactactccaaaagctgccagaagggggagaaagagaaaggcagaaaaacaagtagaaactgaggaggcaggagtagtgacaacagcaacagcatctgttaatctaaaagtgagtcctaaaagaggacgacctgcagctacagaagtcaagattccaaaaccaagaggcagacccaaaatggtaaaacagccctgtccttcagagagtgacatcattactgaagaggacaaaagtaagaaaaaggggcaagaggaaaaacaacctaaaaagcagcctaagaaggatgaagagggccagaaggaagaagataagccaagaaaagagccggataaaaaagaggggaagaaagaagttgaatcaaaaaggaaaaatttagctaaaacaggggttacttcaacctccgattctgaagaagaaggagatgatcaagaaggtgaaaagaagagaaaaggtgggaggaactttcagactgctcacagaaggaatatgctgaaaggccaacatgagaaagaagcagcagatcgaaaacgcaagcaagaggaacaaatggaaactgagcaccaaacaacatgtaatctacag

SEQ ID NO: 5281 - DNA, 987 bp, Homo sapiens
  source 1..987: mol_type = genomic DNA
atgactcgcgatttcaaacctggagacctcatcttcgccaagatgaaaggttatccccattggccagctcgagtagacgaagttcctgatggagctgtaaagccacccacaaacaaactacccattttcttttttggaactcatgagactgcttttttaggaccaaaggatatatttccttactcagaaaataaggaaaagtatggcaaaccaaataaaagaaaaggttttaatgaaggtttatgggagatagataacaatccaaaagtgaaattttcaagtcaacaggcagcaactaaacaatcaaatgcatcatctgatgttgaagttgaagaaaaggaaactagtgtttcaaaggaagataccgaccatgaagaaaaagccagcaatgaggatgtgactaaagcagttgacataactactccaaaagctgccagaagggggagaaagagaaaggcagaaaaacaagtagaaactgaggaggcaggagtagtgacaacagcaacagcatctgttaatctaaaagtgagtcctaaaagaggacgacctgcagctacagaagtcaagattccaaaaccaagaggcagacccaaaatggtaaaacagccctgtccttcagagagtgacatcattactgaagaggacaaaagtaagaaaaaggggcaagaggaaaaacaacctaaaaagcagcctaagaaggatgaagagggccagaaggaagaagataagccaagaaaagagccggataaaaaagaggggaagaaagaagttgaatcaaaaaggaaaaatttagctaaaacaggggttacttcaacctccgattctgaagaagaaggagatgatcaagaaggtgaaaagaagagaaaaggtgggaggaactttcagactgctcacagaaggaatatgctgaaaggccaacatgagaaagaagcagcagatcgaaaacgcaagcaagaggaacaaatggaaactgagcattttgctctg

SEQ ID NO: 5282 - DNA, 1548 bp, Homo sapiens
  source 1..1548: mol_type = genomic DNA
atggattcagtgacctttgacgatgtggctgtggacttcacccaggaggagtggactttactggactcaactcagagaagcctctacagtgacgtgatgctggagaactacaagaacctggccacagtaggaggtcagatcatcaaacccagtctaatctcttggttggaacaagaagagtcaaggacagttcagggaggagttctccaaggatgggaaatgcgacttgaaacccagtggtctatacttcagcaggactttttgaggggtcagacatccattgggatacaattggaaggaaaacacaatggaagggaactctgtgactgtgagcaatgtggagaagtcttcagtgaacactcatgccttaagacgcacgtgagaactcaaagtacagggaacactcatgactgtaatcagtatggaaaagatttccttaccctgtgtgagaaaacctctactggtgagaaactttctgagtttaatcagagtgaaaaaatcttcagcctgacaccaaatattgtataccagagaactagcacacaagaaaagtcatttgaatgtagtcactgtggaaaatccttcattaatgagtcataccttcaggcacatatgagaactcacaatggagaaaaactctacgaatggaggaattatgggccaggttttattgactctacaagcctttctgtgcttatagaaaccctcaatgcaaaaaagccctacaaatgtaaggaatgtggaaaaggctatagatacccagcctacctcagtattcacatgcgaacccacactggggagaaaccatatgaatgtaaggaatgtgggaaagccttcaattattccaactcatttcagatacatggaagaactcacactggagagaaaccctatgtatgtaaggaatgtgggaaagccttcactcagtactcgggccttagtatgcatgtacgatctcacagtggagacaagccctatgaatgtaaggaatgtgggaaatccttccttacatcctcacgccttattcaacatataagaactcacactggagagaagccttttgtatgtgttgaatgtgggaaagcctttgcagtttcctcaaatcttagtggacatttgagaactcacactgaagagaaggcctgtgagtgtaagatatgtgggaaagtatttgggtatccctcatgtcttaataatcacatgcgaacgcacagtgcccagaaaccatacacctgtaaggaatgtgggaaggcttttaactattccacccaccttaaaattcacatgcgaatccacactggagaaaaaccctatgagtgtaaacaatgtggaaaggccttcagtcattccagttcatttcaaatacatgaaaggactcacactggagagaaaccctatgaatgcaaggagtgtgggaaagccttcacgtgttccagttcctttagaattcatgaaaaaactcacacagaagagaaaccctataaatgtcagcaatgcgggaaagcttacagtcatccccgttcacttcgaagacatgaacaaattcac

SEQ ID NO: 5283 - DNA, 354 bp, Homo sapiens
  source 1..354: mol_type = genomic DNA
atggcagctgctgatttgtcccatggacattatctttctggggacccagtttgccttcatgaagaaaagacaccagcaggaagaatagtggctgactgcctaacagattgttatcaggattcagtgacctttgacgatgtggctgtggacttcacccaggaggagtggactttactggactcaactcagagaagcctctacagtgacgtgatgctggagaactacaagaacctggccacagtaggaggtcagatcatcaaacccagtctaatctcttggttggaacaagaagagtcaaggacagttcagggaggagttctccaaggaaggaaaacacaatggaagggaactctg

SEQ ID NO: 5284 - DNA, 2256 bp, Homo sapiens
  source 1..2256: mol_type = genomic DNA
atggccgagccggcttcggtaactgtgacatttgatgatgtggccttatatttttcggaacaagagtgggagatcctggagaagtggcagaagcaaatgtataagcaagagatgaagaccaattacgagacccttgattccctggggtatgctttttccaagccagatttgatcacatggatggaacaagggagaatgctattaatcagcgaacagggatgcttagataaaacaagaaggacaactagccctcctactgatgaacagttgaacatgaagaatactggaaagttgctatgttttgatgacgaaggaactcccaggacaaaagaagaggattgccgtttaaatggtcctcaaaaacaggacttgtgtgctgccttacgagggaaagagagaaagattttattagctcaaacagccaccttccagtctccaagtctccgagaaacagagattctaaataaaaaagtcagcatcacagcatatgatccagacaagaaagacctgcggcataagcctcgggagaccccagggcgcttagaaattcccacagggccaagatgctattcctgctatgtctgtaggaaagtcttccaagtaaggagggatttgctaaagcacaaacggagccactccaagagccagctctgcagatacccaaagtacaaaaactcgtccagagggaagtccgaactcaggcggacgcagaggctcctgtgtcagaagaagcggttccagtgcagtgagtgtgagaagagctacttcctgaagggcagcctcgtcactcatcaggttgtccacaccggccagcggccctacccatgccctgagtgcgacaagaccttccggtacagggccaacctgaagaagcacctgtgtctacaccgcggggagcggccgttctgctgcggggagtgcggccgggccttcgtgcagcagtgcgagctcacggagcacttgcggctgcacagcggagagaagcccttccagtgtccgcagtgtgaccggtgcttccgcctgaagaggggcatgaaggtccatctgacccagcacagcgggaagaggcccttccactgtcccgagtgtggccggagcttctcccggaaggctgccctgaagacccaccagaggacgcacagcgaggaaaagccgttttcttgtggtgaatgtggcaggaaattcatctacaagattaagctggacgagcacatcagagttcacacgggagagaagcccttttcgtgtcccgagtgtaacaaaagtttccgcctcaagagaagcctgaaagcccacgggctgcagcacattgggaagcggcccttccagtgcccggagtgcagcaggggcttcttctggaggaacgccatgcgcgcccaccagcgcctgcacagcgagcaaaagcccttcccctgcgccgagtgcggcaagcgcttcacgcggccttccaagctcgcctgccacaccagagtccacgacaggcagaaggagtttccctgcggcgagtgcaaaaagaccttttctcagcagtcgcggctcacgcagcacctgaaggtccacaccacggaaaagccgttctcctgcgccgagtgcggccgcagtttccgccgacgcgcgcatctcacagagcacacgaggcttcacagtggcgaggagcccttccagtgtcccgagtgcgacaagagcttctcctggaaggcctccatgaagttccaccagcggatgcacagggacgagaagcccttcgcgtgcggtgagtgtgacaagacctacacgcatcagtctcagctcaccgagcacctgaggctgcacagtggagagaagccctaccagtgtcctgaatgcgagaagactttccgcctcaagggaaacctgaaaagccacctgctgcagcacagtggccaaaagccattctcttgtgtgatgtgcggcaaaagtttcactcaacagtaccggctcacagaacacattcgagtccacagcggggagaagcccttccagtgtccggagtgtgacaagagctactgcatcaggggcagcttgaaggtccacttgtataagcacagtggagagaggcccttccagtgtcccgagtgtggcaaaggcttcctccagaagagaagcctgaaggcccatctgtgccttcacagtggggagaggcctttttcttgtgatgagtgtggaaggagcttcacgtacgtgggggcgctcaagacccacattgcagtgcatgccaaagagaagccctccagcctc

SEQ ID NO: 5285 - DNA, 3501 bp, Homo sapiens
  source 1..3501: mol_type = genomic DNA
atgatcggagatggttgtgacctcggcctcggcgaggaggaagggggcacgggcctgccatacccttgccagttctgcgacaagtccttcatccgcttgagctacttgaagaggcacgagcagatccacagcgacaagctgccgttcaagtgcacctactgcagccgcctcttcaagcacaagaggagccgtgaccggcacatcaagctgcatacgggcgacaagaagtatcactgccacgagtgcgaggcagccttctcccgcagcgaccacctcaagatccacctgaagacccacagctccagcaagcccttcaagtgcactgtgtgcaagcgcggcttctcctccaccagctcgctgcagagccacatgcaggcccacaaaaagaacaaggagcatctggccaagtcggagaaggaagccaagaaggacgacttcatgtgcgactactgcgaggacaccttcagccagacggaggagctggagaagcacgtgctcacccgccacccgcagctgtccgagaaggcggacctgcagtgcattcactgccctgaggtcttcgtcgacgagaacacactgctcgcccatatccaccaagcccacgccaaccagaaacacaagtgccccatgtgccctgagcagttctcctcagtggaaggtgtctactgccacctggacagccaccggcagcccgactccagcaaccacagtgtcagtcccgaccctgtactgggcagcgtggcctccatgagcagcgccacacccgactccagcgcctctgtggagcgtggctccaccccggactccaccttgaagccgctgcgggggcagaagaagatgcgggatgacgggcagggctggaccaaggtggtctatagctgcccctattgttccaagcgggactttaacagcctggccgtgctggagatccacctgaagaccatccacgcggacaagccccagcagagccacacatgtcagatctgcctggactccatgcccaccctctacaacctcaacgagcacgttcgcaagctgcacaagaaccatgcctaccctgtgatgcagtttggcaacatctctgccttccactgcaactactgccccgagatgttcgccgacatcaatagcctgcaggagcacatccgcgtctcccactgcggccccaacgccaacccctctgacggtaataatgctttcttctgcaaccagtgctccatgggtttccttactgagtcctccctcaccgagcacatccagcaggcccactgcagtgtgggcagtgccaaactagagtctccggtggtgcagcccacgcagtccttcatggaggtctattcctgcccctactgcaccaactcccccatctttggctccatcctgaaactcaccaagcacatcaaggagaaccacaagaacattccactggcccacagcaagaagtccaaggccgagcagagcccagtctcgtccgatgtggaggtgtcttccccgaagcggcagcggctctcagcaagcgccaactccatctccaatggggagtatccttgcaatcaatgcgacctcaagttctccaactttgagagcttccagacccacctgaagctgcacctggagctgctgctgcggaagcaagcgtgcccccagtgcaaagaggactttgactcccaggagtccctcctgcagcacctgacagtgcattacatgaccacgtcgacccactatgtgtgcgagagctgcgacaagcaattttcctcggtggatgacctgcagaagcacctgctggacatgcacacctttgtgttgtaccactgcaccctgtgtcaggaggtcttcgactccaaggtgtccatccaggtgcacctggcggtgaagcacagcaatgagaagaagatgtaccgctgcacggcctgcaactgggacttccgcaaggaggctgacctgcaggtgcacgtcaaacacagccacctgggcaacccggccaaggctcacaagtgcatcttctgtggggagaccttcagcaccgaggtggagctgcagtgccacatcaccacacacagcaagaagtataactgtaagttctgcagcaaggccttccacgccatcatcctgctggagaagcacctgcgggagaagcactgtgtgtttgatgctgcgaccgagaacggcacggccaatggggtacccccaatggccaccaagaaagctgagcctgctgacctgcagggcatgctgcttaagaaccctgaggcacctaacagccatgaggccagcgaggatgacgtggacgcgtcggagcccatgtacggctgtgacatctgtggggcggcctacaccatggaggtgctgctgcagaatcaccggctgcgggaccacaatatccggccgggcgaggatgatggctcacgcaagaaggctgagtttatcaagggcagtcacaagtgcaacgtttgttcacggactttcttctcggagaacgggctacgggagcacctgcagacgcaccggggccctgccaagcactacatgtgtcccatctgtggtgagcgcttcccttcgctgctgacgctcaccgaacacaaggtgacccacagcaagagcctggacacgggcacctgtcgcatctgcaagatgcccctgcagagcgaggaggagtttattgagcactgccagatgcaccctgacctgcgcaactcactcacgggcttccgctgtgtggtctgcatgcagacagtcacttccacgcttgagctcaagatccatggcaccttccacatgcagaagctggcgggcagctcagcggcgtcctcccccaatggccaggggctgcagaagctctacaagtgcgccctgtgcctcaaggagttccgcagcaagcaggacctggtgaagcttgacgtcaatgggctgccctacggcctctgcgccggctgcatggcccgcagcgccaacggacaggtgggtggcctggccccgcccgagcccgccgaccggccctgtgccggcctccgttgccccgagtgcagtgtcaagtttgagagtgccgaagacctggagagccacatgcaggtggaccaccgtgacctcacgccggagaccagtgggccccggaaaggcacccagacatcgccagtgccccggaaaaagacataccagtgcatcaagtgccagatgaccttcgagaacgagagagagatccaaatccacgttgccaaccacatgattgaggaaggcatcaaccacgagtgtaagctgtgcaaccagatgttcgactccccggccaagctcctctgtcacctcattgagcacagcttcgagggcatgggcggcaccttcaaatgccccgtgtgtttcacagtcttcgtccaggccaacaagttgcagcagcacatctttgccgtgcacgggcaggaggacaagatctacgactgctcacagtgccctcagaagttcttcttccagaccgagctgcagaaccacacgatgagccagcacgcacag

SEQ ID NO: 5286 - DNA, 3672 bp, Homo sapiens
  source 1..3672: mol_type = genomic DNA
atggaggatgaatcaatttacacctgcgatcactgtcagcaggacttcgagtctctggcagacctgacggaccaccgggcccaccgctgtcctggagatggtgatgacgacccacaactctcctgggtggcctcgtctccctccagcaaggatgttgcgtcacccacgcagatgatcggagatggttgtgacctcggcctcggcgaggaggaagggggcacgggcctgccatacccttgccagttctgcgacaagtccttcatccgcttgagctacttgaagaggcacgagcagatccacagcgacaagctgccgttcaagtgcacctactgcagccgcctcttcaagcacaagaggagccgtgaccggcacatcaagctgcatacgggcgacaagaagtatcactgccacgagtgcgaggcagccttctcccgcagcgaccacctcaagatccacctgaagacccacagctccagcaagcccttcaagtgcactgtgtgcaagcgcggcttctcctccaccagctcgctgcagagccacatgcaggcccacaaaaagaacaaggagcatctggccaagtcggagaaggaagccaagaaggacgacttcatgtgcgactactgcgaggacaccttcagccagacggaggagctggagaagcacgtgctcacccgccacccgcagctgtccgagaaggcggacctgcagtgcattcactgccctgaggtcttcgtcgacgagaacacactgctcgcccatatccaccaagcccacgccaaccagaaacacaagtgccccatgtgccctgagcagttctcctcagtggaaggtgtctactgccacctggacagccaccggcagcccgactccagcaaccacagtgtcagtcccgaccctgtactgggcagcgtggcctccatgagcagcgccacacccgactccagcgcctctgtggagcgtggctccaccccggactccaccttgaagccgctgcgggggcagaagaagatgcgggatgacgggcagggctggaccaaggtggtctatagctgcccctattgttccaagcgggactttaacagcctggccgtgctggagatccacctgaagaccatccacgcggacaagccccagcagagccacacatgtcagatctgcctggactccatgcccaccctctacaacctcaacgagcacgttcgcaagctgcacaagaaccatgcctaccctgtgatgcagtttggcaacatctctgccttccactgcaactactgccccgagatgttcgccgacatcaatagcctgcaggagcacatccgcgtctcccactgcggccccaacgccaacccctctgacggtaataatgctttcttctgcaaccagtgctccatgggtttccttactgagtcctccctcaccgagcacatccagcaggcccactgcagtgtgggcagtgccaaactagagtctccggtggtgcagcccacgcagtccttcatggaggtctattcctgcccctactgcaccaactcccccatctttggctccatcctgaaactcaccaagcacatcaaggagaaccacaagaacattccactggcccacagcaagaagtccaaggccgagcagagcccagtctcgtccgatgtggaggtgtcttccccgaagcggcagcggctctcagcaagcgccaactccatctccaatggggagtatccttgcaatcaatgcgacctcaagttctccaactttgagagcttccagacccacctgaagctgcacctggagctgctgctgcggaagcaagcgtgcccccagtgcaaagaggactttgactcccaggagtccctcctgcagcacctgacagtgcattacatgaccacgtcgacccactatgtgtgcgagagctgcgacaagcaattttcctcggtggatgacctgcagaagcacctgctggacatgcacacctttgtgttgtaccactgcaccctgtgtcaggaggtcttcgactccaaggtgtccatccaggtgcacctggcggtgaagcacagcaatgagaagaagatgtaccgctgcacggcctgcaactgggacttccgcaaggaggctgacctgcaggtgcacgtcaaacacagccacctgggcaacccggccaaggctcacaagtgcatcttctgtggggagaccttcagcaccgaggtggagctgcagtgccacatcaccacacacagcaagaagtataactgtaagttctgcagcaaggccttccacgccatcatcctgctggagaagcacctgcgggagaagcactgtgtgtttgatgctgcgaccgagaacggcacggccaatggggtacccccaatggccaccaagaaagctgagcctgctgacctgcagggcatgctgcttaagaaccctgaggcacctaacagccatgaggccagcgaggatgacgtggacgcgtcggagcccatgtacggctgtgacatctgtggggcggcctacaccatggaggtgctgctgcagaatcaccggctgcgggaccacaatatccggccgggcgaggatgatggctcacgcaagaaggctgagtttatcaagggcagtcacaagtgcaacgtttgttcacggactttcttctcggagaacgggctacgggagcacctgcagacgcaccggggccctgccaagcactacatgtgtcccatctgtggtgagcgcttcccttcgctgctgacgctcaccgaacacaaggtgacccacagcaagagcctggacacgggcacctgtcgcatctgcaagatgcccctgcagagcgaggaggagtttattgagcactgccagatgcaccctgacctgcgcaactcactcacgggcttccgctgtgtggtctgcatgcagacagtcacttccacgcttgagctcaagatccatggcaccttccacatgcagaagctggcgggcagctcagcggcgtcctcccccaatggccaggggctgcagaagctctacaagtgcgccctgtgcctcaaggagttccgcagcaagcaggacctggtgaagcttgacgtcaatgggctgccctacggcctctgcgccggctgcatggcccgcagcgccaacggacaggtgggtggcctggccccgcccgagcccgccgaccggccctgtgccggcctccgttgccccgagtgcagtgtcaagtttgagagtgccgaagacctggagagccacatgcaggtggaccaccgtgacctcacgccggagaccagtgggccccggaaaggcacccagacatcgccagtgccccggaaaaagacataccagtgcatcaagtgccagatgaccttcgagaacgagagagagatccaaatccacgttgccaaccacatgattgaggaaggcatcaaccacgagtgtaagctgtgcaaccagatgttcgactccccggccaagctcctctgtcacctcattgagcacagcttcgagggcatgggcggcaccttcaaatgccccgtgtgtttcacagtcttcgtccaggccaacaagttgcagcagcacatctttgccgtgcacgggcaggaggacaagatctacgactgctcacagtgccctcagaagttcttcttccagaccgagctgcagaaccacacgatgagccagcacgcacag

SEQ ID NO: 5287 - DNA, 1704 bp, Homo sapiens
  source 1..1704: mol_type = genomic DNA
atgcggcgctcagtcctggtcaggaacccaggccacaaaggcctgagacccgtttatgaagagctcgactctgactccgaggacctagaccccaatcctgaagatctggacccggtttctgaagacccagagcctgatcctgaagacctcaacactgtcccggaagacgtggaccccagctatgaagatctggagcccgtctcggaggatctggaccccgacgccgaagctccgggctcggaaccccaagatcccgaccccatgtcttcgagtttcgacctcgatccagatgtgattggccccgtacccctgattctcgatcctaacagcgacaccctcagccccggcgatccaaaagtggaccccatctcctctggcctcactgccaccccccaggtcttggccaccagccccgcggtgctccccgcccccgccagcccgccccggcccttctcctgcccggattgcgggcgagccttccgccgcagctccgggctgagccagcatcgccgcacgcacagcggcgagaagccgtaccgctgccccgactgcgggaagtccttcagccacggtgccaccctggctcagcaccgtggcatccacactggggcgcggccgtaccagtgcgcggcctgcggcaaggccttcggctggcgctccacgctgctgaaacatcgcagcagccacagcggggagaagccgcaccactgcccggtgtgtggcaaggccttcgggcacggctcgctcctggcacagcacctgcgcacgcacggcggcccgcggccccacaagtgcccggtgtgcgccaagggcttcggccagggctctgcgctgctcaaacacctgcgcacgcacacgggcgagcggccctacccgtgtccgcagtgcggcaaggccttcgggcagagctcggcgctgctgcagcaccagcgcacacacacggccgagcgcccctaccgctgcccccactgcggcaaagccttcgggcagagctccaacttgcaacaccacctgcgcatccacacgggcgagcggccctacgcctgcccgcactgctccaaggccttcggccagagctcagcgctgctccagcacctgcacgtgcattcgggcgagcgtccctatcgctgtcagctctgcgggaaggccttcggccaggcctccagcctcaccaagcacaaacgggtgcatgagggtgcagccgctgctgcagctgccgcggccgctgcagctgcagcagcggccgccggcctgggcctcgggcctggcctaagccctgcatccatgatgaggccggggcaggtctccctcctgggtcctgatgctgtttctgtgctcggctctggcttgggcctcagccctggcaccagctctggccgcaaccctgaccctggctctgggccgggcactctgccggatcccagctccaaacccctccccggctccagatccacccccagccctactcctgtggaatcttctgacccaaaggctgggcacgacgctggtcccgaccttgtgcccagcccagaccttgatcctgtgcccagcccagaccctgatcctgtgcccagccctgatcccaaccctgtgtcctgccctgacccctgttctcccactcgtggcactgtcagcccagccctccctaccggcgagagtccagagtgggtacaggagcaaggggcactgctggggcctgatggc

SEQ ID NO: 5288 - DNA, 2022 bp, Homo sapiens
  source 1..2022: mol_type = genomic DNA
atgggaccattgacatttacagatgtggccatagaattctctctggaggagtggcagtgcctggacacagcacaacagaacttatatagaaatgtgatgttagagaactacagaaacttggtcttcctgggtattgctgtttctaagccagacctaatcacttgtctagagaaagaaaaagaaccctgcaagatgaagcgacatgaaatggtggatgaacccccagttgtgtgttctcattttgctgaagacttttggccagagcaagacataaaagattctttccaaaaagtgacactgaggagatatgataaacgtggacatgagaacttacaattaagaaaaggctataaaactgtaggtgattgtaagctatacaaaggaggttataatggacttaaccaatgtttgacacttacccagagcaaaatgtatcactgtgatatatatgtaaaagtcttttatgcattttcaaatgcagatagatacaagacaagacatactggaaagaaacctttccagtgtaaaaaatgtggcaaatcattttgcatgctttcacaactaactcaacataagaaaattcatattagagagaatacctacagatgtaaagaatttggcaatgcctttaatcagtcctcagcccttactaaccataagagaatttatgttggtgagaaacactacagatgtgaagaatgtggcaaagcatttaaccactactcaacccttactaaccataagagaattcatactggagagaaaccctacaaatgtaaagaatgtggcaaagcctttagcaggtactcaacccttactacccataagagaattcattctggagagaagccctacaaatgtgatgaatgtggcaaaacctttagcatatcctcaacctttactaaacataagataattcatactgaagagaaaccctacaaatgtaaagaatgtggcaaagcctttaaccggtcctcaacccttactagccataagagaatacatactggtgagaaaccctacaaatgtgaagaatgtggcaaagcctttaactggtcttcaactcttactaaacataaggtaattcatactggagagaagccctacaaatgtgaagaatgtggcaaagcttttaaccagtcttcaagacttactcgacataaaaaaattcatactggagaggaaccctacaaatttgaaaaatgtggcagagtttttacctgttcctcaacacttactcaagacaagaaaattcatactggagagaaaccctacaattgtgaagaatgtggcaaagtttttacctattcctctacacttactagacataagagaattcatactgaagagaaaccctataaatgtaacgaatgtggcaaagcttttaaccggtcctcacaccttactagccataggagaattcatactggagagaaaccctacaaatgtgaagaatgtggcaaagcctttaagcagtcctcaaaccttaacagtcataaaaaaattcatagtggagagaaaccctacaaatgtgaagaatgtggcaaagcttttatcctgtcctcaagacttactcaacataagaaaattcatactggagagaaaccttacaaatgtgaagaatgtggcaaagcttttaaccggtcctcaagacttactcaacataagaaaattcatactggagagaaaccctacaaatgtaaacaatgtgacaaagcttttacccactcctcaaaccttagtagtcataagaaaattcatagtggagagaaaccctacaaatgtgaagaatgtggcaaagcttttaatcggtcctcaagacttactcaacataagaaaattcatactagagagaaaccttacaaatgtgaagaatgtgccaaagcttttacccggtcttcaagacttactcaacataagaaaattcataggatgggtgtggtggctcatgcctgtaatcccagcactttgggaggcagaggtgggcggatcacgaggtcaggagatcgagaccgtcctggc

SEQ ID NO: 5289 - DNA, 1857 bp, Homo sapiens
  source 1..1857: mol_type = genomic DNA
atggcctccggtgcgtataacccgtatatagagataattgaacaacccaggcagaggggaatgcgttttagatacaaatgtgaagggcgatcagcaggcagcattccaggggagcacagcacagacaacaaccgaacatacccttctatccagattatgaactattatggaaaaggaaaagtgagaattacattagtaacaaagaatgacccatataaacctcatcctcatgatttagttggaaaagactgcagagacggctactatgaagcagaatttggacaagaacgcagacctttgtttttccaaaatttgggtattcgatgtgtgaagaaaaaagaagtaaaagaagctattattacaagaataaaggcaggaatcaatccattcaatgtccctgaaaaacagctgaatgatattgaagattgtgacctcaatgtggtgagactgtgttttcaagtttttctccctgatgaacatggtaatttgacgactgctcttcctcctgttgtctcgaacccaatttatgacaaccgtgctccaaatactgcagaattaaggatttgtcgtgtaaacaagaattgtggaagtgtcagaggaggagatgaaatatttctactttgtgacaaagttcagaaagatgacatagaagttcgttttgtgttgaacgattgggaagcaaaaggcatcttttcacaagctgatgtacaccgtcaagtagccattgttttcaaaactccaccatattgcaaagctatcacagaacccgtaacagtaaaaatgcagttgcggagaccttctgaccaggaagttagtgaatctatggattttagatatctgccagatgaaaaagatacttacggcaataaagcaaagaaacaaaagacaactctgcttttccagaaactgtgccaggatcacgtagaaacagggtttcgccatgttgaccaggatggtcttgaactcctgacatcaggtgatccacccaccttggcctcccaaagtgctgggattacagttaattttcctgagagaccaagacctggtctcctcggttcaattggagaaggaagatacttcaaaaaagaaccaaacttgttttctcatgatgcagttgtgagagaaatgcctacaggggtttcaagtcaagcagaatcctactatccctcacctgggcccatctcaagtggattgtcacatcatgcctcaatggcacctctgccttcttcaagctggtcatcagtggcccaccccaccccacgctcaggcaatacaaacccactgagtagtttttcaacaaggacacttccttctaattcgcaaggtatcccaccattcctgagaatacctgttgggaatgatttaaatgcttctaatgcttgcatttacaacaatgccgatgacatagtcggaatggaagcgtcatccatgccatcagcagatttatatggtatttctgatcccaacatgctgtctaattgttctgtgaatatgatgacaaccagcagtgacagcatgggagagactgataatccaagacttctgagcatgaatcttgaaaacccctcatgtaattcagtgttagacccaagagacttgagacagctccatcagatgtcctcttccagtatgtcagcaggcgccaattccaatactactgtttttgtttcacaatcagatgcatttgagggatctgacttcagttgtgcagataacagcatgataaatgagtcgggaccatcaaacagtactaatccaaacagtcatggttttgttcaagatagtcagtattcaggtattggcagtatgcaaaatgagcaattgagtgactcctttccatatgaattttttcaagta

SEQ ID NO: 5290 - DNA, 1485 bp, Homo sapiens
  source 1..1485: mol_type = genomic DNA
atggctgcaaattgcacatcctcatggagtctaggagaatcctgcaacagacctgggttggagctgccacggtctatggcatcctcagaaactcaacttggaaatcacgacgtggaccctgagatttctcacgtgaacttcaggatgttcagctgcccgaaggagtcggaccccatccaggctctgaggaaactcactgagctgtgccatctgtggctgaggcccgacctccacaccaaagagcagatcctggacatgctggtgatggagcagttcatgatctccatgccccaggagctccaggtcttagtcatgatgaacggtgtgcagagctgcaaagacctggaggacctgctacgaaataacagaagacccaagaaatggtctgtggtcaccttccacggaaaggaatatattgtgcaggactcagatatcgagatggctgaagccccctccagtgtcagagatgatctgaaagacgtgtccagccaacgggcctcctcggtgaaccagatgcgtccaggggaaggccaggcccaccgagagctgcagatcctgcccagggtccctgcattgtccaggaggcagggagaggactttctgctacacaagagtattgacgtaacaggtgacccaaagtctctgagacccaagcagaccttggagaaggatctgaaggaaaacagggaagagaacccaggactgacatccccagagcctcagcttccaaagagtcccaatctggtgagagcaaaggaggggaaggaccccccaaaaatagcctctgtggaaaatgtggatgctgacacaccttctgcctgcgttgtggagagagaagcttcgactcacagcgggaacagaggagacgctctgaatctgagcagtcccaaaagaagcaaaccagatgcctcctccatttcccaagaagagcctcaaggagaagccacacctgtgggcaacagagaatccccgggacaagctgggatgaattcaattcattccccaggccctgcgagcccagtcagtcacccggatggccaagaagccaaggcactgccgccctttgcatgtgacgtgtgcgagaagaggtttacgtgtaattccaagctagtcatccacaagagatcacacacaggcgagagactctttcaatgtaatctctgtgggaagcgcttcatgcagcttattagcctccaatttcaccagcgaacccacactggcgagaggccctacacgtgtgacgtctgccagaagcagttcacccagaagtcctacttgaagtgtcacaagagaagccacacaggggagaagcccttcgaatgtaaagactgcaagaaagttttcacctacagggggagcctgaaggagcaccagcgcatccactccggagagaaaccctacaaatgttccaagtgtccaagagccttcagtcggctgaaattgttaagacgccaccagaaaacacatccagaagctacttctcag

SEQ ID NO: 5291 - DNA, 1485 bp, Homo sapiens
  source 1..1485: mol_type = genomic DNA
atggctgcaaattggacactctcatggggtcagggaggaccctgcaacagccctgggtcagacactccacggtctgtggcgtccccagaaactcaacttggaaatcacgacaggaaccctgagacttggcacatgaatttcaggatgttcagctgcccagaggagtcggaccccatccaggctctgaggaaactcactgagctgtgccatctgtggctgaggcccgacctccacaccaaagagcagatcctggacatgctggtgatggagcagttcatgatctccatgccccaggagctccaggtcttagtcaaggtgaacggtgtgcagagctgcaaagacctggaggacctgctacgaaataacagaagacccaagaaatggtctatagtcaacttgctcggcaaagaatatcttatgctgaactcagatgtcgagatggctgaagcccccgccagtgtcagagatgatccgagagacgtgtccagccagtgggcctcctctgtgaaccagatgcatccggggacaggccaggcccgccgagagcagcagatcctgcccagggtcgctgcactgtccaggaggcagggagaggactttctgctacacaagagtattgacgtaacaggtgacccaaactctccgagacccaagcagaccttggagaaggatctgaaggaaaacagggaagagaacccaggactgtcatccccagagcctcagcttccaaagagtcccaatctggtgagagcaaaggaggggaaggaaccccagaaaagagcctctgtggaaaatgtggatgctgacacaccttctgcctgcgttgtggagagagaagctttgactcacagcgggaacagaggagatgctctgaatctgagcagtcccaaaagaagcaaaccagatgcctcctccatttcccaagaagagcctcaaggagaagccacacctgtgggcaacagagaatccccaggacaagctgagatcaatccagttcattccccaggccctgcgggcccggtcagtcacccagatggccaagaagccaaggccctgccgccctttgcatgtgacgtgtgcaataaatcatttaagtatttttcccagctaagcatccacaggaggtcacacacaggagacagaccctttcaatgtgatctctgtcggaagcgcttcttgcagccctcagacctccgagttcaccagcgagtccacactggcgagaggccctacatgtgtgacgtctgccaaaagcggttcgcccacgagtccaccttacagggccacaagaggatccacaccggggagaggccgtttaaatgtaaatactgcagcaaagttttcagccacaaggggaacctgaacgttcaccagcgcacccactccggagagaagccctacaaatgtcccacctgtcaaaaggccttccgtcagctggggacattcaagcgtcacctgaaaacacaccgggaaaccacctcccag

SEQ ID NO: 5292 - DNA, 813 bp, Homo sapiens
  source 1..813: mol_type = genomic DNA
atgttacaggcgtgcaaaatggaagggtttcccctcgtcccccctcagccatcagaagacctggtgccctatgacacggatctataccaacgccaaacgcacgagtattacccctatctcagcagtgatggggagagccatagcgaccattactgggacttccacccccaccacgtgcacagcgagttcgagagcttcgccgagaacaacttcacggagctccagagcgtgcagcccccgcagctgcagcagctctaccgccacatggagctggagcagatgcacgtcctcgatacccccatggtgccaccccatcccagtcttggccaccaggtctcctacctgccccggatgtgcctccagtacccatccctgtccccagcccagcccagctcagatgaggaggagggcgagcggcagagccccccactggaggtgtctgacggcgaggcggatggcctggagcccgggcctgggctcctgcctggggagacaggcagcaagaagaagatccgcctgtaccagttcctgttggacctgctccgcagcggcgacatgaaggacagcatctggtgggtggacaaggacaagggcaccttccagttctcgtccaagcacaaggaggcgctggcgcaccgctggggcatccagaagggcaaccgcaagaagatgacctaccagaagatggcgcgcgcgctgcgcaactacggcaagacgggcgaggtcaagaaggtgaagaagaagctcacctaccagttcagcggcgaagtgctgggccgcgggggcctggccgagcggcgccacccgccccac

SEQ ID NO: 5293 - DNA, 810 bp, Homo sapiens
  source 1..810: mol_type = genomic DNA
atgttacaggcgtgcaaaatggaagggtttcccctcgtcccccctccatcagaagacctggtgccctatgacacggatctataccaacgccaaacgcacgagtattacccctatctcagcagtgatggggagagccatagcgaccattactgggacttccacccccaccacgtgcacagcgagttcgagagcttcgccgagaacaacttcacggagctccagagcgtgcagcccccgcagctgcagcagctctaccgccacatggagctggagcagatgcacgtcctcgatacccccatggtgccaccccatcccagtcttggccaccaggtctcctacctgccccggatgtgcctccagtacccatccctgtccccagcccagcccagctcagatgaggaggagggcgagcggcagagccccccactggaggtgtctgacggcgaggcggatggcctggagcccgggcctgggctcctgcctggggagacaggcagcaagaagaagatccgcctgtaccagttcctgttggacctgctccgcagcggcgacatgaaggacagcatctggtgggtggacaaggacaagggcaccttccagttctcgtccaagcacaaggaggcgctggcgcaccgctggggcatccagaagggcaaccgcaagaagatgacctaccagaagatggcgcgcgcgctgcgcaactacggcaagacgggcgaggtcaagaaggtgaagaagaagctcacctaccagttcagcggcgaagtgctgggccgcgggggcctggccgagcggcgccacccgccccac

SEQ ID NO: 5294 - DNA, 1500 bp, Homo sapiens
  source 1..1500: mol_type = genomic DNA
atgtcgggccccggaccgcgggagccgccgccggaggcaggcgcggcaggcggcgaggcggccgtcgagggcgcgggcggcggggacgcggcgctgggcgagccggggctgagcttcacgaccaccgacctgagcctggtggagatgacggaggtggagtacacgcagctgcagcacatcctctgctcgcacatggaggcggcggctgacggcgagctcgagacgcgcctcaactcggcgctgctggcggcggcgggcccgggcgcaggcgcgggcggcttcgcggcgggcggtcaggggggcgcggcgcccgtgtaccccgtgctgtgcccgtccgcgctggcggccgacgcgccctgcctgggccacatcgacttccaggagctgcgcatgatgctgctaagcgaggcgggcgcggcggagaagacgtcgggcggcggggacggagcgagggcccgggccgacggcgccgccaaggagggcgcgggcgcggctgcggctgcggctggacccgacggcgcgcccgaggcccgggccaagccggccgtgcgcgtccgcctggaggaccgcttcaacagcatccccgccgagccgccgcccgcgccgcgcggccccgagccccccgagccgggcggggcgctcaacaatttggtaactctcattcgacatccatctgaactaatgaatgttcctcttcagcaacaaaacaaatgtacagcattagtgaaaaataaaactgcggctacaactactgctttgcaatttacatacccactgtttactacaaatgcttgctctactagtggaaattctaatctttcacagacacagagttctagtaactcatgttctgtacttgaagctgccaagcaccaggatattggattgcctagagcattttctttctgttatcagcaagaaattgaatccactaaacagacgttaggtagtagaaacaaagttttgcctgagcaagtttggattaaagtgggagaagcagcgctatgcaaacaagcactgaagaggaatcggagtagaatgcgtcagttggacacaaatgtagagcgaagagcccttggagagattcagaatgtgggcgaaggtgccaccgccacacaaggcgcttggcagtcctcggagtcctcacaggcaaacctgggggagcaggcccagagtgggccccagggaggaaggtctcaacgtagggagaggcataaccgaatggaaagagatagaaggcgcagaatccgcatttgctgtgatgagttgaatctcttagtgccgttctgcaatgccgagactgacaaggccacaactctgcagtggaccacagcattcctgaaatacatccaggaaagacatggagattctcttaaaaaggaatttgagagcgtattttgcggtaaaactggccgaaggctaaagctgaccagaccggactccttggtgacctgtcctgcacaggggagtttacagagcagcccctcgatggagatcaag

SEQ ID NO: 5295 - DNA, 531 bp, Homo sapiens
  source 1..531: mol_type = genomic DNA
atgctcgccctggaggctgcacagctcgacgggccacacttcagctgtctgtacccagatggcgtcttctatgacctggacagctgcaagcattccagctaccctgattcagagggggctcctgactccctgtgggactggactgtggccccacctgtcccagccaccccctatgaagccttcgacccggcagcagccgcttttagccacccccaggctgcccagctctgctacgaaccccccacctacagccctgcagggaacctcgaactggcccccagcctggaggccccggggcctggcctccctgcataccccacggagaacttcgctagccagaccctggttcccccggcatatgccccgtaccccagccctgtgctatcagaggaggaagacttaccgttggacagccctgccctggaggtctcggacagcgagtcggatgaggccctcgtggctggccccgaggggaagggatccgagggactcgcaagaagctgcgcctgtaccagttcctgctggggctac

SEQ ID NO: 5296 - DNA, 786 bp, Homo sapiens
  source 1..786: mol_type = genomic DNA
atgctcgccctggaggctgcacagctcgacgggccacacttcagctgtctgtacccagatggcgtcttctatgacctggacagctgcaagcattccagctaccctgattcagagggggctcctgactccctgtgggactggactgtggccccacctgtcccagccaccccctatgaagccttcgacccggcagcagccgcttttagccacccccaggctgcccagctctgctacgaaccccccacctacagccctgcagggaacctcgaactggcccccagcctggaggccccggggcctggcctccctgcataccccacggagaacttcgctagccagaccctggttcccccggcatatgccccgtaccccagccctgtgctatcagaggaggaagacttaccgttggacagccctgccctggaggtctcggacagcgagtcggatgaggccctcgtggctggccccgaggggaagggatccgaggcagggactcgcaagaagctgcgcctgtaccagttcctgctggggctactgacgcgcggggacatgcgtgagtgcgtgtggtgggtggagccaggcgccggcgtcttccagttctcctccaagcacaaggaactcctggcgcgccgctggggccagcagaaggggaaccgcaagcgcatgacctaccagaagctggcgcgcgccctccgaaactacgccaagaccggcgagatccgcaaggtcaagcgcaagctcacctaccagttcgacagcgcgctgctgcctgcagtccgccgggcc

SEQ ID NO: 5297 - DNA, 513 bp, Homo sapiens
  source 1..513: mol_type = genomic DNA
atggcgtcttctatgacctggacagctgcaagcattccagctaccctgattcagagggggctcctgaccctggttcccccggcatatgccccgtaccccagccctgtgctatcagaggaggaagacttaccgttggacagccctgccctggaggtctcggacagcgagtcggatgaggccctcgtggctggccccgaggggaagggatccgaggcagggactcgcaagaagctgcgcctgtaccagttcctgctggggctactgacgcgcggggacatgcgtgagtgcgtgtggtgggtggagccaggcgccggcgtcttccagttctcctccaagcacaaggaactcctggcgcgccgctggggccagcagaaggggaaccgcaagcgcatgacctaccagaagctggcgcgcgccctccgaaactacgccaagaccggcgagatccgcaaggtcaagcgcaagctcacctaccagttcgacagcgcgctgctgcctgcagtccgccgggcc

SEQ ID NO: 5298 - DNA, 909 bp, Homo sapiens
  source 1..909: mol_type = genomic DNA
atggcagaggtggccagacaagcacaaacctctcaggagccctaccacgacaaggccagagaacaccccgatgacggaaagcatccagatggaggcctctacaacaagggaccctcctactcgagttattccgggtacataatgatgccaaatatgaataacgacccatacatgtcaaatggatctctttctccacccatcccgagaacatcaaataaagtgcccgtggtgcagccatcccatgcggtccatcctctcacccccctcatcacttacagtgacgagcacttttctccaggatcacacccgtcacacatcccatcagatgtcaactccaaacaaggcatgtccagacatcctccagctcctgatatccctactttttatcccttgtctccgggtggtgttggacagatcaccccacctcttggctggttttcccatcatatgattcccggtcctcctggtccccacacaactggcatccctcatccagctattgtaacacctcaggtcaaacaggaacatccccacactgacagtgacctaatgcacgtgaagcctcagcatgaacagagaaaggagcaggagccaaaaagacctcacattaagaagcctctgaatgcttttatgttatacatgaaagaaatgagagcgaatgtcgttgctgagtgtactctaaaagaaagtgcagctatcaaccagattcttggcagaaggtggcatgccctctcccgtgaagagcaggctaaatattatgaattagcacggaaagaaagacagctacatatgcagctttatccaggctggtctgcaagagacaattatggtaagaaaaagaagaggaagagagagaaactacaggaatctgcatcaggtacaggtccaagaatgacagctgcctacatc

SEQ ID NO: 5299 - DNA, 1158 bp, Homo sapiens
  source 1..1158: mol_type = genomic DNA
atgccccaactctccggaggaggtggcggcggcgggggggacccggaactctgcgccacggacgagatgatccccttcaaggacgagggcgatcctcagaaggaaaagatcttcgccgagatcagtcatcccgaagaggaaggcgatttagctgacatcaagtcttccttggtgaacgagtctgaaatcatcccggccagcaacggacacgaggtggccagacaagcacaaacctctcaggagccctaccacgacaaggccagagaacaccccgatgacggaaagcatccagatggaggcctctacaacaagggaccctcctactcgagttattccgggtacataatgatgccaaatatgaataacgacccatacatgtcaaatggatctctttctccacccatcccgagaacatcaaataaagtgcccgtggtgcagccatcccatgcggtccatcctctcacccccctcatcacttacagtgacgagcacttttctccaggatcacacccgtcacacatcccatcagatgtcaactccaaacaaggcatgtccagacatcctccagctcctgatatccctactttttatcccttgtctccgggtggtgttggacagatcaccccacctcttggctggttttcccatcatatgattcccggtcctcctggtccccacacaactggcatccctcatccagctattgtaacacctcaggtcaaacaggaacatccccacactgacagtgacctaatgcacgtgaagcctcagcatgaacagagaaaggagcaggagccaaaaagacctcacattaagaagcctctgaatgcttttatgttatacatgaaagaaatgagagcgaatgtcgttgctgagtgtactctaaaagaaagtgcagctatcaaccagattcttggcagaaggtggcatgccctctcccgtgaagagcaggctaaatattatgaattagcacggaaagaaagacagctacatatgcagctttatccaggctggtctgcaagagacaattatggtaagaaaaagaagaggaagagagagaaactacaggaatctgcatcaggtggaaaacgaagctcattcccaacgtgcaaagccaaggcagcgaccccaggacctcttctggagatggaagcttgt

SEQ ID NO: 5300 - DNA, 1113 bp, Homo sapiens
  source 1..1113: mol_type = genomic DNA
atgccccaactctccggaggaggtggcggcggcgggggggacccggaactctgcgccacggacgagatgatccccttcaaggacgagggcgatcctcagaaggaaaagatcttcgccgagatcagtcatcccgaagaggaaggcgatttagctgacatcaagtcttccttggtgaacgagtctgaaatcatcccggccagcaacggacacgaggtggccagacaagcacaaacctctcaggagccctaccacgacaaggccagagaacaccccgatgacggaaagcatccagatggaggcctctacaacaagggaccctcctactcgagttattccgggtacataatgatgccaaatatgaataacgacccatacatgtcaaatggatctctttctccacccatcccgagaacatcaaataaagtgcccgtggtgcagccatcccatgcggtccatcctctcacccccctcatcacttacagtgacgagcacttttctccaggatcacacccgtcacacatcccatcagatgtcaactccaaacaaggcatgtccagacatcctccagctcctgatatccctactttttatcccttgtctccgggtggtgttggacagatcaccccacctcttggctggttttcccatcatatgattcccggtcctcctggtccccacacaactggcatccctcatccagctattgtaacacctcaggtcaaacaggaacatccccacactgacagtgacctaatgcacgtgaagcctcagcatgaacagagaaaggagcaggagccaaaaagacctcacattaagaagcctctgaatgcttttatgttatacatgaaagaaatgagagcgaatgtcgttgctgagtgtactctaaaagaaagtgcagctatcaaccagattcttggcagaaggtggcatgccctctcccgtgaagagcaggctaaatattatgaattagcacggaaagaaagacagctacatatgcagctttatccaggctggtctgcaagagacaattatggtaagaaaaagaagaggaagagagagaaactacaggaatctgcatcaggtacaggtccaagaatgacagctgcctacatc

SEQ ID NO: 5301 - DNA, 2835 bp, Homo sapiens
  source 1..2835: mol_type = genomic DNA
atggcgccaaatcttaaaggcagaccacgcaaaaagaaaccatgcccacaaagaagagattcattcagtggtgttaaggattccaacaacaattccgatggcaaagccgttgccaaggtgaaatgtgaggccaggtcagccttgaccaagccgaagaataaccataactgtaaaaaagtctcaaatgaagaaaaaccaaaggttgccattggtgaagagtgcagggcagatgaacaagccttcttggtggcactttataaatacatgaaagaaaggaaaacgccgatagaacgaataccctatttaggttttaaacagattaacctttggactatgtttcaagctgctcaaaaactgggaggatatgaaacaataacagcccgccgtcagtggaaacatatttatgatgaattaggcggtaatcctgggagcaccagcgctgccacttgtacccgcagacattatgaaagattaatcctaccatatgaaagatttattaaaggagaagaagataagcccctgcctccaatcaaacctcggaaacaggagaacagttcacaggaaaatgagaacaaaacaaaagtatctggaaccaaacgcatcaaacatgaaatacctaaaagcaagaaagaaaaagaaaatgccccaaagccccaggatgcagcagaggtttcatcagagcaagaaaaagaacaagagactttaataagccagaaaagcatccctgagcctctcccagcagcagacatgaagaaaaaaatagaagggtatcaggaattttcagcgaagcccctggcatccagagtagacccagagaaggacaacgaaacagaccaaggttccaacagtgagaaggtggcagaggaggcgggagagaaggggcccacacctccactcccaagtgctcctctggccccagaaaaagattcagccttggtccctggggccagcaaacagccactcacctctcctagtgccctggtggactcaaaacaagaatccaaactgtgctgttttacagagagccctgaaagtgaaccccaagaagcatccttccccagcttccccaccacacagccaccgctggcaaaccagaatgagacggaggatgacaaactgcccgccatggcagattacattgccaactgcaccgtgaaggtggaccagctgggcagtgacgacatccacaatgcgctcaagcagaccccaaaggtccttgtggtccagtcgtttgacatgttcaaagacaaagacctgactgggcccatgaacgagaaccatggacttaattacacgcccctgctctactctaggggcaacccaggcatcatgtccccactggccaagaaaaagcttttgtcccaagtgagtggggccagcctctccagcagctacccttatggctccccaccccctttgatcagcaaaaagaaactgattgctagggatgacttgtgttccagtttgtcccagacccaccatggccaaagcactgaccatatggcggtcagccggccatcagtgattcagcacgtccagagtttcagaagcaagccctcggaagagagaaagaccatcaatgacatctttaagcatgagaaactgagtcgatcagatccccaccgctgcagcttctccaagcatcaccttaacccccttgctgactcctacgtcctgaagcaagaaattcaggagggcaaggataaactcttagagaaaagggccctcccccattcccacatgcctagcttcctggctgacttctactcgtcccctcatctccatagcctctacagacacaccgagcaccatcttcataatgaacagacatccaaatacccttccagggacatgtacagggaatcggaaaacagttcttttccttcccacagacaccaagaaaagctccatgtaaattatctcacgtccctgcacctgcaagacaaaaagtcggcggcagcagaagcccctacggatgatcagcctacagatctgagccttcccaagaacccgcacaaacctaccggcaaggtcctgggcctggctcattccaccacagggccccaggagagcaaaggcatctcccagttccaggtcttaggcagccagagtcgagactgtcaccccaaagcctgtcgggtatcacccatgaccatgtcaggccctaaaaaataccctgaatcgctttcaagatcaggaaaacctcaccatgtgagactggagaatttcaggaagatggaaggcatggtccacccaatcctgcaccggaaaatgagcccgcagaacattggggcggcgcggccgatcaagcgcagcctggaggatttggaccttgtgattgcagggaaaaaggcccgggcagtgtctcccttagacccatccaaggaggtctctgggaaggagaaggcctctgagcaggagagtgaaggcagcaaagcagcgcacggtgggcattccgggggcggatcagaaggccacaagcttcccctctcctcccctatcttcccaggtctgtattccgggagcctgtgtaactcgggcctcaactccaggctcccggctgggtattctcattctctgcagtacttgaaaaaccagactgtgctttctccactcatgcagcccctggctttccactcgcttgtgatgcaaagaggaatttttacatcaccgacaaattctcagcagctgtacagacacttggctgcggctacacctgtaggaagttcatatggggaccttttgcataacagcatttaccctttagctgctataaatcctcaagctgcctttccatcttcccagctgtcatccgtgcaccccagtacaaaactg

SEQ ID NO: 5302 - DNA, 3564 bp, Homo sapiens
  source 1..3564: mol_type = genomic DNA
atggagcccaactcactccagtgggtcggctcaccgtgtggcttgcacggaccttacattttctacaaggcttttcaattccaccttgaaggcaaaccaagaattttgtcccttggcgactttttctttgtaagatgtacgccaaaggatccgatttgcatagcggagctccagctgttgtgggaagagaggaccagccggcaacttttatccagctctaaactttatttcctcccagaagacactccccagggcagaaatagcgaccatggcgaggatgaagtcattgctgtttccgaaaaggtgattgtgaagcttgaagacctggtcaagtgggtacattctgatttctccaagtggagatgtggcttccacgctggaccagtgaaaactgaggccttgggaaggaatggacagaaggaagctctgctgaagtacaggcagtcaaccctaaacagtggactcaacttcaaagacgttctcaaggagaaggcagacctgggggaggacgaggaagaaacgaacgtgatagttctcagctacccccagtactgccggtaccgctcgatgctgaaacgcatccaggataagccatcttccattctaacggaccagtttgcattggccctggggggcattgcagtggtcagcaggaaccctcagatcctgtactgtcgggacacctttgaccacccgactctcatagaaaacgagagtatatgcgatgagtttgcgccaaatcttaaaggcagaccacgcaaaaagaaaccatgcccacaaagaagagattcattcagtggtgttaaggattccaacaacaattccgatggcaaagccgttgccaaggtgaaatgtgaggccaggtcagccttgaccaagccgaagaataaccataactgtaaaaaagtctcaaatgaagaaaaaccaaaggttgccattggtgaagagtgcagggcagatgaacaagccttcttggtggcactttataaatacatgaaagaaaggaaaacgccgatagaacgaataccctatttaggttttaaacagattaacctttggactatgtttcaagctgctcaaaaactgggaggatatgaaacaataacagcccgccgtcagtggaaacatatttatgatgaattaggcggtaatcctgggagcaccagcgctgccacttgtacccgcagacattatgaaagattaatcctaccatatgaaagatttattaaaggagaagaagataagcccctgcctccaatcaaacctcggaaacaggagaacagttcacaggaaaatgagaacaaaacaaaagtatctggaaccaaacgcatcaaacatgaaatacctaaaagcaagaaagaaaaagaaaatgccccaaagccccaggatgcagcagaggtttcatcagagcaagaaaaagaacaagagactttaataagccagaaaagcatccctgagcctctcccagcagcagacatgaagaaaaaaatagaagggtatcaggaattttcagcgaagcccctggcatccagagtagacccagagaaggacaacgaaacagaccaaggttccaacagtgagaaggtggcagaggaggcgggagagaaggggcccacacctccactcccaagtgctcctctggccccagaaaaagattcagccttggtccctggggccagcaaacagccactcacctctcctagtgccctggtggactcaaaacaagaatccaaactgtgctgttttacagagagccctgaaagtgaaccccaagaagcatccttccccagcttccccaccacacagccaccgctggcaaaccagaatgagacggaggatgacaaactgcccgccatggcagattacattgccaactgcaccgtgaaggtggaccagctgggcagtgacgacatccacaatgcgctcaagcagaccccaaaggtccttgtggtccagtcgtttgacatgttcaaagacaaagacctgactgggcccatgaacgagaaccatggacttaattacacgcccctgctctactctaggggcaacccaggcatcatgtccccactggccaagaaaaagcttttgtcccaagtgagtggggccagcctctccagcagctacccttatggctccccaccccctttgatcagcaaaaagaaactgattgctagggatgacttgtgttccagtttgtcccagacccaccatggccaaagcactgaccatatggcggtcagccggccatcagtgattcagcacgtccagagtttcagaagcaagccctcggaagagagaaagaccatcaatgacatctttaagcatgagaaactgagtcgatcagatccccaccgctgcagcttctccaagcatcaccttaacccccttgctgactcctacgtcctgaagcaagaaattcaggagggcaaggataaactcttagagaaaagggccctcccccattcccacatgcctagcttcctggctgacttctactcgtcccctcatctccatagcctctacagacacaccgagcaccatcttcataatgaacagacatccaaatacccttccagggacatgtacagggaatcggaaaacagttcttttccttcccacagacaccaagaaaagctccatgtaaattatctcacgtccctgcacctgcaagacaaaaagtcggcggcagcagaagcccctacggatgatcagcctacagatctgagccttcccaagaacccgcacaaacctaccggcaaggtcctgggcctggctcattccaccacagggccccaggagagcaaaggcatctcccagttccaggtcttaggcagccagagtcgagactgtcaccccaaagcctgtcgggtatcacccatgaccatgtcaggccctaaaaaataccctgaatcgctttcaagatcaggaaaacctcaccatgtgagactggagaatttcaggaagatggaaggcatggtccacccaatcctgcaccggaaaatgagcccgcagaacattggggcggcgcggccgatcaagcgcagcctggaggatttggaccttgtgattgcagggaaaaaggcccgggcagtgtctcccttagacccatccaaggaggtctctgggaaggagaaggcctctgagcaggagagtgaaggcagcaaagcagcgcacggtgggcattccgggggcggatcagaaggccacaagcttcccctctcctcccctatcttcccaggtctgtattccgggagcctgtgtaactcgggcctcaactccaggctcccggctgggtattctcattctctgcagtacttgaaaaaccagactgtgctttctccactcatgcagcccctggctttccactcgcttgtgatgcaaagaggaatttttacatcaccgacaaattctcagcagctgtacagacacttggctgcggctacacctgtaggaagttcatatggggaccttttgcataacagcatttaccctttagctgctataaatcctcaagctgcctttccatcttcccagctgtcatccgtgcaccccagtacaaaactg

SEQ ID NO: 5303 - DNA, 1578 bp, Homo sapiens
  source 1..1578: mol_type = genomic DNA
atgaaggagcgacacacgcccatcgagagggtgccccatctcggcttcaagcagattaacctgtggaagatctacaaagcagtggagaagctgggggcctatgagctggtgaccgggcgccgcctctggaagaacgtgtacgacgagctggggggcagcccaggcagcaccagcgcggccacgtgcacgcgccgccactacgagaggctggtcctgccatacgtgcggcacctgaagggggaggatgacaagccgctgcccacctccaagcccaggaaacagtacaagatggctaaggagaacaggggggatgatggggccaccgagaggccgaagaaggccaaggaggagcggcgcatggaccagatgatgccaggaaagaccaaagcagatgctgctgacccagcaccacttcccagccaggagccccccaggaacagcacagaacagcagggcctggcctctgggtcttctgtgtcctttgtgggtgccagcggctgtcctgaggcctacaagcggctcctatccagcttctactgcaaggggacacacggcatcatgtcaccactggccaaaaagaagctcctggcccaggtgagcaaggtggaggccttgcagtgccaggaggagggctgccgccatggggcagagccccaggcgtccccagctgttcacctcccagagagtccccagagccccaaagggctgactgagaactccaggcaccggctgacccctcaggagggattgcaggccccaggtggcagcctcagagaggaggcgcaggcaggcccctgcccggcagcccccatcttcaagggctgcttctacacccaccccaccgaggtgctgaagcctgtcagccagcaccccagggacttcttctctagacttaaagatggggtgctattggggcctcctggcaaagaggggctgtcagtgaaagagccccagctggtgtggggcggagacgctaaccgcccttctgcgttccataaaggtggctccagaaagggcatcctctaccccaagcccaaagcctgctgggtgtcccccatggccaaggtcccagccgagagccccacgctcccgcccaccttccccagtagcccaggcctgggcagcaagcgcagcctggaggaagagggtgctgcccacagtgggaagagactgcgggccgtgtctccctttcttaaggaggcggatgccaagaagtgtggggccaaacctgcagggtccggcctggtctcctgccttctgggcccagccctggggcctgtgcccccagaggcctacaggggcaccatgctgcactgcccgctgaacttcactggcaccccgggccccttgaagggccaggctgcactccccttcagccccctggtcatcccggccttcccggcccacttcctggccaccgcaggcccctcgcccatggccgctggcctgatgcacttccccccaacgtccttcgacagtgccctccgccacagactttgcccggcctcatctgcctggcacgcaccaccagtcacaacctatgcagcgccccacttcttccacctcaacaccaagctg

SEQ ID NO: 5304 - DNA, 1782 bp, Homo sapiens
  source 1..1782: mol_type = genomic DNA
atggcagcccctgtcaaagggaacaggaagcagtccacggagggtgacgccctagacccacctgcatcccccaaacctgctggcaagcagaacggaatccagaaccccatctcgctggaggactcccccgaggcaggcggggagcgggaggaggagcaggagcgggaggaggagcaggccttcctggtcagcctctacaagttcatgaaggagcgacacacgcccatcgagagggtgccccatctcggcttcaagcagattaacctgtggaagatctacaaagcagtggagaagctgggggcctatgagctggtgaccgggcgccgcctctggaagaacgtgtacgacgagctggggggcagcccaggcagcaccagcgcggccacgtgcacgcgccgccactacgagaggctggtcctgccatacgtgcggcacctgaagggggaggatgacaagccgctgcccacctccaagcccaggaaacagtacaagatggctaaggagaacaggggggatgatggggccaccgagaggccgaagaaggccaaggaggagcggcgcatggaccagatgatgccaggaaagaccaaagcagatgctgctgacccagcaccacttcccagccaggagccccccaggaacagcacagaacagcagggcctggcctctgggtcttctgtgtcctttgtgggtgccagcggctgtcctgaggcctacaagcggctcctatccagcttctactgcaaggggacacacggcatcatgtcaccactggccaaaaagaagctcctggcccaggtgagcaaggtggaggccttgcagtgccaggaggagggctgccgccatggggcagagccccaggcgtccccagctgttcacctcccagagagtccccagagccccaaagggctgactgagaactccaggcaccggctgacccctcaggagggattgcaggccccaggtggcagcctcagagaggaggcgcaggcaggcccctgcccggcagcccccatcttcaagggctgcttctacacccaccccaccgaggtgctgaagcctgtcagccagcaccccagggacttcttctctagacttaaagatggggtgctattggggcctcctggcaaagaggggctgtcagtgaaagagccccagctggtgtggggcggagacgctaaccgcccttctgcgttccataaaggtggctccagaaagggcatcctctaccccaagcccaaagcctgctgggtgtcccccatggccaaggtcccagccgagagccccacgctcccgcccaccttccccagtagcccaggcctgggcagcaagcgcagcctggaggaagagggtgctgcccacagtgggaagagactgcgggccgtgtctccctttcttaaggaggcggatgccaagaagtgtggggccaaacctgcagggtccggcctggtctcctgccttctgggcccagccctggggcctgtgcccccagaggcctacaggggcaccatgctgcactgcccgctgaacttcactggcaccccgggccccttgaagggccaggctgcactccccttcagccccctggtcatcccggccttcccggcccacttcctggccaccgcaggcccctcgcccatggccgctggcctgatgcacttccccccaacgtccttcgacagtgccctccgccacagactttgcccggcctcatctgcctggcacgcaccaccagtcacaacctatgcagcgccccacttcttccacctcaacaccaagctg

SEQ ID NO: 5305 - DNA, 1908 bp, Homo sapiens
  source 1..1908: mol_type = genomic DNA
atggcccagtccaccgccacctcccctgatgggggcaccacgtttgagcacctctggagctctctggaaccagacagcacctacttcgaccttccccagtcaagccgggggaataatgaggtggtgggcggaacggattccagcatggacgtcttccacctggagggcatgactacatctgtcatggcccagttcaatctgctgagcagcaccatggaccagatgagcagccgcgcggcctcggccagcccctacaccccagagcacgccgccagcgtgcccacccactcgccctacgcacaacccagctccaccttcgacaccatgtcgccggcgcctgtcatcccctccaacaccgactaccccggaccccaccactttgaggtcactttccagcagtccagcacggccaagtcagccacctggacgtactccccgctcttgaagaaactctactgccagatcgccaagacatgccccatccagatcaaggtgtccaccccgccacccccaggcaccgccatccgggccatgcctgtttacaagaaagcggagcacgtgaccgacgtcgtgaaacgctgccccaaccacgagctcgggagggacttcaacgaaggacagtctgctccagccagccacctcatccgcgtggaaggcaataatctctcgcagtatgtggatgaccctgtcaccggcaggcagagcgtcgtggtgccctatgagccaccacaggtggggacggaattcaccaccatcctgtacaacttcatgtgtaacagcagctgtgtagggggcatgaaccggcggcccatcctcatcatcatcaccctggagatgcgggatgggcaggtgctgggccgccggtcctttgagggccgcatctgcgcctgtcctggccgcgaccgaaaagctgatgaggaccactaccgggagcagcaggccctgaacgagagctccgccaagaacggggccgccagcaagcgtgccttcaagcagagcccccctgccgtccccgcccttggtgccggtgtgaagaagcggcggcatggagacgaggacacgtactaccttcaggtgcgaggccgggagaactttgagatcctgatgaagctgaaagagagcctggagctgatggagttggtgccgcagccactggtggactcctatcggcagcagcagcagctcctacagaggccgagtcacctacagcccccgtcctacgggccggtcctctcgcccatgaacaaggtgcacgggggcatgaacaagctgccctccgtcaaccagctggtgggccagcctcccccgcacagttcggcagctacacccaacctggggcccgtgggccccgggatgctcaacaaccatggccacgcagtgccagccaacggcgagatgagcagcagccacagcgcccagtccatggtctcggggtcccactgcactccgccacccccctaccacgccgaccccagcctcgtcagttttttaacaggattggggtgtccaaactgcatcgagtatttcacctcccaagggttacagagcatttaccacctgcagaacctgaccattgaggacctgggggccctgaagatccccgagcagtaccgcatgaccatctggcggggcctgcaggacctgaagcagggccacgactacagcaccgcgcagcagctgctccgctctagcaacgcggccaccatctccatcggcggctcaggggaactgcagcgccagcgggtcatggaggccgtgcacttccgcgtgcgccacaccatcaccatccccaaccgcggcggcccaggcggcggccctgacgagtgggcggacttcggcttcgacctgcccgactgcaaggcccgcaagcagcccatcaaggaggagttcacggaggccgagatccac

SEQ ID NO: 5306 - DNA, 1278 bp, Homo sapiens
  source 1..1278: mol_type = genomic DNA
atgctgtacgtcggtgaccccgcacggcacctcgccacggcccagttcaatctgctgagcagcaccatggaccagatgagcagccgcgcggcctcggccagcccctacaccccagagcacgccgccagcgtgcccacccactcgccctacgcacaacccagctccaccttcgacaccatgtcgccggcgcctgtcatcccctccaacaccgactaccccggaccccaccactttgaggtcactttccagcagtccagcacggccaagtcagccacctggacgtactccccgctcttgaagaaactctactgccagatcgccaagacatgccccatccagatcaaggtgtccaccccgccacccccaggcaccgccatccgggccatgcctgtttacaagaaagcggagcacgtgaccgacgtcgtgaaacgctgccccaaccacgagctcgggagggacttcaacgaaggacagtctgctccagccagccacctcatccgcgtggaaggcaataatctctcgcagtatgtggatgaccctgtcaccggcaggcagagcgtcgtggtgccctatgagccaccacaggtggggacggaattcaccaccatcctgtacaacttcatgtgtaacagcagctgtgtagggggcatgaaccggcggcccatcctcatcatcatcaccctggagatgcgggatgggcaggtgctgggccgccggtcctttgagggccgcatctgcgcctgtcctggccgcgaccgaaaagctgatgaggaccactaccgggagcagcaggccctgaacgagagctccgccaagaacggggccgccagcaagcgtgccttcaagcagagcccccctgccgtccccgcccttggtgccggtgtgaagaagcggcggcatggagacgaggacacgtactaccttcaggtgcgaggccgggagaactttgagatcctgatgaagctgaaagagagcctggagctgatggagttggtgccgcagccactggtggactcctatcggcagcagcagcagctcctacagaggccgccccgggatgctcaacaaccatggccacgcagtgccagccaacggcgagatgagcagcagccacagcgcccagtccatggtctcggggtcccactgcactccgccacccccctaccacgccgaccccagcctcgtcagttttttaacaggattggggtgtccaaactgcatcgagtatttcacctcccaagggttacagagcatttaccacctgcagaacctgaccat

SEQ ID NO: 5307 - DNA, 1497 bp, Homo sapiens
  source 1..1497: mol_type = genomic DNA
atggcccagtccaccgccacctcccctgatgggggcaccacgtttgagcacctctggagctctctggaaccagacagcacctacttcgaccttccccagtcaagccgggggaataatgaggtggtgggcggaacggattccagcatggacgtcttccacctggagggcatgactacatctgtcatggcccagttcaatctgctgagcagcaccatggaccagatgagcagccgcgcggcctcggccagcccctacaccccagagcacgccgccagcgtgcccacccactcgccctacgcacaacccagctccaccttcgacaccatgtcgccggcgcctgtcatcccctccaacaccgactaccccggaccccaccactttgaggtcactttccagcagtccagcacggccaagtcagccacctggacgtactccccgctcttgaagaaactctactgccagatcgccaagacatgccccatccagatcaaggtgtccaccccgccacccccaggcaccgccatccgggccatgcctgtttacaagaaagcggagcacgtgaccgacgtcgtgaaacgctgccccaaccacgagctcgggagggacttcaacgaaggacagtctgctccagccagccacctcatccgcgtggaaggcaataatctctcgcagtatgtggatgaccctgtcaccggcaggcagagcgtcgtggtgccctatgagccaccacaggtggggacggaattcaccaccatcctgtacaacttcatgtgtaacagcagctgtgtagggggcatgaaccggcggcccatcctcatcatcatcaccctggagatgcgggatgggcaggtgctgggccgccggtcctttgagggccgcatctgcgcctgtcctggccgcgaccgaaaagctgatgaggaccactaccgggagcagcaggccctgaacgagagctccgccaagaacggggccgccagcaagcgtgccttcaagcagagcccccctgccgtccccgcccttggtgccggtgtgaagaagcggcggcatggagacgaggacacgtactaccttcaggtgcgaggccgggagaactttgagatcctgatgaagctgaaagagagcctggagctgatggagttggtgccgcagccactggtggactcctatcggcagcagcagcagctcctacagaggccgagtcacctacagcccccgtcctacgggccggtcctctcgcccatgaacaaggtgcacgggggcatgaacaagctgccctccgtcaaccagctggtgggccagcctcccccgcacagttcggcagctacacccaacctggggcccgtgggccccgggatgctcaacaaccatggccacgcagtgccagccaacggcgagatgagcagcagccacagcgcccagtccatggtctcggggtcccactgcactccgccacccccctaccacgccgaccccagcctcgtcaggacctgggggccc

SEQ ID NO: 5308 - DNA, 1695 bp, Homo sapiens
  source 1..1695: mol_type = genomic DNA
atggaccagatgagcagccgcgcggcctcggccagcccctacaccccagagcacgccgccagcgtgcccacccactcgccctacgcacaacccagctccaccttcgacaccatgtcgccggcgcctgtcatcccctccaacaccgactaccccggaccccaccactttgaggtcactttccagcagtccagcacggccaagtcagccacctggacgtactccccgctcttgaagaaactctactgccagatcgccaagacatgccccatccagatcaaggtgtccaccccgccacccccaggcaccgccatccgggccatgcctgtttacaagaaagcggagcacgtgaccgacgtcgtgaaacgctgccccaaccacgagctcgggagggacttcaacgaaggacagtctgctccagccagccacctcatccgcgtggaaggcaataatctctcgcagtatgtggatgaccctgtcaccggcaggcagagcgtcgtggtgccctatgagccaccacaggtggggacggaattcaccaccatcctgtacaacttcatgtgtaacagcagctgtgtagggggcatgaaccggcggcccatcctcatcatcatcaccctggagatgcgggatgggcaggtgctgggccgccggtcctttgagggccgcatctgcgcctgtcctggccgcgaccgaaaagctgatgaggaccactaccgggagcagcaggccctgaacgagagctccgccaagaacggggccgccagcaagcgtgccttcaagcagagcccccctgccgtccccgcccttggtgccggtgtgaagaagcggcggcatggagacgaggacacgtactaccttcaggtgcgaggccgggagaactttgagatcctgatgaagctgaaagagagcctggagctgatggagttggtgccgcagccactggtggactcctatcggcagcagcagcagctcctacagaggccgagtcacctacagcccccgtcctacgggccggtcctctcgcccatgaacaaggtgcacgggggcatgaacaagctgccctccgtcaaccagctggtgggccagcctcccccgcacagttcggcagctacacccaacctggggcccgtgggccccgggatgctcaacaaccatggccacgcagtgccagccaacggcgagatgagcagcagccacagcgcccagtccatggtctcggggtcccactgcactccgccacccccctaccacgccgaccccagcctcgtcagttttttaacaggattggggtgtccaaactgcatcgagtatttcacctcccaagggttacagagcatttaccacctgcagaacctgaccattgaggacctgggggccctgaagatccccgagcagtaccgcatgaccatctggcggggcctgcaggacctgaagcagggccacgactacagcaccgcgcagcagctgctccgctctagcaacgcggccaccatctccatcggcggctcaggggaactgcagcgccagcgggtcatggaggccgtgcacttccgcgtgcgccacaccatcaccatccccaaccgcggcggcccaggcggcggccctgacgagtgggcggacttcggcttcgacctgcccgactgcaaggcccgcaagcagcccatcaaggaggagttcacggaggccgagatccac

SEQ ID NO: 5309 - DNA, 1209 bp, Homo sapiens
  source 1..1209: mol_type = genomic DNA
atggcccagtccaccgccacctcccctgatgggggcaccacgtttgagcacctctggagctctctggaaccagacagcacctacttcgaccttccccagtcaagccgggggaataatgaggtggtgggcggaacggattccagcatggacgtcttccacctggagggcatgactacatctgtcatggcccagttcaatctgctgagcagcaccatggaccagatgagcagccgcgcggcctcggccagcccctacaccccagagcacgccgccagcgtgcccacccactcgccctacgcacaacccagctccaccttcgacaccatgtcgccggcgcctgtcatcccctccaacaccgactaccccggaccccaccactttgaggtcactttccagcagtccagcacggccaagtcagccacctggacgtactccccgctcttgaagaaactctactgccagatcgccaagacatgccccatccagatcaaggtgtccaccccgccacccccaggcaccgccatccgggccatgcctgtttacaagaaagcggagcacgtgaccgacgtcgtgaaacgctgccccaaccacgagctcgggagggacttcaacgaaggacagtctgctccagccagccacctcatccgcgtggaaggcaataatctctcgcagtatgtggatgaccctgtcaccggcaggcagagcgtcgtggtgccctatgagccaccacaggtggggacggaattcaccaccatcctgtacaacttcatgtgtaacagcagctgtgtagggggcatgaaccggcggcccatcctcatcatcatcaccctggagatgcgggatgggcaggtgctgggccgccggtcctttgagggccgcatctgcgcctgtcctggccgcgaccgaaaagctgatgaggaccactaccgggagcagcaggccctgaacgagagctccgccaagaacggggccgccagcaagcgtgccttcaagcagagcccccctgccgtccccgcccttggtgccggtgtgaagaagcggcggcatggagacgaggacacgtactaccttcaggtgcgaggccgggagaactttgagatcctgatgaagctgaaagagagcctggagctgatggagttggtgccgcagccactggtggactcctatcggcagcagcagcagctcctacagaggccgacctgggggccc

SEQ ID NO: 5310 - DNA, 1665 bp, Homo sapiens
  source 1..1665: mol_type = genomic DNA
atggcccagtccaccgccacctcccctgatgggggcaccacgtttgagcacctctggagctctctggaaccagacagcacctacttcgaccttccccagtcaagccgggggaataatgaggtggtgggcggaacggattccagcatggacgtcttccacctggagggcatgactacatctgtcatggcccagttcaatctgctgagcagcaccatggaccagatgagcagccgcgcggcctcggccagcccctacaccccagagcacgccgccagcgtgcccacccactcgccctacgcacaacccagctccaccttcgacaccatgtcgccggcgcctgtcatcccctccaacaccgactaccccggaccccaccactttgaggtcactttccagcagtccagcacggccaagtcagccacctggacgtactccccgctcttgaagaaactctactgccagatcgccaagacatgccccatccagatcaaggtgtccaccccgccacccccaggcaccgccatccgggccatgcctgtttacaagaaagcggagcacgtgaccgacgtcgtgaaacgctgccccaaccacgagctcgggagggacttcaacgaaggacagtctgctccagccagccacctcatccgcgtggaaggcaataatctctcgcagtatgtggatgaccctgtcaccggcaggcagagcgtcgtggtgccctatgagccaccacaggtggggacggaattcaccaccatcctgtacaacttcatgtgtaacagcagctgtgtagggggcatgaaccggcggcccatcctcatcatcatcaccctggagatgcgggatgggcaggtgctgggccgccggtcctttgagggccgcatctgcgcctgtcctggccgcgaccgaaaagctgatgaggaccactaccgggagcagcaggccctgaacgagagctccgccaagaacggggccgccagcaagcgtgccttcaagcagagcccccctgccgtccccgcccttggtgccggtgtgaagaagcggcggcatggagacgaggacacgtactaccttcaggtgcgaggccgggagaactttgagatcctgatgaagctgaaagagagcctggagctgatggagttggtgccgcagccactggtggactcctatcggcagcagcagcagctcctacagaggccgccccgggatgctcaacaaccatggccacgcagtgccagccaacggcgagatgagcagcagccacagcgcccagtccatggtctcggggtcccactgcactccgccacccccctaccacgccgaccccagcctcgtcaggacctgggggccctgaagatccccgagcagtaccgcatgaccatctggcggggcctgcaggacctgaagcagggccacgactacagcaccgcgcagcagctgctccgctctagcaacgcggccaccatctccatcggcggctcaggggaactgcagcgccagcgggtcatggaggccgtgcacttccgcgtgcgccacaccatcaccatccccaaccgcggcggcccaggcggcggccctgacgagtgggcggacttcggcttcgacctgcccgactgcaaggcccgcaagcagcccatcaaggaggagttcacggaggccgagatccac

SEQ ID NO: 5311 - DNA, 1350 bp, Homo sapiens
  source 1..1350: mol_type = genomic DNA
atgctgtacgtcggtgaccccgcacggcacctcgccacggcccagttcaatctgctgagcagcaccatggaccagatgagcagccgcgcggcctcggccagcccctacaccccagagcacgccgccagcgtgcccacccactcgccctacgcacaacccagctccaccttcgacaccatgtcgccggcgcctgtcatcccctccaacaccgactaccccggaccccaccactttgaggtcactttccagcagtccagcacggccaagtcagccacctggacgtactccccgctcttgaagaaactctactgccagatcgccaagacatgccccatccagatcaaggtgtccaccccgccacccccaggcaccgccatccgggccatgcctgtttacaagaaagcggagcacgtgaccgacgtcgtgaaacgctgccccaaccacgagctcgggagggacttcaacgaaggacagtctgctccagccagccacctcatccgcgtggaaggcaataatctctcgcagtatgtggatgaccctgtcaccggcaggcagagcgtcgtggtgccctatgagccaccacaggtggggacggaattcaccaccatcctgtacaacttcatgtgtaacagcagctgtgtagggggcatgaaccggcggcccatcctcatcatcatcaccctggagatgcgggatgggcaggtgctgggccgccggtcctttgagggccgcatctgcgcctgtcctggccgcgaccgaaaagctgatgaggaccactaccgggagcagcaggccctgaacgagagctccgccaagaacggggccgccagcaagcgtgccttcaagcagagcccccctgccgtccccgcccttggtgccggtgtgaagaagcggcggcatggagacgaggacacgtactaccttcaggtgcgaggccgggagaactttgagatcctgatgaagctgaaagagagcctggagctgatggagttggtgccgcagccactggtggactcctatcggcagcagcagcagctcctacagaggccgagtcacctacagcccccgtcctacgggccggtcctctcgcccatgaacaaggtgcacgggggcatgaacaagctgccctccgtcaaccagctggtgggccagcctcccccgcacagttcggcagctacacccaacctggggcccgtgggccccgggatgctcaacaaccatggccacgcagtgccagccaacggcgagatgagcagcagccacagcgcccagtccatggtctcggggtcccactgcactccgccacccccctaccacgccgaccccagcctcgtcaggacctgggggccc

SEQ ID NO: 5312 - DNA, 1761 bp, Homo sapiens
  source 1..1761: mol_type = genomic DNA
atgctgtacgtcggtgaccccgcacggcacctcgccacggcccagttcaatctgctgagcagcaccatggaccagatgagcagccgcgcggcctcggccagcccctacaccccagagcacgccgccagcgtgcccacccactcgccctacgcacaacccagctccaccttcgacaccatgtcgccggcgcctgtcatcccctccaacaccgactaccccggaccccaccactttgaggtcactttccagcagtccagcacggccaagtcagccacctggacgtactccccgctcttgaagaaactctactgccagatcgccaagacatgccccatccagatcaaggtgtccaccccgccacccccaggcaccgccatccgggccatgcctgtttacaagaaagcggagcacgtgaccgacgtcgtgaaacgctgccccaaccacgagctcgggagggacttcaacgaaggacagtctgctccagccagccacctcatccgcgtggaaggcaataatctctcgcagtatgtggatgaccctgtcaccggcaggcagagcgtcgtggtgccctatgagccaccacaggtggggacggaattcaccaccatcctgtacaacttcatgtgtaacagcagctgtgtagggggcatgaaccggcggcccatcctcatcatcatcaccctggagatgcgggatgggcaggtgctgggccgccggtcctttgagggccgcatctgcgcctgtcctggccgcgaccgaaaagctgatgaggaccactaccgggagcagcaggccctgaacgagagctccgccaagaacggggccgccagcaagcgtgccttcaagcagagcccccctgccgtccccgcccttggtgccggtgtgaagaagcggcggcatggagacgaggacacgtactaccttcaggtgcgaggccgggagaactttgagatcctgatgaagctgaaagagagcctggagctgatggagttggtgccgcagccactggtggactcctatcggcagcagcagcagctcctacagaggccgagtcacctacagcccccgtcctacgggccggtcctctcgcccatgaacaaggtgcacgggggcatgaacaagctgccctccgtcaaccagctggtgggccagcctcccccgcacagttcggcagctacacccaacctggggcccgtgggccccgggatgctcaacaaccatggccacgcagtgccagccaacggcgagatgagcagcagccacagcgcccagtccatggtctcggggtcccactgcactccgccacccccctaccacgccgaccccagcctcgtcagttttttaacaggattggggtgtccaaactgcatcgagtatttcacctcccaagggttacagagcatttaccacctgcagaacctgaccattgaggacctgggggccctgaagatccccgagcagtaccgcatgaccatctggcggggcctgcaggacctgaagcagggccacgactacagcaccgcgcagcagctgctccgctctagcaacgcggccaccatctccatcggcggctcaggggaactgcagcgccagcgggtcatggaggccgtgcacttccgcgtgcgccacaccatcaccatccccaaccgcggcggcccaggcggcggccctgacgagtgggcggacttcggcttcgacctgcccgactgcaaggcccgcaagcagcccatcaaggaggagttcacggaggccgagatccac

SEQ ID NO: 5313 - DNA, 1620 bp, Homo sapiens
  source 1..1620: mol_type = genomic DNA
atggcccagtccaccgccacctcccctgatgggggcaccacgtttgagcacctctggagctctctggaaccagacagcacctacttcgaccttccccagtcaagccgggggaataatgaggtggtgggcggaacggattccagcatggacgtcttccacctggagggcatgactacatctgtcatggcccagttcaatctgctgagcagcaccatggaccagatgagcagccgcgcggcctcggccagcccctacaccccagagcacgccgccagcgtgcccacccactcgccctacgcacaacccagctccaccttcgacaccatgtcgccggcgcctgtcatcccctccaacaccgactaccccggaccccaccactttgaggtcactttccagcagtccagcacggccaagtcagccacctggacgtactccccgctcttgaagaaactctactgccagatcgccaagacatgccccatccagatcaaggtgtccaccccgccacccccaggcaccgccatccgggccatgcctgtttacaagaaagcggagcacgtgaccgacgtcgtgaaacgctgccccaaccacgagctcgggagggacttcaacgaaggacagtctgctccagccagccacctcatccgcgtggaaggcaataatctctcgcagtatgtggatgaccctgtcaccggcaggcagagcgtcgtggtgccctatgagccaccacaggtggggacggaattcaccaccatcctgtacaacttcatgtgtaacagcagctgtgtagggggcatgaaccggcggcccatcctcatcatcatcaccctggagatgcgggatgggcaggtgctgggccgccggtcctttgagggccgcatctgcgcctgtcctggccgcgaccgaaaagctgatgaggaccactaccgggagcagcaggccctgaacgagagctccgccaagaacggggccgccagcaagcgtgccttcaagcagagcccccctgccgtccccgcccttggtgccggtgtgaagaagcggcggcatggagacgaggacacgtactaccttcaggtgcgaggccgggagaactttgagatcctgatgaagctgaaagagagcctggagctgatggagttggtgccgcagccactggtggactcctatcggcagcagcagcagctcctacagaggccttttttaacaggattggggtgtccaaactgcatcgagtatttcacctcccaagggttacagagcatttaccacctgcagaacctgaccattgaggacctgggggccctgaagatccccgagcagtaccgcatgaccatctggcggggcctgcaggacctgaagcagggccacgactacagcaccgcgcagcagctgctccgctctagcaacgcggccaccatctccatcggcggctcaggggaactgcagcgccagcgggtcatggaggccgtgcacttccgcgtgcgccacaccatcaccatccccaaccgcggcggcccaggcggcggccctgacgagtgggcggacttcggcttcgacctgcccgactgcaaggcccgcaagcagcccatcaaggaggagttcacggaggccgagatccac

SEQ ID NO: 5314 - DNA, 1989 bp, Homo sapiens
  source 1..1989: mol_type = genomic DNA
atgtgccatcctgacaaggcttttacttctgataagctccaatgtgtgtttaatgaatacaaagccgcggtctgggtgccgcctcggccgcggccgctctcccgcgctcctttgccagaagctggcggagagaatttacatttaaagattagcagagtgagaaagagaaatctgccttttgttgtgtggggtgaggaggaggcatctacccctggccttgacgctatctcccatcacctctgctatccagacaggactcaccgagatcgtactgagaagcactccacaatgccagactcacctgtggatgtgaagacgcaatctaggctgactcctccaacaatgccacctcccccaactactcaaggagctccaagaaccagttcatttacaccgacaacgttaactaatggcacgagccattctcctacagccttgaatggcgccccctcaccacccaatggcttcagcaatgggccttcctcttcttcctcctcctctctggctaatcaacagctgcccccagcctgtggtgccaggcaactcagcaagctgaaaaggttccttactaccctgcagcagtttggcaatgacatttcacccgagataggagaaagagttcgcaccctcgttctgggactagtgaactccactttgacaattgaagaatttcattccaaactgcaagaagctactaacttcccactgagaccttttgtcatcccatttttgaaggccaacttgcccctgctgcagcgtgagctcctccactgcgcaagactggccaaacagaaccctgcccagtacctcgcccagcatgaacagctgcttctggatgccagcaccacctcacctgttgactcctcagagctgcttctcgatgtgaacgaaaacgggaagaggcgaactccagacagaaccaaagaaaatggctttgacagagagcctttgcactcagaacatccaagcaagcgaccatgcactattagcccaggccagcggtacagtccaaataacggcttatcctaccagcccaatggcctgcctcaccctaccccacctccacctcagcattaccgtttggatgatatggccattgcccaccactacagggactcctatcgacaccccagccacagggacctcagggacagaaacagacctatggggttgcatggcacacgtcaagaagaaatgattgatcacagactaacagacagagaatgggcagaagagtggaaacatcttgaccatctgttaaactgcataatggacatggtagaaaaaacaaggcgatctctcaccgtactaaggcggtgtcaagaagcagaccgggaagaattgaattactggatccggcggtacagtgacgccgaggacttaaaaaaaggtggcggcagtagcagcagccactctaggcagcagagtcccgtcaacccagacccagttgcactagacgcgcatcgggaattccttcacaggcctgcgtctggatacgtgccagaggagatctggaagaaagctgaggaggccgtcaatgaggtgaagcgccaggcgatgacggagctgcagaaggccgtgtctgaggcggagcggaaagcccacgacatgatcacaacagagagggccaagatggagcgcacggtcgccgaggccaaacggcaggcggcggaggacgcactggcagttatcaatcagcaggaggattcaagcgagagttgctggaattgtggccgtaaagcgagtgaaacctgcagtggctgtaacacagcccgatactgtggctcattttgccagcacaaagactgggagaagcaccatcacatctgtggacagaccctgcaggcccagcagcagggagacacacctgcagtcagctcctctgtcacgcccaacagcggggctgggagcccgatggacacaccaccagcagccactccgaggtcaaccaccccgggaaccccttccaccatagagacaacccctcgc

SEQ ID NO: 5315 - DNA, 1752 bp, Homo sapiens
  source 1..1752: mol_type = genomic DNA
atggtgggactctccggccctgtgcagtatcgtactgagaagcactccacaatgccagactcacctgtggatgtgaagacgcaatctaggctgactcctccaacaatgccacctcccccaactactcaaggagctccaagaaccagttcatttacaccgacaacgttaactaatggcacgagccattctcctacagccttgaatggcgccccctcaccacccaatggcttcagcaatgggccttcctcttcttcctcctcctctctggctaatcaacagctgcccccagcctgtggtgccaggcaactcagcaagctgaaaaggttccttactaccctgcagcagtttggcaatgacatttcacccgagataggagaaagagttcgcaccctcgttctgggactagtgaactccactttgacaattgaagaatttcattccaaactgcaagaagctactaacttcccactgagaccttttgtcatcccatttttgaaggccaacttgcccctgctgcagcgtgagctcctccactgcgcaagactggccaaacagaaccctgcccagtacctcgcccagcatgaacagctgcttctggatgccagcaccacctcacctgttgactcctcagagctgcttctcgatgtgaacgaaaacgggaagaggcgaactccagacagaaccaaagaaaatggctttgacagagagcctttgcactcagaacatccaagcaagcgaccatgcactattagcccaggccagcggtacagtccaaataacggcttatcctaccagcccaatggcctgcctcaccctaccccacctccacctcagcattaccgtttggatgatatggccattgcccaccactacagggactcctatcgacaccccagccacagggacctcagggacagaaacagacctatggggttgcatggcacacgtcaagaagaaatgattgatcacagactaacagacagagaatgggcagaagagtggaaacatcttgaccatctgttaaactgcataatggacatggtagaaaaaacaaggcgatctctcaccgtactaaggcggtgtcaagaagcagaccgggaagaattgaattactggatccggcggtacagtgacgccgaggacttaaaaaaaggtggcggcagtagcagcagccactctaggcagcagagtcccgtcaacccagacccagttgcactagacgcgcatcgggaattccttcacaggcctgcgtctggatacgtgccagaggagatctggaagaaagctgaggaggccgtcaatgaggtgaagcgccaggcgatgacggagctgcagaaggccgtgtctgaggcggagcggaaagcccacgacatgatcacaacagagagggccaagatggagcgcacggtcgccgaggccaaacggcaggcggcggaggacgcactggcagttatcaatcagcaggaggattcaagcgagagttgctggaattgtggccgtaaagcgagtgaaacctgcagtggctgtaacacagcccgatactgtggctcattttgccagcacaaagactgggagaagcaccatcacatctgtggacagaccctgcaggcccagcagcagggagacacacctgcagtcagctcctctgtcacgcccaacagcggggctgggagcccgatggacacaccaccagcagccactccgaggtcaaccaccccgggaaccccttccaccatagagacaacccctcgc

SEQ ID NO: 5316 - DNA, 1812 bp, Homo sapiens
  source 1..1812: mol_type = genomic DNA
atgatatctgtcaaaagaaacacttggagagcactgagtttagtaataggtgactgccggaaaaaagggaactttgaatattgtcaagatcgtactgagaagcactccacaatgccagactcacctgtggatgtgaagacgcaatctaggctgactcctccaacaatgccacctcccccaactactcaaggagctccaagaaccagttcatttacaccgacaacgttaactaatggcacgagccattctcctacagccttgaatggcgccccctcaccacccaatggcttcagcaatgggccttcctcttcttcctcctcctctctggctaatcaacagctgcccccagcctgtggtgccaggcaactcagcaagctgaaaaggttccttactaccctgcagcagtttggcaatgacatttcacccgagataggagaaagagttcgcaccctcgttctgggactagtgaactccactttgacaattgaagaatttcattccaaactgcaagaagctactaacttcccactgagaccttttgtcatcccatttttgaaggccaacttgcccctgctgcagcgtgagctcctccactgcgcaagactggccaaacagaaccctgcccagtacctcgcccagcatgaacagctgcttctggatgccagcaccacctcacctgttgactcctcagagctgcttctcgatgtgaacgaaaacgggaagaggcgaactccagacagaaccaaagaaaatggctttgacagagagcctttgcactcagaacatccaagcaagcgaccatgcactattagcccaggccagcggtacagtccaaataacggcttatcctaccagcccaatggcctgcctcaccctaccccacctccacctcagcattaccgtttggatgatatggccattgcccaccactacagggactcctatcgacaccccagccacagggacctcagggacagaaacagacctatggggttgcatggcacacgtcaagaagaaatgattgatcacagactaacagacagagaatgggcagaagagtggaaacatcttgaccatctgttaaactgcataatggacatggtagaaaaaacaaggcgatctctcaccgtactaaggcggtgtcaagaagcagaccgggaagaattgaattactggatccggcggtacagtgacgccgaggacttaaaaaaaggtggcggcagtagcagcagccactctaggcagcagagtcccgtcaacccagacccagttgcactagacgcgcatcgggaattccttcacaggcctgcgtctggatacgtgccagaggagatctggaagaaagctgaggaggccgtcaatgaggtgaagcgccaggcgatgacggagctgcagaaggccgtgtctgaggcggagcggaaagcccacgacatgatcacaacagagagggccaagatggagcgcacggtcgccgaggccaaacggcaggcggcggaggacgcactggcagttatcaatcagcaggaggattcaagcgagagttgctggaattgtggccgtaaagcgagtgaaacctgcagtggctgtaacacagcccgatactgtggctcattttgccagcacaaagactgggagaagcaccatcacatctgtggacagaccctgcaggcccagcagcagggagacacacctgcagtcagctcctctgtcacgcccaacagcggggctgggagcccgatggacacaccaccagcagccactccgaggtcaaccaccccgggaaccccttccaccatagagacaacccctcgc

SEQ ID NO: 5317 - DNA, 1845 bp, Homo sapiens
  source 1..1845: mol_type = genomic DNA
atgtgccatcctgacaaggcttttacttctgataagctccaatgtgtgtttaatgaatacaaagccgcggtctgggtgccgcctcggccgcggccgctctcccgcgctcctttgccagaagatcgtactgagaagcactccacaatgccagactcacctgtggatgtgaagacgcaatctaggctgactcctccaacaatgccacctcccccaactactcaaggagctccaagaaccagttcatttacaccgacaacgttaactaatggcacgagccattctcctacagccttgaatggcgccccctcaccacccaatggcttcagcaatgggccttcctcttcttcctcctcctctctggctaatcaacagctgcccccagcctgtggtgccaggcaactcagcaagctgaaaaggttccttactaccctgcagcagtttggcaatgacatttcacccgagataggagaaagagttcgcaccctcgttctgggactagtgaactccactttgacaattgaagaatttcattccaaactgcaagaagctactaacttcccactgagaccttttgtcatcccatttttgaaggccaacttgcccctgctgcagcgtgagctcctccactgcgcaagactggccaaacagaaccctgcccagtacctcgcccagcatgaacagctgcttctggatgccagcaccacctcacctgttgactcctcagagctgcttctcgatgtgaacgaaaacgggaagaggcgaactccagacagaaccaaagaaaatggctttgacagagagcctttgcactcagaacatccaagcaagcgaccatgcactattagcccaggccagcggtacagtccaaataacggcttatcctaccagcccaatggcctgcctcaccctaccccacctccacctcagcattaccgtttggatgatatggccattgcccaccactacagggactcctatcgacaccccagccacagggacctcagggacagaaacagacctatggggttgcatggcacacgtcaagaagaaatgattgatcacagactaacagacagagaatgggcagaagagtggaaacatcttgaccatctgttaaactgcataatggacatggtagaaaaaacaaggcgatctctcaccgtactaaggcggtgtcaagaagcagaccgggaagaattgaattactggatccggcggtacagtgacgccgaggacttaaaaaaaggtggcggcagtagcagcagccactctaggcagcagagtcccgtcaacccagacccagttgcactagacgcgcatcgggaattccttcacaggcctgcgtctggatacgtgccagaggagatctggaagaaagctgaggaggccgtcaatgaggtgaagcgccaggcgatgacggagctgcagaaggccgtgtctgaggcggagcggaaagcccacgacatgatcacaacagagagggccaagatggagcgcacggtcgccgaggccaaacggcaggcggcggaggacgcactggcagttatcaatcagcaggaggattcaagcgagagttgctggaattgtggccgtaaagcgagtgaaacctgcagtggctgtaacacagcccgatactgtggctcattttgccagcacaaagactgggagaagcaccatcacatctgtggacagaccctgcaggcccagcagcagggagacacacctgcagtcagctcctctgtcacgcccaacagcggggctgggagcccgatggacacaccaccagcagccactccgaggtcaaccaccccgggaaccccttccaccatagagacaacccctcgc

SEQ ID NO: 5318 - DNA, 1731 bp, Homo sapiens
  source 1..1731: mol_type = genomic DNA
atgcctgatcgtactgagaagcactccacaatgccagactcacctgtggatgtgaagacgcaatctaggctgactcctccaacaatgccacctcccccaactactcaaggagctccaagaaccagttcatttacaccgacaacgttaactaatggcacgagccattctcctacagccttgaatggcgccccctcaccacccaatggcttcagcaatgggccttcctcttcttcctcctcctctctggctaatcaacagctgcccccagcctgtggtgccaggcaactcagcaagctgaaaaggttccttactaccctgcagcagtttggcaatgacatttcacccgagataggagaaagagttcgcaccctcgttctgggactagtgaactccactttgacaattgaagaatttcattccaaactgcaagaagctactaacttcccactgagaccttttgtcatcccatttttgaaggccaacttgcccctgctgcagcgtgagctcctccactgcgcaagactggccaaacagaaccctgcccagtacctcgcccagcatgaacagctgcttctggatgccagcaccacctcacctgttgactcctcagagctgcttctcgatgtgaacgaaaacgggaagaggcgaactccagacagaaccaaagaaaatggctttgacagagagcctttgcactcagaacatccaagcaagcgaccatgcactattagcccaggccagcggtacagtccaaataacggcttatcctaccagcccaatggcctgcctcaccctaccccacctccacctcagcattaccgtttggatgatatggccattgcccaccactacagggactcctatcgacaccccagccacagggacctcagggacagaaacagacctatggggttgcatggcacacgtcaagaagaaatgattgatcacagactaacagacagagaatgggcagaagagtggaaacatcttgaccatctgttaaactgcataatggacatggtagaaaaaacaaggcgatctctcaccgtactaaggcggtgtcaagaagcagaccgggaagaattgaattactggatccggcggtacagtgacgccgaggacttaaaaaaaggtggcggcagtagcagcagccactctaggcagcagagtcccgtcaacccagacccagttgcactagacgcgcatcgggaattccttcacaggcctgcgtctggatacgtgccagaggagatctggaagaaagctgaggaggccgtcaatgaggtgaagcgccaggcgatgacggagctgcagaaggccgtgtctgaggcggagcggaaagcccacgacatgatcacaacagagagggccaagatggagcgcacggtcgccgaggccaaacggcaggcggcggaggacgcactggcagttatcaatcagcaggaggattcaagcgagagttgctggaattgtggccgtaaagcgagtgaaacctgcagtggctgtaacacagcccgatactgtggctcattttgccagcacaaagactgggagaagcaccatcacatctgtggacagaccctgcaggcccagcagcagggagacacacctgcagtcagctcctctgtcacgcccaacagcggggctgggagcccgatggacacaccaccagcagccactccgaggtcaaccaccccgggaaccccttccaccatagagacaacccctcgc

SEQ ID NO: 5319 - DNA, 1701 bp, Homo sapiens
  source 1..1701: mol_type = genomic DNA
atgccagactcacctgtggatgtgaagacgcaatctaggctgactcctccaacaatgccacctcccccaactactcaaggagctccaagaaccagttcatttacaccgacaacgttaactaatggcacgagccattctcctacagccttgaatggcgccccctcaccacccaatggcttcagcaatgggccttcctcttcttcctcctcctctctggctaatcaacagctgcccccagcctgtggtgccaggcaactcagcaagctgaaaaggttccttactaccctgcagcagtttggcaatgacatttcacccgagataggagaaagagttcgcaccctcgttctgggactagtgaactccactttgacaattgaagaatttcattccaaactgcaagaagctactaacttcccactgagaccttttgtcatcccatttttgaaggccaacttgcccctgctgcagcgtgagctcctccactgcgcaagactggccaaacagaaccctgcccagtacctcgcccagcatgaacagctgcttctggatgccagcaccacctcacctgttgactcctcagagctgcttctcgatgtgaacgaaaacgggaagaggcgaactccagacagaaccaaagaaaatggctttgacagagagcctttgcactcagaacatccaagcaagcgaccatgcactattagcccaggccagcggtacagtccaaataacggcttatcctaccagcccaatggcctgcctcaccctaccccacctccacctcagcattaccgtttggatgatatggccattgcccaccactacagggactcctatcgacaccccagccacagggacctcagggacagaaacagacctatggggttgcatggcacacgtcaagaagaaatgattgatcacagactaacagacagagaatgggcagaagagtggaaacatcttgaccatctgttaaactgcataatggacatggtagaaaaaacaaggcgatctctcaccgtactaaggcggtgtcaagaagcagaccgggaagaattgaattactggatccggcggtacagtgacgccgaggacttaaaaaaaggtggcggcagtagcagcagccactctaggcagcagagtcccgtcaacccagacccagttgcactagacgcgcatcgggaattccttcacaggcctgcgtctggatacgtgccagaggagatctggaagaaagctgaggaggccgtcaatgaggtgaagcgccaggcgatgacggagctgcagaaggccgtgtctgaggcggagcggaaagcccacgacatgatcacaacagagagggccaagatggagcgcacggtcgccgaggccaaacggcaggcggcggaggacgcactggcagttatcaatcagcaggaggattcaagcgagagttgctggaattgtggccgtaaagcgagtgaaacctgcagtggctgtaacacagcccgatactgtggctcattttgccagcacaaagactgggagaagcaccatcacatctgtggacagaccctgcaggcccagcagcagggagacacacctgcagtcagctcctctgtcacgcccaacagcggggctgggagcccgatggacacaccaccagcagccactccgaggtcaaccaccccgggaaccccttccaccatagagacaacccctcgc

SEQ ID NO: 5320 - DNA, 2847 bp, Homo sapiens
  source 1..2847: mol_type = genomic DNA
atggcccaggtagcagtgtccaccctgcctgttgaagaagagtcctcctcagagaccaggatggtggtgacattcctcgtgtctgccctcgaatccatgtgtaaagaactggccaagtccaaggcagaagtggcctgcatcgcagtgtacgaaacagacgtgtttgtcgtcggaaccgagagaggatgcgcttttgttaatgccaggacggattttcagaaagattttgcaaaatactgcgttgcagagggactgtgtgaggtgaaacctccctgccctgtgaacgggatgcaggtccactcgggcgaaacggaaatactcaggaaggcagtggaggactatttctgcttttgttatggtaaagccttagggacaacagtgatggtgcctgttccctatgagaagatgctgcgagaccagtcggctgtggtagtgcaggggcttccggaaggcgttgcctttcaacaccctgagaattacgaccttgcaaccctgaaatggattttggagaacaaagcagggatttcattcatcataaatagacccttcctaggaccagagagtcagctgggtggccctgggatggtaacagatgcggagagatccatagtatcaccaagtgaaagctgcggccccatcaatgtgaaaactgaacccatggaagattctggcatttcactgaaagcagaagctgtctcagtcaagaaagaatcagaagatcctaattactatcaatataatatgcaaggaagccacccttcttccacaagcaatgaagtaatagaaatggaattaccaatggaagattccactccgctggtcccttcagaagaaccaaatgaggaccctgaagccgaggtgaaaatcgaaggaaacacaaattcatccagtgttacaaattctgcagcaggtgttgaagatcttaacatcgttcaagtgactgttccagataatgagaaggaaagattatcaagcattgaaaagattaaacagctaagagaacaagttaatgacctctttagccgaaaatttggtgaagcaattggcgtggatttccctgtgaaagttccctacaggaagatcacattcaaccctggctgtgtggtgattgatggcatgcccccgggggtggtattcaaggcccccggctatctggaaatcagttccatgaggaggatcttggaggcagctgagtttatcaaattcacagtcatcaggccgcttccagggcttgagctcagtaatgtgggaaaacgcaagatagaccaggagggccgtgtgtttcaagaaaagtgggagagagcgtatttcttcgtggaagtacagaatattccaacatgtctcatatgcaaacaaagcatgtctgtgtccaaagaatataacctaagacgccactatcaaaccaatcacagcaagcattatgaccagtatacggaaagaatgcgtgacgagaagcttcacgagctgaaaaaagggctcaggaagtatctcttaggctcgtcagacaccgagtgtcccgagcaaaaacaagtgtttgcaaacccaagtccaacccagaaatcccccgtgcagcctgtagaggacctagctgggaacttatgggagaagttacgtgaaaaaatcaggtcttttgtggcatattctatcgcaatcgatgagatcacggatataaataataccacccagttggccatattcatccgtggtgtcgatgagaatttcgatgtgtccgaagaacttctggacacggtgcccatgacgggtacaaaatctggcaacgagatctttttgcgtgttgagaagagcctgaaaaagttctgtatcaactggtcgagattagtaagcgtggcctccactggcaccccagcgatggtggatgccaataacgggcttgtcacaaaactgaagtccagggtggcgacgttctgcaagggtgcggaactgaagtccatctgttgtataattcatccggaatcactctgtgctcagaagttgaagatggaccacgtcatggacgtggtagtgaagtccgtgaactggatatgctcccggggactgaaccacagcgagttcacaaccttgctctatgagctggacagccagtatggtagcctcctgtactacacggagattaagtggctcagtcgcgggctcgtgctaaagagatttttcgaatccttggaagaaatcgactccttcatgtcatccagagggaaacccctgcctcaactgagctccatagattggatccgagacctggccttcttggttgacatgacgatgcatctgaacgctttgaacatctctctccaaggacactcccaaatcgtcacgcagatgtatgacctgatccgggcgttcctagcaaaactgtgcctctgggagactcatttgacgaggaataatctggcccactttcccaccctgaaattggtttccagaaatgaaagcgatggcctgaactacattcccaaaatcgcggaactcaagaccgaattccagaaaaggctgtctgatttcaaactctacgaaagcgaactgactctgttcagctccccgttctccacgaagatcgacagtgtgcacgaggagctccagatggaggttatcgacctgcaatgcaacacggtcctgaagacgaaatacgacaaggtgggaataccagaattctacaagtacctctggggtagctacccgaaatacaagcaccattgcgcaaagattctttccatgttcgggagcacctacatctgcgaacagctgttctccattatgaaactgagcaaaacaaaatactgctcccagttaaaggattcccagtgggattctgtactccacatcgcaacg

SEQ ID NO: 5321 - DNA, 2001 bp, Homo sapiens
  source 1..2001: mol_type = genomic DNA
atgaaggagaagtccaagaatgcggccaagaccaggagggagaaggaaaatggcgagttttacgagcttgccaagctgctcccgctgccgtcggccatcacttcgcagctggacaaagcgtccatcatccgcctcaccacgagctacctgaagatgcgcgccgtcttccccgaaggtttaggagacgcgtggggacagccgagccgcgccgggcccctggacggcgtcgccaaggagctgggatcgcacttgctgcagactttggatggatttgtttttgtggtagcatctgatggcaaaatcatgtatatatccgagaccgcttctgtccatttaggcttatcccaggtggagctcacgggcaacagtatttatgaatacatccatccttctgaccacgatgagatgaccgctgtcctcacggcccaccagccgctgcaccaccacctgctccaagagtatgagatagagaggtcgttctttcttcgaatgaaatgtgtcttggcgaaaaggaacgcgggcctgacctgcagcggatacaaggtcatccactgcagtggctacttgaagatcaggcagtatatgctggacatgtccctgtacgactcctgctaccagattgtggggctggtggccgtgggccagtcgctgccacccagtgccatcaccgagatcaagctgtacagtaacatgttcatgttcagggccagccttgacctgaagctgatattcctggattccagggtgaccgaggtgacggggtacgagccgcaggacctgatcgagaagaccctataccatcacgtgcacggctgcgacgtgttccacctccgctacgcacaccacctcctgttggtgaagggccaggtcaccaccaagtactaccggctgctgtccaagcggggcggctgggtgtgggtgcagagctacgccaccgtggtgcacaacagccgctcgtcccggccccactgcatcgtgagtgtcaattatgtactcacggagattgaatacaaggaacttcagctgtccctggagcaggtgtccactgccaagtcccaggactcctggaggaccgccttgtctacctcacaagaaactaggaaattagtgaaacccaaaaataccaagatgaagacaaagctgagaacaaacccttaccccccacagcaatacagctcgttccaaatggacaaactggaatgcggccagctcggaaactggagagccagtccccctgcaagcgctgctgctcctccagaactgcagccccactcagaaagcagtgaccttctgtacacgccatcctacagcctgcccttctcctaccattacggacacttccctctggactctcacgtcttcagcagcaaaaagccaatgttgccggccaagttcgggcagccccaaggatccccttgtgaggtggcacgctttttcctgagcacactgccagccagcggtgaatgccagtggcattatgccaaccccctagtgcctagcagctcgtctccagctaaaaatcctccagagccaccggcgaacactgctaggcacagcctggtgccaagctacgaagcgcccgccgccgccgtgcgcaggttcggcgaggacaccgcgcccccgagcttcccgagctgcggccactaccgcgaggagcccgcgctgggcccggccaaagccgcccgccaggccgcccgggacggggcgcggctggcgctggcccgcgcggcacccgagtgctgcgcgcccccgacccccgaggccccgggcgcgccggcgcagctgcccttcgtgctgctcaactaccaccgcgtgctggcccggcgcggaccgctggggggcgccgcacccgccgcctccggcctggcctgcgctcccggcggccccgaggcggcgaccggcgcgctgcggctccggcacccgagccccgccgccacctccccgcccggcgcgcccctgccgcactacctgggcgcctcggtcatcatcaccaacgggagg

SEQ ID NO: 5322 - DNA, 2298 bp, Homo sapiens
  source 1..2298: mol_type = genomic DNA
atgaaagaaaagtccaaaaatgctgcgcggactaggagggagaaggaaaacagtgaattttatgaactggctaaattactgcctttgccctcggctatcacctcgcagctggacaaagcatccataatcagactcacgaccagctatctcaaaatgagagtggtgttcccagaagggctcggcgaggcgtggggccactcaagtcggaccagccccctggacaacgttggccgagaactgggctcccatctgctccagaccctggatggcttcatcttcgtggtagccccagatgggaagatcatgtacatctcagagacagcctcagtccacttgggtctttctcaggtagagctgaccggaaacagcatttatgaatacattcacccggcagaccacgacgagatgacggcggtgctcaccgcccatcaaccctaccactctcacttcgtgcaggagtatgagatcgagcgctccttcttcctgaggatgaagtgcgtcttggccaagcgtaacgccggcctcacctgtggcggctacaaggtcatccactgcagcggctacttgaagatccgccagtacagcctggacatgtcccccttcgacggctgctaccaaaacgtgggcctggtggccgtgggccactcgctgcctcccagcgccgtcacggagatcaagctacacagcaatatgtttatgttccgcgccagcctggacatgaagctcatctttctggactccagggtggcggagctgacggggtacgaacctcaggacctgattgagaagactctgtaccaccatgtgcacggctgcgacaccttccacctgcgctgcgcgcaccatttgctgctggtgaagggacaggtgaccaccaagtactacaggttcctggcgaaacacggcggctgggtatgggtgcagagctacgcgaccatcgtgcacaacagtcgctcctccaggccacactgtatcgtcagcgtcaactatgtcctcacagacacagaatacaaagggctgcagctctccctggatcagatctcagcctccaaaccagccttctcctataccagcagctccacccccaccatgactgacaacagaaagggggccaaatcccggctctccagctcaaagtcaaaatccaggacttccccataccctcagtattcgggatttcacacagaaagatcggaatctgatcatgacagccagtggggcggaagtcccttgaccgacacggcctctccgcagcttctggaccccgccgataggcctggctcccagcacgacgcatcgtgcgcctacagacagttttcggaccgcagctctctctgctatggctttgcgcttgaccactcgaggctggtggaagagaggcatttccatacccaggcctgtgaaggaggccgatgtgaggcaggcaggtacttcctgggaacgccgcaggccgggagggagccctggtggggctctcgcgcagccttgcccctgacaaaggcctccccagaaagcagagaagcctatgaaaacagcatgcctcacatcgcttcagtccacaggatccatgggcgaggtcattgggatgaagatagtgtggtcagttctccagaccctgggtcggccagtgaatcaggtgaccgatatcgtactgagcagtatcaaagtagcccacatgaacccagcaaaattgaaactcttataagagccactcagcaaatgattaaagaagaagagaacagattacagctaaggaaagccccctcagaccaactggcttccattaatggggctgggaaaaaacactccctgtgttttgcaaactaccaacagcccccaccaacaggtgaagtctgccatggctctgctcttgccaacacttcaccatgtgaccatatccagcagagagagggaaaaatgttgagcccccatgaaaatgactatgacaacagtcccaccgcactatctcggataagtagtcccaattcggatcgcatttcaaaatccagtttgatcctagctaaagactatctgcattcggatatatctcctcatcagacagcaggagaccaccctactgtctctccaaactgctttggctctcaccggcagtattttgacaagcatgcttacacattaactggatatgccctggagcacttatatgacagcgaaaccattagaaactattccttgggctgtaatggctcacactttgatgtaacttcccatctgaggatgcaaccagacccagcacaaggacacaagggaacatctgttataataaccaacggaagc

SEQ ID NO: 5323 - DNA, 606 bp, Homo sapiens
  source 1..606: mol_type = genomic DNA
atgatgcaggacgtgtccagctcgccagtctcgccggccgacgacagcctgagcaacagcgaggaagagccagaccggcagcagccgccgagcggcaagcgcgggggacgcaagcggcgcagcagcaggcgcagcgcgggcggcggcgcggggcccggcggagccgcgggtgggggcgtcggaggcggcgacgagccgggcagcccggcccagggcaagcgcggcaagaagtctgcgggctgtggcggcggcggcggcgcgggcggcggcggcggcagcagcagcggcggcgggagtccgcagtcttacgaggagctgcagacgcagcgggtcatggccaacgtgcgggagcgccagcgcacccagtcgctgaacgaggcgttcgccgcgctgcggaagatcatccccacgctgccctcggacaagctgagcaagattcagaccctcaagctggcggccaggtacatcgacttcctctaccaggtcctccagagcgacgagctggactccaagatggcaagctgcagctatgtggctcacgagcggctcagctacgccttctcggtctggaggatggagggggcctggtccatgtccgcgtcccac

SEQ ID NO: 5324 - DNA, 1671 bp, Homo sapiens
  source 1..1671: mol_type = genomic DNA
atggtgtccaagctcacgtcgctccagcaagaactcctgagcgccctgctgagctccggggtcaccaaggaggtgctggttcaggccttggaggagttgctgccatccccgaacttcggggtgaagctggagacgctgcccctgtcccctggcagcggggccgagcccgacaccaagccggtcttccatactctcaccaacggccacgccaagggccgcttgtccggcgacgagggctccgaggacggcgacgactatgacacacctcccatcctcaaggagctgcaggcgctcaacaccgaggaggcggcggagcagcgggcggaggtggaccggatgctcagtgaggacccttggagggctgctaaaatgatcaagggttacatgcagcaacacaacatcccccagagggaggtggtcgatgtcaccggcctgaaccagtcgcacctctcccagcatctcaacaagggcacccctatgaagacccagaagcgtgccgctctgtacacctggtacgtcagaaagcaacgagagatcctccgacaattcaaccagacagtccagagttctggaaatatgacagacaaaagcagtcaggatcagctgctgtttctctttccagagttcagtcaacagagccatgggcctgggcagtccgatgatgcctgctctgagcccaccaacaagaagatgcgccgcaaccggttcaaatgggggcccgcgtcccagcaaatcttgtaccaggcctacgatcggcaaaagaaccccagcaaggaagagagagaggccttagtggaggaatgcaacagggcagaatgtttgcagcgaggggtgtccccctccaaagcccacggcctgggctccaacttggtcactgaggtccgtgtctacaactggtttgcaaaccgcaggaaggaggaggcattccggcaaaagctggccatggacgcctatagctccaaccagactcacagcctgaaccctctgctctcccacggctccccccaccaccagcccagctcctctcctccaaacaagctgtcaggagtgcgctacagccagcagggaaacaatgagatcacttcctcctcaacaatcagtcaccatggcaacagcgccatggtgaccagccagtcggttttacagcaagtctccccagccagcctggacccaggccacaatctcctctcacctgatggtaaaatgatctcagtctcaggaggaggtttgcccccagtcagcaccttgacgaatatccacagcctctcccaccataatccccagcaatctcaaaacctcatcatgacacccctctctggagtcatggcaattgcacaaagcctcaacacctcccaagcacagagtgtccctgtcatcaacagtgtggccggcagcctggcagccctgcagcccgtccagttctcccagcagctgcacagccctcaccagcagcccctcatgcagcagagcccaggcagccacatggcccagcagcccttcatggcagctgtgactcagctgcagaactcacacatgtacgcacacaagcaggaacccccccagtattcccacacctcccggtttccatctgcaatggtggtcacagataccagcagcatcagtacactcaccaacatgtcttcaagtaaacagtgtcctctacaagcctgg

SEQ ID NO: 5325 - DNA, 1644 bp, Homo sapiens
  source 1..1644: mol_type = genomic DNA
atggtgtccaagctcacgtcgctccagcaagaactcctgagcgccctgctgagctccggggtcaccaaggaggtgctggttcaggccttggaggagttgctgccatccccgaacttcggggtgaagctggagacgctgcccctgtcccctggcagcggggccgagcccgacaccaagccggtcttccatactctcaccaacggccacgccaagggccgcttgtccggcgacgagggctccgaggacggcgacgactatgacacacctcccatcctcaaggagctgcaggcgctcaacaccgaggaggcggcggagcagcgggcggaggtggaccggatgctcagtgaggacccttggagggctgctaaaatgatcaagggttacatgcagcaacacaacatcccccagagggaggtggtcgatgtcaccggcctgaaccagtcgcacctctcccagcatctcaacaagggcacccctatgaagacccagaagcgtgccgctctgtacacctggtacgtcagaaagcaacgagagatcctccgacaattcaaccagacagtccagagttctggaaatatgacagacaaaagcagtcaggatcagctgctgtttctctttccagagttcagtcaacagagccatgggcctgggcagtccgatgatgcctgctctgagcccaccaacaagaagatgcgccgcaaccggttcaaatgggggcccgcgtcccagcaaatcttgtaccaggcctacgatcggcaaaagaaccccagcaaggaagagagagaggccttagtggaggaatgcaacagggcagaatgtttgcagcgaggggtgtccccctccaaagcccacggcctgggctccaacttggtcactgaggtccgtgtctacaactggtttgcaaaccgcaggaaggaggaggcattccggcaaaagctggccatggacgcctatagctccaaccagactcacagcctgaaccctctgctctcccacggctccccccaccaccagcccagctcctctcctccaaacaagctgtcaggagtgcgctacagccagcagggaaacaatgagatcacttcctcctcaacaatcagtcaccatggcaacagcgccatggtgaccagccagtcggttttacagcaagtctccccagccagcctggacccaggccacaatctcctctcacctgatggtaaaatgatctcagtctcaggaggaggtttgcccccagtcagcaccttgacgaatatccacagcctctcccaccataatccccagcaatctcaaaacctcatcatgacacccctctctggagtcatggcaattgcacaaagcctcaacacctcccaagcacagagtgtccctgtcatcaacagtgtggccggcagcctggcagccctgcagcccgtccagttctcccagcagctgcacagccctcaccagcagcccctcatgcagcagagcccaggcagccacatggcccagcagcccttcatggcagctgtgactcagctgcagaactcacacatgtcctctacaagcctggtgatgcccacacaccacttacttcgtgcgcaacaacaaggaccctgttttccacaccatcaccctctgggcagctgtcatggaaaagcccag

SEQ ID NO: 5326 - DNA, 1593 bp, Homo sapiens
  source 1..1593: mol_type = genomic DNA
atggtgtccaagctcacgtcgctccagcaagaactcctgagcgccctgctgagctccggggtcaccaaggaggtgctggttcaggccttggaggagttgctgccatccccgaacttcggggtgaagctggagacgctgcccctgtcccctggcagcggggccgagcccgacaccaagccggtcttccatactctcaccaacggccacgccaagggccgcttgtccggcgacgagggctccgaggacggcgacgactatgacacacctcccatcctcaaggagctgcaggcgctcaacaccgaggaggcggcggagcagcgggcggaggtggaccggatgctcagtgaggacccttggagggctgctaaaatgatcaagggttacatgcagcaacacaacatcccccagagggaggtggtcgatgtcaccggcctgaaccagtcgcacctctcccagcatctcaacaagggcacccctatgaagacccagaagcgtgccgctctgtacacctggtacgtcagaaagcaacgagagatcctccgacagttcagtcaacagagccatgggcctgggcagtccgatgatgcctgctctgagcccaccaacaagaagatgcgccgcaaccggttcaaatgggggcccgcgtcccagcaaatcttgtaccaggcctacgatcggcaaaagaaccccagcaaggaagagagagaggccttagtggaggaatgcaacagggcagaatgtttgcagcgaggggtgtccccctccaaagcccacggcctgggctccaacttggtcactgaggtccgtgtctacaactggtttgcaaaccgcaggaaggaggaggcattccggcaaaagctggccatggacgcctatagctccaaccagactcacagcctgaaccctctgctctcccacggctccccccaccaccagcccagctcctctcctccaaacaagctgtcaggagtgcgctacagccagcagggaaacaatgagatcacttcctcctcaacaatcagtcaccatggcaacagcgccatggtgaccagccagtcggttttacagcaagtctccccagccagcctggacccaggccacaatctcctctcacctgatggtaaaatgatctcagtctcaggaggaggtttgcccccagtcagcaccttgacgaatatccacagcctctcccaccataatccccagcaatctcaaaacctcatcatgacacccctctctggagtcatggcaattgcacaaagcctcaacacctcccaagcacagagtgtccctgtcatcaacagtgtggccggcagcctggcagccctgcagcccgtccagttctcccagcagctgcacagccctcaccagcagcccctcatgcagcagagcccaggcagccacatggcccagcagcccttcatggcagctgtgactcagctgcagaactcacacatgtacgcacacaagcaggaacccccccagtattcccacacctcccggtttccatctgcaatggtggtcacagataccagcagcatcagtacactcaccaacatgtcttcaagtaaacagtgtcctctacaagcctgg

SEQ ID NO: 5327 - DNA, 1371 bp, Homo sapiens
  source 1..1371: mol_type = genomic DNA
atggtgtccaagctcacgtcgctccagcaagaactcctgagcgccctgctgagctccggggtcaccaaggaggtgctggttcaggccttggaggagttgctgccatccccgaacttcggggtgaagctggagacgctgcccctgtcccctggcagcggggccgagcccgacaccaagccggtcttccatactctcaccaacggccacgccaagggccgcttgtccggcgacgagggctccgaggacggcgacgactatgacacacctcccatcctcaaggagctgcaggcgctcaacaccgaggaggcggcggagcagcgggcggaggtggaccggatgctcagtgaggacccttggagggctgctaaaatgatcaagggttacatgcagcaacacaacatcccccagagggaggtggtcgatgtcaccggcctgaaccagtcgcacctctcccagcatctcaacaagggcacccctatgaagacccagaagcgtgccgctctgtacacctggtacgtcagaaagcaacgagagatcctccgacagttcagtcaacagagccatgggcctgggcagtccgatgatgcctgctctgagcccaccaacaagaagatgcgccgcaaccggttcaaatgggggcccgcgtcccagcaaatcttgtaccaggcctacgatcggcaaaagaaccccagcaaggaagagagagaggccttagtggaggaatgcaacagggcagaatgtttgcagcgaggggtgtccccctccaaagcccacggcctgggctccaacttggtcactgaggtccgtgtctacaactggtttgcaaaccgcaggaaggaggaggcattccggcaaaagctggccatggacgcctatagctccaaccagactcacagcctgaaccctctgctctcccacggctccccccaccaccagcccagctcctctcctccaaacaagctgtcaggagtgcgctacagccagcagggaaacaatgagatcacttcctcctcaacaatcagtcaccatggcaacagcgccatggtgaccagccagtcggttttacagcaagtctccccagccagcctggacccaggccacaatctcctctcacctgatggtaaaatgatctcagtctcaggaggaggtttgcccccagtcagcaccttgacgaatatccacagcctctcccaccataatccccagcaatctcaaaacctcatcatgacacccctctctggagtcatggcaattgcacaaatgtcctctacaagcctggtgatgcccacacaccacttacttcgtgcgcaacaacaaggaccctgttttccacaccatcaccctctgggcagctgtcatggaaaagcccag

SEQ ID NO: 5328 - DNA, 1914 bp, Homo sapiens
  source 1..1914: mol_type = genomic DNA
atggtttctaaactgagccagctgcagacggagctcctggcggccctgctcgagtcagggctgagcaaagaggcactgatccaggcactgggtgagccggggccctacctcctggctggagaaggccccctggacaagggggagtcctgcggcggcggtcgaggggagctggctgagctgcccaatgggctgggggagactcggggctccgaggacgagacggacgacgatggggaagacttcacgccacccatcctcaaagagctggagaacctcagccctgaggaggcggcccaccagaaagccgtggtggagacccttctgcaggaggacccgtggcgtgtggcgaagatggtcaagtcctacctgcagcagcacaacatcccacagcgggaggtggtcgataccactggcctcaaccagtcccacctgtcccaacacctcaacaagggcactcccatgaagacgcagaagcgggccgccctgtacacctggtacgtccgcaagcagcgagaggtggcgcagcagttcacccatgcagggcagggagggctgattgaagagcccacaggtgatgagctaccaaccaagaaggggcggaggaaccgtttcaagtggggcccagcatcccagcagatcctgttccaggcctatgagaggcagaagaaccctagcaaggaggagcgagagacgctagtggaggagtgcaatagggcggaatgcatccagagaggggtgtccccatcacaggcacaggggctgggctccaacctcgtcacggaggtgcgtgtctacaactggtttgccaaccggcgcaaagaagaagccttccggcacaagctggccatggacacgtacagcgggccccccccagggccaggcccgggacctgcgctgcccgctcacagctcccctggcctgcctccacctgccctctcccccagtaaggtccacggtgtgcgctatggacagcctgcgaccagtgagactgcagaagtaccctcaagcagcggcggtcccttagtgacagtgtctacacccctccaccaagtgtcccccacgggcctggagcccagccacagcctgctgagtacagaagccaagctggtctcagcagctgggggccccctcccccctgtcagcaccctgacagcactgcacagcttggagcagacatccccaggcctcaaccagcagccccagaacctcatcatggcctcacttcctggggtcatgaccatcgggcctggtgagcctgcctccctgggtcctacgttcaccaacacaggtgcctccaccctggtcatcggcctggcctccacgcaggcacagagtgtgccggtcatcaacagcatgggcagcagcctgaccaccctgcagcccgtccagttctcccagccgctgcacccctcctaccagcagccgctcatgccacctgtgcagagccatgtgacccagagccccttcatggccaccatggctcagctgcagagcccccacgccctctacagccacaagcccgaggtggcccagtacacccacacgggcctgctcccgcagactatgctcatcaccgacaccaccaacctgagcgccctggccagcctcacgcccaccaagcaggaggctgctctgctcccccaggtcttcacctcagacactgaggcctccagtgagtccgggcttcacacgccggcatctcaggccaccaccctccacgtccccagccaggaccctgccagcatccagcacctgcagccggcccaccggctcagcgccagccccacagtgtcctccagcagcctggtgctgtaccagagctcagactccagcaatggccagagccacctgctgccatccaaccacagcgtcatcgagaccttcatctccacccagatggcctcttcctcccag

SEQ ID NO: 5329 - DNA, 1986 bp, Homo sapiens
  source 1..1986: mol_type = genomic DNA
atggtttctaaactgagccagctgcagacggagctcctggcggccctgctcgagtcagggctgagcaaagaggcactgatccaggcactgggtgagccggggccctacctcctggctggagaaggccccctggacaagggggagtcctgcggcggcggtcgaggggagctggctgagctgcccaatgggctgggggagactcggggctccgaggacgagacggacgacgatggggaagacttcacgccacccatcctcaaagagctggagaacctcagccctgaggaggcggcccaccagaaagccgtggtggagacccttctgcaggaggacccgtggcgtgtggcgaagatggtcaagtcctacctgcagcagcacaacatcccacagcgggaggtggtcgataccactggcctcaaccagtcccacctgtcccaacacctcaacaagggcactcccatgaagacgcagaagcgggccgccctgtacacctggtacgtccgcaagcagcgagaggtggcgcagcagttcacccatgcagggcagggagggctgattgaagagcccacaggtgatgagctaccaaccaagaaggggcggaggaaccgtttcaagtggggcccagcatcccagcagatcctgttccaggcctatgagaggcagaagaaccctagcaaggaggagcgagagacgctagtggaggagtgcaatagggcggaatgcatccagagaggggtgtccccatcacaggcacaggggctgggctccaacctcgtcacggaggtgcgtgtctacaactggtttgccaaccggcgcaaagaagaagccttccggcacaagctggccatggacacgtacagcgggccccccccagggccaggcccgggacctgcgctgcccgctcacagctcccctggcctgcctccacctgccctctcccccagtaaggtccacggtgtgcgctatggacagcctgcgaccagtgagactgcagaagtaccctcaagcagcggcggtcccttagtgacagtgtctacacccctccaccaagtgtcccccacgggcctggagcccagccacagcctgctgagtacagaagccaagctggtctcagcagctgggggccccctcccccctgtcagcaccctgacagcactgcacagcttggagcagacatccccaggcctcaaccagcagccccagaacctcatcatggcctcacttcctggggtcatgaccatcgggcctggtgagcctgcctccctgggtcctacgttcaccaacacaggtgcctccaccctggtcatcggcctggcctccacgcaggcacagagtgtgccggtcatcaacagcatgggcagcagcctgaccaccctgcagcccgtccagttctcccagccgctgcacccctcctaccagcagccgctcatgccacctgtgcagagccatgtgacccagagccccttcatggccaccatggctcagctgcagagcccccacgccctctacagccacaagcccgaggtggcccagtacacccacacgggcctgctcccgcagactatgctcatcaccgacaccaccaacctgagcgccctggccagcctcacgcccaccaagcaggtaaggtccaggcctgctggccctcccttggcctgtgacagagcccctcacccccacatcccccgggctcaggaggctgctctgctcccccaggtcttcacctcagacactgaggcctccagtgagtccgggcttcacacgccggcatctcaggccaccaccctccacgtccccagccaggaccctgccagcatccagcacctgcagccggcccaccggctcagcgccagccccacagtgtcctccagcagcctggtgctgtaccagagctcagactccagcaatggccagagccacctgctgccatccaaccacagcgtcatcgagaccttcatctccacccagatggcctcttcctcccag

SEQ ID NO: 5330 - DNA, 1893 bp, Homo sapiens
  source 1..1893: mol_type = genomic DNA
atggtttctaaactgagccagctgcagacggagctcctggcggccctgctcgagtcagggctgagcaaagaggcactgatccaggcactgggtgagccggggccctacctcctggctggagaaggccccctggacaagggggagtcctgcggcggcggtcgaggggagctggctgagctgcccaatgggctgggggagactcggggctccgaggacgagacggacgacgatggggaagacttcacgccacccatcctcaaagagctggagaacctcagccctgaggaggcggcccaccagaaagccgtggtggagacccttctgcaggaggacccgtggcgtgtggcgaagatggtcaagtcctacctgcagcagcacaacatcccacagcgggaggtggtcgataccactggcctcaaccagtcccacctgtcccaacacctcaacaagggcactcccatgaagacgcagaagcgggccgccctgtacacctggtacgtccgcaagcagcgagaggtggcgcagcagttcacccatgcagggcagggagggctgattgaagagcccacaggtgatgagctaccaaccaagaaggggcggaggaaccgtttcaagtggggcccagcatcccagcagatcctgttccaggcctatgagaggcagaagaaccctagcaaggaggagcgagagacgctagtggaggagtgcaatagggcggaatgcatccagagaggggtgtccccatcacaggcacaggggctgggctccaacctcgtcacggaggtgcgtgtctacaactggtttgccaaccggcgcaaagaagaagccttccggcacaagctggccatggacacgtacagcgggccccccccagggccaggcccgggacctgcgctgcccgctcacagctcccctggcctgcctccacctgccctctcccccagtaaggtccacggtgtgcgctatggacagcctgcgaccagtgagactgcagaagtaccctcaagcagcggcggtcccttagtgacagtgtctacacccctccaccaagtgtcccccacgggcctggagcccagccacagcctgctgagtacagaagccaagctggtctcagcagctgggggccccctcccccctgtcagcaccctgacagcactgcacagcttggagcagacatccccaggcctcaaccagcagccccagaacctcatcatggcctcacttcctggggtcatgaccatcgggcctggtgagcctgcctccctgggtcctacgttcaccaacacaggtgcctccaccctggtcatcggcctggcctccacgcaggcacagagtgtgccggtcatcaacagcatgggcagcagcctgaccaccctgcagcccgtccagttctcccagccgctgcacccctcctaccagcagccgctcatgccacctgtgcagagccatgtgacccagagccccttcatggccaccatggctcagctgcagagcccccacgccctctacagccacaagcccgaggtggcccagtacacccacacgggcctgctcccgcagactatgctcatcaccgacaccaccaacctgagcgccctggccagcctcacgcccaccaagcaggtcttcacctcagacactgaggcctccagtgagtccgggcttcacacgccggcatctcaggccaccaccctccacgtccccagccaggaccctgccagcatccagcacctgcagccggcccaccggctcagcgccagccccacagtgtcctccagcagcctggtgctgtaccagagctcagactccagcaatggccagagccacctgctgccatccaaccacagcgtcatcgagaccttcatctccacccagatggcctcttcctcccag

SEQ ID NO: 5331 - DNA, 1017 bp, Homo sapiens
  source 1..1017: mol_type = genomic DNA
atggaagggcagcacaactacttatgtgctggaagaaatgactgcatcgttgataaaatccgcagaaaaaactgcccagcatgtcgccttagaaagtgctgtcaggctggcatggtccttggaggtcgaaaatttaaaaagttcaataaagtcagagttgtgagagcactggatgctgttgctctcccacagccagtgggcgttccaaatgaaagccaagccctaagccagagattcactttttcaccaggtcaagacatacagttgattccaccactgatcaacctgttaatgagcattgaaccagatgtgatctatgcaggacatgacaacacaaaacctgacacctccagttctttgctgacaagtcttaatcaactaggcgagaggcaacttctttcagtagtcaagtggtctaaatcattgccaggttttcgaaacttacatattgatgaccagataactctcattcagtattcttggatgagcttaatggtgtttggtctaggatggagatcctacaaacacgtcagtgggcagatgctgtattttgcacctgatctaatactaaatgaacagcggatgaaagaatcatcattctattcattatgccttaccatgtggcagatcccacaggagtttgtcaagcttcaagttagccaagaagagttcctctgtatgaaagtattgttacttcttaatacaattcctttggaagggctacgaagtcaaacccagtttgaggagatgaggtcaagctacattagagagctcatcaaggcaattggtttgaggcaaaaaggagttgtgtcgagctcacagcgtttctatcaacttacaaaacttcttgataacttgcatgatcttgtcaaacaacttcatctgtactgcttgaatacatttatccagtcccgggcactgagtgttgaatttccagaaatgatgtctgaagttattgctgcacaattacccaagatattggcagggatggtgaaaccccttctctttcataaaaag

SEQ ID NO: 5332 - DNA, 2565 bp, Homo sapiens
  source 1..2565: mol_type = genomic DNA
atggctgccgcggctacgctgaggctctccgctcagggcacagtgacttttgaagatgtggctgtgaactttacctgggaggaatggaatctccttagtgaggctcagagatgcctgtaccgtgatgtgacgctggagaacctggcacttatatcctccctgggttgttggtgtggagtggaagatgaggcggcaccttctaagcagagtatttatatacaaagagagactcaggtcaggactcctatggcaggtgtgtctcccaagaaggcccacccctgtgagatgtgtggcccgatcttgggagacattttgcatgtggcagatcatcagggaacacatcacaagcagaaactgcacaggtgtgaggcctgggggaataaattgtatgacagtggaaactttcatcagcaccagaatgagcacattggagagaaaccctacagagggagtgttgaggaggcgttgtttgcaaagaggtgtaagttgcatgtgtcaggggagtcatctgtcttcagtgagagtgggaaggactttttgcccaggtcaggattactccagcaggaggccagtcacactggggagaagtcaaacagcaaaactgagtgtgtgtctcccattcagtgtgggggagctcactacagctgtggagaatccatgaaacattttagcaccaaacatatactcagtcagcaccagagactgctcactagagaagagtgttatgtgtgctgtgaatgtgggaagtcctttagcaaatatgctagcttgagtaatcatcagagagttcacactgaaaaaaaacatgaatgtggagaatgtgggaaatcctttagcaaatatgttagcttcagtaatcatcagagagttcacactgaaaaaaaacatgaatgtggagaatgtgggaaatcctttagcaaatatgttagcttcagtaatcatcagagagttcacactgggaaaagaccttatgaatgtggagaatgtgggaaatcgtttagcaaatatgctagcttcagtaatcatcagagagttcacactgaaaaaaaacattatgaatgtggagaatgtgggaaatcctttagcaaatatgttagcttcagtaatcatcagagagttcacactgggaaaagaccttatgaatgtggagaatgtgggaaatcgtttagcaaatatgctagcttcagtaatcatcagagagttcacactgacaaaaaacattatgaatgtggagaatgtgggaaatcctttagtcaaaagagcagcctcattcaacatcagcgatttcacactggagaaaaaccttatgggtgtgaagaatgtgggaaatcttttagttcagaaggacatcttaggagccatcaacgagttcacgccggagaaagacctttcaagtgtggagaatgtgtgaaatctttcagtcataagcgcagccttgttcaccatcagcgagttcacagtggagaaagaccttatcagtgtggagaatgtgggaaatctttcagtcaaaagggcaacctcgttctacaccagcgagttcacactggagcaagaccttatgagtgtggagaatgtgggaaatcatttagttcaaaaggacatcttaggaaccatcagcaaattcacactggggacagactttatgagtgtggagagtgtgggaaatcttttagtcataaaggcaccctcattctacatcagcgagttcaccctagagaaagatcttatgggtgtggagaatgtgggaaatcttttagttcaatcgggcaccttaggagccatcagcgcgttcatactggagagaggccttatgagtgtggagaatgtgggaaatcttttagtcataagcgcagccttgttcaccatcagcgcatgcacactggagaaagaccttacaagtgtggagactgtgggaaatcttttaatgaaaaaggacaccttaggaatcatcagcgagttcacactacagaaagaccttttaagtgtggggaatgtgggaaatgttttagtcacaagggtaacctcattctacaccagcatggccatactggagaaagaccttatgtatgtagggaatgtggaaaattatttaagaagaagtctcacctccttgtacaccagagaattcacaatggagaaaagccatatgcttgtgaagcttgtcagaaattttttagaaacaagtaccaactcattgcacatcagagagttcacactggagaaaggccttatgaatgcaatgattgtggaaaatcatttacccacagctctacattctgtgttcataagcgaattcacactggagaaaagccttatgagtgcagtgaatgtggaaaatctttcgctgaaagctccagtttcacaaaacacaaaagagttcacactggagaaaagccttatgagtgcagtgaatgtggaaaatcttttgctgaaagctccagtctcactaaacacaagagagttcacactggagaaaagccttataaatgtgagaaatgtgggaaattatttaacaagaagtctcacctccttgtacaccagagttcacactggagaaaagccata

SEQ ID NO: 5333 - DNA, 2352 bp, Homo sapiens
  source 1..2352: mol_type = genomic DNA
atggagggcgcgatggcagtgcgggtgacggccgctcatacggcagaagcccaggccgaagccgggcgggaagcgggcgagggtgcagttgcggcggtggcggcggccttggcccccagcggcttcctcggcctcccggcgcccttcagcgaggaagatgaggacgatgtgcacagatgcggccgctgccaggcagagttcaccgccttggaggattttgttcagcacaagattcagaaggcctgccagcgggcccctccggaggccctgcctgccacccctgccaccacagcgttgctgggccaggaggtggtgccggcagcaccaggcccagaggagcccatcactgtggcccacatcgtggtggaggcggcctctctggcagcagacatcagccacgcatctgaccttgttggtggtgggcacatcaaagaggtcatcgtggctgctgaggcggagctgggagacggtgagatggccgaggccccgggcagcccccgccagcaggggctggggctcgcaggggagggtgagcaggcccaggtgaagctactggtgaacaaggatggccgctatgtgtgtgcgctgtgccacaagaccttcaagacgggcagcatcctcaaggcccacatggtcactcacagcagccgcaaggaccacgagtgcaagctctgtggggcctccttccgcaccaagggctcactcatccggcaccaccggcggcacacggatgagcgcccctacaagtgctccaagtgtggaaagagcttccgggagtcgggtgcactgacccggcacctcaagtctctcaccccctgcacagagaaaatccgcttcagtgtgagcaaggacgtggttgtcagcaaagaggacgcacgtgcaggttctggagctggagctgccggcttggggacagccacatcatcggtgacaggcgagcctatagagacttcacccgtgattcacctggtgacagatgccaagggcaccgtcatccacgaagtccacgtccagatgcaggagctgtccctgggcatgaaagccctggccccagagccccccgtctcccaggagctcccctgctccagcgagggcagccgtgagaacctgctgcaccaggccatgcagaactccggcatcgtccttgagcgcgctgctggggaggagggtgccctggagccagctcctgctgccgggtccagtccccagcccctggcagtggcagccccgcagctgccggtactggaagtgcagccgctggagacacaggtggccagcgaggcctcagcggtgcccaggacccacccatgtcctcagtgcagtgagaccttcccgacagcagccaccctggaggcccacaagaggggccacaccgggccgaggccgttcgcctgcgcgcagtgtggcaaggccttccccaaggcctacctgctcaagaagcaccaggaggtgcacgtgcgtgagcgccgcttccgctgtggcgactgcgggaagctctacaagaccattgcccatgtgcgtggccaccggcgcgtccactcagacgagcggccctacccttgtcccaagtgtggcaagcgctacaagactaagaacgcacagcaggtgcacttcaggacacacctggaggagaagccgcacgtgtgccagttctgcagccgtggcttccgagagaagggctcactggtgcggcacgtgcgacaccacacaggcgagaagccgttcaagtgctacaagtgcggccgtggcttcgccgagcacggcacgctgaaccggcacctgcgcaccaaagggggctgcctgctggaggtggaggagttgctggtgtctgaggacagccccgcggcagccaccaccgtcctcacggaagacccgcacacagtgttggtggagttctcgtccgtggtagctgacacccaggagtatatcatcgaggccactgcggacgatgcggagaccagtgaggccacggagatcatcgagggcacccagacagaggtggacagccacatcatgaaggtggtgcagcagatcgtgcaccaggctagcgccggccaccagatcatcgtgcagaacgtcaccatggacgaggagacggcgctgggcccagaggcggctgccgccgacaccatcaccatcgccacccccgagagcctgacagagcaggtggccatgacgctggcctcggccatcagcgagggcactgtgcttgccgcccgggcagggacaagtggcactgaacaggccactgtgaccatggtgtcatcagaggacatcgagatcctggagcatgcaggcgagctggtcatcgcctcgccggagggccagctggaggtgcagacggtcatcgtc

SEQ ID NO: 5334 - DNA, 1821 bp, Homo sapiens
  source 1..1821: mol_type = genomic DNA
atggagggcgcgatggcagtgcgggtgacggccgctcatacggcagaagcccaggccgaagccgggcgggaagcgggcgagggtgcagttgcggcggtggcggcggccttggcccccagcggcttcctcggcctcccggcgcccttcagcgaggaagatgaggacgatgtgcacagatgcggccgctgccaggcagagttcaccgccttggaggattttgttcagcacaagattcagaaggcctgccagcgggcccctccggaggccctgcctgccacccctgccaccacagcgttgctgggccaggaggtggtgccggcagcaccaggcccagaggagcccatcactgtggcccacatcgtggtggaggcggcctctctggcagcagacatcagccacgcatctgaccttgttggtggtgggcacatcaaagaggtcatcgtggctgctgaggcggagctgggagacggtgagatggccgaggccccgggcagcccccgccagcaggggctggggctcgcaggggagggtgagcaggcccaggtgaagctactggtgaacaaggatggccgctatgtgtgtgcgctgtgccacaagaccttcaagacgggcagcatcctcaaggcccacatggtcactcacagcagccgcaaggaccacgagtgcaagctctgtggggcctccttccgcaccaagggctcactcatccggcaccaccggcggcacacggatgagcgcccctacaagtgctccaagtgtggaaagagcttccgggagtcgggtgcactgacccggcacctcaagtctctcaccccctgcacagagaaaatccgcttcagtgtgagcaaggacgtggttgtcagcaaagaggacgcacgtgcaggttctggagctggagctgccggcttggggacagccacatcatcggtgacaggcgagcctatagagacttcacccgtgattcacctggtgacagatgccaagggcaccgtcatccacgaagtccacgtccagatgcaggagctgtccctgggcatgaaagccctggccccagagccccccgtctcccaggagctcccctgctccagcgagggcagccgtgagaacctgctgcaccagttctgcagccgtggcttccgagagaagggctcactggtgcggcacgtgcgacaccacacaggcgagaagccgttcaagtgctacaagtgcggccgtggcttcgccgagcacggcacgctgaaccggcacctgcgcaccaaagggggctgcctgctggaggtggaggagttgctggtgtctgaggacagccccgcggcagccaccaccgtcctcacggaagacccgcacacagtgttggtggagttctcgtccgtggtagctgacacccaggagtatatcatcgaggccactgcggacgatgcggagaccagtgaggccacggagatcatcgagggcacccagacagaggtggacagccacatcatgaaggtggtgcagcagatcgtgcaccaggctagcgccggccaccagatcatcgtgcagaacgtcaccatggacgaggagacggcgctgggcccagaggcggctgccgccgacaccatcaccatcgccacccccgagagcctgacagagcaggtggccatgacgctggcctcggccatcagcgagggcactgtgcttgccgcccgggcagggacaagtggcactgaacaggccactgtgaccatggtgtcatcagaggacatcgagatcctggagcatgcaggcgagctggtcatcgcctcgccggagggccagctggaggtgcagacggtcatcgtc

SEQ ID NO: 5335 - DNA, 1251 bp, Homo sapiens
  source 1..1251: mol_type = genomic DNA
atgtcccaggactcggtgaccttcgcagacgtggctgtgaacttcaccaaagaggagtggaccctgctggacccagctcagaggaatctctacagagacgtgatgctggaaaattctaggaacttggcattcatagattgggcaactccatgtaaaaccaaagacgcaacccctcagccggatattcttcctaaaagaacatttcctgaagccaacagagtgtgtctcacgagcatcagttcccagcactccacattaagagaagactggagatgccccaaaacagaggaaccacacaggcagggggtgaataatgtgaagccacctgcagttgcccctgagaaagatgaatctcctgttagcatttgtgaagatcatgaaatgaggaaccactctaaacctacctgcaggcttgtgccttcacagggagattccataagacaatgtatcctaacacgtgactcaagtattttcaagtataatcctgtcttaaacgatagtcaaaaaacacatgaaaacaacgaagacgatggagtcttggggtggaacattcagtgggttccgtgtgggagaaaaacagagctgaaatcaagcacatggactggcagtcagaacactgtgcatcatatacgtgatgaaattgatacgggggccaacaggcaccagcggaatccatttggaaaagctttccgtgaagacggatcccttagggcacacaacactcatggtcgagagaaaatgtatgattttactcagtgcgagaacacctccagaaataactcaattcacgccatgcagatgcagttgtataccgcagagacaaacaagaaggattgtcaaactggggcaacctctgccaacgctccaaattccggttcacacaagagtcattgcactggagagaaaacccataaatgccccgaatgtgggagagcctttttttatcagtcattccttatgagacatatgaaaattcacactggagagaaaccgtatgaatgtgggaaatgtgggaaagcctttagatattccttacaccttaataaacatttaagaaagcatgttgtgcagaagaagccctacgaatgtgaagaatgtgggaaagtcattcgggagtcctcaaaatatacacatataaggagccacactggagagaaaccctataaatgtaagacatgtggaaaagactttgcaaagtcgtcaggacttaaaaaacatcttaagactcacaaagatgagaagccctgtgaa

SEQ ID NO: 5336 - DNA, 828 bp, Homo sapiens
  source 1..828: mol_type = genomic DNA
atgtccaagccggtggaccacgtcaagcggcccatgaacgccttcatggtgtggtcgcgggctcagcggcgcaagatggcccaggagaaccccaagatgcacaactcggagatcagcaagcgcttgggcgccgagtggaaactgctcacagagtcggagaagcggccgttcatcgacgaggccaagcgtctacgcgccatgcacatgaaggagcaccccgactacaagtaccggccgcggcgcaagcccaagacgctgctcaagaaggacaagttcgccttcccggtgccctacggcctgggcggcgtggcggacgccgagcaccctgcgctcaaggcgggcgccgggctgcacgcgggggcgggcggcggcctggtgcctgagtcgctgctcgccaatcccgagaaggcggccgcggccgccgccgctgccgccgcacgcgtcttcttcccgcagtcggccgctgccgccgccgctgccgccgccgccgccgccgcgggcagcccctactcgctgctcgacctgggctccaaaatggcagagatctcgtcgtcctcgtccggcctcccgtacgcgtcgtcgctgggctacccgaccgcgggcgcgggcgccttccacggcgcggcggcggcggctgcagcggcggccgccgccgccggggggcacacgcactcgcaccccagcccgggcaacccgggctacatgatcccgtgcaactgcagcgcgtggcccagccccgggctgcagccgccgctcgcctacatcctgctgccgggcatgggcaagccccagctggacccctaccccgcggcctacgctgccgcgcta

SEQ ID NO: 5337 - DNA, 618 bp, Homo sapiens
  source 1..618: mol_type = genomic DNA
atggatcttgtcagatctgctcccgggggtattcttgacttaaacaaggttgcaacgaaactgggagtccgaaagcggagagtgtatgacatcaccaatgtcttagatggaatcgacctcgttgaaaagaaatccaagaaccatattagatggataggatctgatcttagcaattttggagcagttccccaacaaaagaagctacaggaggaactttctgacttatcagcaatggaagatgctttggatgagttaattaaggattgtgctcagcagctgtttgagttaacagatgacaaagaaaatgaaagactagcatatgtgacctatcaagacattcatagcattcaggccttccatgaacagatcgtcattgcagttaaagctccagcagaaaccagattggatgttccagctcccagagaagactctatcacagtgcacataaggagcaccaacggacctatcgatgtctatttgtgtgaagtggagcagggtcagaccagtaacaaaaggtctgaaggtgtcgggacctcttcatctgagagcactcatccagaaggccctgaggaagaagaaaatcctcagcaaagtgaagaattgcttgaagtaagcaac

SEQ ID NO: 5338 - DNA, 747 bp, Homo sapiens
  source 1..747: mol_type = genomic DNA
atgaatccttctccatcaaaaataaggattaatttagaagataatgtacaatatgtgtccatgagaaaagctctaaaagtgaagagacctcgttttgatgtatcgctggtttatttaactcgaaaatttatggatcttgtcagatctgctcccgggggtattcttgacttaaacaaggttgcaacgaaactgggagtccgaaagcggagagtgtatgacatcaccaatgtcttagatggaatcgacctcgttgaaaagaaatccaagaaccatattagatggataggatctgatcttagcaattttggagcagttccccaacaaaagaagctacaggaggaactttctgacttatcagcaatggaagatgctttggatgagttaattaaggattgtgctcagcagctgtttgagttaacagatgacaaagaaaatgaaagactagcatatgtgacctatcaagacattcatagcattcaggccttccatgaacagatcgtcattgcagttaaagctccagcagaaaccagattggatgttccagctcccagagaagactctatcacagtgcacataaggagcaccaacggacctatcgatgtctatttgtgtgaagtggagcagggtcagaccagtaacaaaaggtctgaaggtgtcgggacctcttcatctgagagcactcatccagaaggccctgaggaagaagaaaatcctcagcaaagtgaagaattgcttgaagtaagcaac

SEQ ID NO: 5339 - DNA, 1035 bp, Homo sapiens
  source 1..1035: mol_type = genomic DNA
atggcggcggcagagcccgcgagctcgggccagcaggcgccggcagggcaggggcagggccagcggccgccgccgcagcctccgcaggcgcaagccccgcagccgcccccgccgccgcagctcgggggcgccgggggcggcagcagcaggcacgagaagagcctggggctgctcactaccaagttcgtgtcgctgctgcaggaggccaaggacggcgttctggatctcaaagcggctgctgatactttggctgtgaggcaaaaaaggagaatttatgatatcaccaatgtcttagagggaattgacttgattgaaaaaaagtcaaaaaacagtatccagtggaaaggtgtaggtgctggctgtaatactaaagaagtcatagatagattaagatatcttaaagctgaaattgaagatctagaactgaaggaaagagaacttgatcagcagaagttgtggctacagcaaagcatcaaaaatgtgatggacgattccattaataatagattttcctatgtaactcatgaagacatctgtaattgctttaatggtgatacacttttggccattcaggcaccttctggtacacaactggaggtacccattccagaaatgggtcagaatggacaaaagaaataccagatcaatctaaagagtcattcaggacctatccatgtgctgcttataaataaagagtcgagttcatctaagcccgtggtttttcctgttcccccacctgatgacctcacacagccttcctcccagtccttgactccagtgactccacagaaatccagcatggcaactcaaaatctgcctgagcaacatgtctctgaaagaagccaggctctgcagcagacatcagctacagatatatcttcaggatctattagtggagatatcattgatgagttaatgtcttctgacgtgtttcctctcttaaggctttctcctaccccggcagatgactacaactttaatttagatgataacgaaggagtttgtgatctgtttgatgtccagatactaaattat

SEQ ID NO: 5340 - DNA, 1038 bp, Homo sapiens
  source 1..1038: mol_type = genomic DNA
atggcggcggcagagcccgcgagctcgggccagcaggcgccggcagggcaggggcagggccagcggccgccgccgcagcctccgcaggcgcaagccccgcagccgcccccgccgccgcagctcgggggcgccgggggcggcagcagcaggcacgagaagagcctggggctgctcactaccaagttcgtgtcgctgctgcaggaggccaaggacggcgttctggatctcaaagcggctgctgatactttggctgtgaggcaaaaaaggagaatttatgatatcaccaatgtcttagagggaattgacttgattgaaaaaaagtcaaaaaacagtatccagtggaaaggtgtaggtgctggctgtaatactaaagaagtcatagatagattaagatatcttaaagctgaaattgaagatctagaactgaaggaaagagaacttgatcagcagaagttgtggctacagcaaagcatcaaaaatgtgatggacgattccattaataatagattttcctatgtaactcatgaagacatctgtaattgctttaatggtgatacacttttggccattcaggcaccttctggtacacaactggaggtacccattccagaaatgggtcagaatggacaaaagaaataccagatcaatctaaagagtcattcaggacctatccatgtgctgcttataaataaagagtcgagttcatctaagcccgtggtttttcctgttcccccacctgatgacctcacacagccttcctcccagtccttgactccagtgactccacagaaatccagcatggcaactcaaaatctgcctgagcaacatgtctctgaaagaagccaggctctgcagcagacatcagctacagatatatcttcagcaggatctattagtggagatatcattgatgagttaatgtcttctgacgtgtttcctctcttaaggctttctcctaccccggcagatgactacaactttaatttagatgataacgaaggagtttgtgatctgtttgatgtccagatactaaattat

SEQ ID NO: 5341 - DNA, 555 bp, Homo sapiens
  source 1..555: mol_type = genomic DNA
atggacgattccattaataatagattttcctatgtaactcatgaagacatctgtaattgctttaatggtgatacacttttggccattcaggcaccttctggtacacaactggaggtacccattccagaaatgggtcagaatggacaaaagaaataccagatcaatctaaagagtcattcaggacctatccatgtgctgcttataaataaagagtcgagttcatctaagcccgtggtttttcctgttcccccacctgatgacctcacacagccttcctcccagtccttgactccagtgactccacagaaatccagcatggcaactcaaaatctgcctgagcaacatgtctctgaaagaagccaggctctgcagcagacatcagctacagatatatcttcagcaggatctattagtggagatatcattgatgagttaatgtcttctgacgtgtttcctctcttaaggctttctcctaccccggcagatgactacaactttaatttagatgataacgaaggagtttgtgatctgtttgatgtccagatactaaattat

SEQ ID NO: 5342 - DNA, 1239 bp, Homo sapiens
  source 1..1239: mol_type = genomic DNA
atggcggaggccgggccacaggcgccgccgcccccgggcactccaagccggcacgaaaagagcctgggactgctcaccaccaagttcgtgtcccttctgcaggaggccaaggacggcgtgcttgacctcaagctggcagctgacaccctagctgtacgccagaagcggcggatttacgacattaccaatgttttggaaggtatcgggctaatcgagaaaaagtccaagaacagcatccagtggaagggtgtggggcctggctgcaatacccgggagattgctgacaaactgattgagctcaaggcagagatcgaggagctgcagcagcgggagcaagaactagaccagcacaaggtgtgggtgcagcagagcatccggaacgtcacagaggacgtgcagaacagctgtttggcctacgtcactcatgaggacatctgcagatgctttgctggagataccctcttggccatccgggccccatcaggcaccagcctggaggtgcccatcccagagggtctcaatgggcagaagaagtaccagattcacctgaagagtgtgagtggtcccattgaggttctgctggtgaacaaggaggcatggagctcaccccctgtggctgtgcctgtgccaccacctgaagatttgctccagagcccatctgctgtttctacacctccacctctgcccaagcctgccctagcccagtcccaggaagcctcacgtccaaatagtcctcagctcactcccactgctgtccctggcagtgcagaagtccagggaatggctggcccagcagctgagatcacagtgagtggcggccctgggactgatagcaaggacagtggtgagctcagttcactcccactgggcccaacaacactggacacccggccactgcagtcttctgccctgctggacagcagcagcagcagcagcagcagcagcagcagcagcagcaacagtaacagcagcagttcgtccggacccaacccttctacctcctttgagcccatcaaggcagaccccacaggtgttttggaactccccaaagagctgtcagaaatctttgatcccacacgagagtgcatgagctcggagctgctggaggagttgatgtcctcagaagtgtttgcccctctgcttcgtctttctccacccccgggagaccacgattatatctacaacctggacgagagtgaaggtgtctgtgacctctttgatgtgcctgttctcaacctc

SEQ ID NO: 5343 - DNA, 1395 bp, Homo sapiens
  source 1..1395: mol_type = genomic DNA
atgagaaagggaatccagcccgctctggagcagtacctggtgaccgccgggggtggggagggggcggctgtcgtcgccgccgccgctgcagcctccatggacaaaagggcactgctagccagccccggcttcgccgccgccgccgccgctgccgccgccccgggcgcgtacatccagatcctcaccacgaacacttccaccacctcctgttcctcctccctccaaagcggcgccgtagccgccggccccctcctccccagtgcccccggcgcggagcagaccgccggcagcctcctctacaccacgccgcacggaccctccagcagagccgggctgctgcagcagccaccagcgctgggacgcggcggcagcggcggcggcggcggccctccggcaaagcgaaggctggagctaggagaaagcggtcatcagtacctctcagatggtttaaaaacccccaagggcaaaggaagagctgcactacgaagtccagatagtccaaaaactccaaaatctccctcagaaaaaacgcggtatgatacgtctcttggtctgctcaccaagaagttcattcagctcctgagccagtcacccgatggggtattggatttgaacaaggcagcagaagtgctaaaagtgcaaaagagaaggatttatgatatcaccaacgttctggaaggcatccacctcattaagaagaagtctaaaaacaacgtccaatggatgggctgcagtctgtctgaggatgggggcatgctggcccagtgtcaaggcctgtcaaaagaagtgaccgagctcagtcaggaagagaagaaattagatgaactgatccaaagctgcaccctggacctcaaactgttaaccgaggattcagagaatcaaaggttagcttatgttacatatcaagatattcgaaaaattagtggccttaaagaccaaactgttatagttgtgaaagcccctccagaaacaagacttgaagtgcctgactcaatagagagcctacaaatacatttggcaagtacccaagggcccattgaggtttacttatgtccagaagagactgaaacacacagtccaatgaaaacaaacaaccaagaccacaatgggaatatccctaaacccgcttccaaagacttggcttcaaccaactcaggacatagcgattgctcagtttctatgggaaacctttctcctctggcctccccagccaacctcttacagcagactgaggaccaaattccttccaacctagaaggaccgtttgtgaacttactgcctcccctgctgcaagaggactatctcctgagcctcggggaggaggaaggcatcagcgatctcttcgatgcttacgatttggaaaagctcccactggtggaagacttcatgtgtagt

SEQ ID NO: 5344 - DNA, 1002 bp, Homo sapiens
  source 1..1002: mol_type = genomic DNA
atgcccttacagcagcaggcaaagcgaaggctggagctaggagaaagcggtcatcagtacctctcagatggtttaaaaacccccaagggcaaaggaagagctgcactacgaagtccagatagtccaaaaaaaaaaacgcggtatgatacgtctcttggtctgctcaccaagaagttcattcagctcctgagccagtcacccgatggggtattggatttgaacaaggcagcagaagtgctaaaagtgcaaaagagaaggatttatgatatcaccaacgttctggaaggcatccacctcattaagaagaagtctaaaaacaacgtccaatggatgggctgcagtctgtctgaggatgggggcatgctggcccagtgtcaaggcctgtcaaaagaagtgaccgagctcagtcaggaagagaagaaattagatgaactgatccaaagctgcaccctggacctcaaactgttaaccgaggattcagagaatcaaaggttagcttatgttacatatcaagatattcgaaaaattagtggccttaaagaccaaactgttatagttgtgaaagcccctccagaaacaagacttgaagtgcctgactcaatagagagcctacaaatacatttggcaagtacccaagggcccattgaggtttacttatgtccagaagagactgaaacacacagtccaatgaaaacaaacaaccaagaccacaatgggaatatccctaaacccgcttccaaagacttggcttcaaccaactcaggacatagcgattgctcagtttctatgggaaacctttctcctctggcctccccagccaacctcttacagcagactgaggaccaaattccttccaacctagaaggaccgtttgtgaacttactgcctcccctgctgcaagaggactatctcctgagcctcggggaggaggaaggcatcagcgatctcttcgatgcttacgatttggaaaagctcccactggtggaagacttcatgtgtagt

SEQ ID NO: 5345 - DNA, 1311 bp, Homo sapiens
  source 1..1311: mol_type = genomic DNA
atgctgcaagggccccgggccttggcttcggccgctgggcagaccccgaaggtggtgcccgcgatgagccccacagagctgtggccatccggcctcagcagcccccagctctgcccagctactgctacctactacacaccgctgtacccgcagacggcgcctcccgcagcggcgccaggcacctgcctcgacgccactccccacggacccgagggccaagttgtgcgatgcctgccggcaggccggctgccggccaaaaggaagctggatctggaggggattgggaggcccgtcgtccctgagttcccaacccccaaggggaagtgcatcagagtggatggcctccccagccccaaaacccccaaatcccccggggagaagactcggtatgacacttcgctggggctgctcaccaagaagttcatttacctcctgagcgagtcagaggatggggtcctggacctgaactgggccgctgaggtgctggacgtgcagaagcggcgcatctatgacatcaccaacgtgctggaaggcatccagctcatccgcaagaaggccaagaacaacatccagtgggtaggcaggggaatgtttgaagaccccaccagacctgggaagcagcaacagctggggcaggagctgaaggagctgatgaacacggagcaggccttggaccagctcatccagagctgctctctgagcttcaagcacctgactgaggacaaggccaacaagaggctggcctatgtgacttaccaggatatccgtgctgttggcaactttaaggagcagacagtgattgccgtcaaggcccctccgcagacgagactggaagtgcccgacaggactgaggacaacctgcagatatatctcaagagcacccaagggcccatcgaagtctacctgtgcccagaggaggtgcaggagccggacagtccttccgaggagcctctcccctctacctccaccctctgccccagccctgactctgcccagcccagcagcagcaccgaccctagcatcatggagcccacagcatcctcagtgccagcaccagcgccaaccccccagcaggccccaccgcctccatccctggtccccttggaggctactgacagcctgctggagctgccgcacccactcctgcagcagactgaggaccagttcctgtccccgaccctggcgtgcagctcccctctgatcagcttctccccatccttggaccaggacgactacctgtggggcttggaggcgggtgagggcatcagcgatctcttcgactcctacgaccttggggacctgttgattaat

SEQ ID NO: 5346 - DNA, 1311 bp, Homo sapiens
  source 1..1311: mol_type = genomic DNA
atggccttggccggggcccctgcgggcggcccatgcgcgccggcgctggaggccctgctcggggccggcgcgctgcggctgctcgactcctcgcagatcgtcatcatctccgccgcgcaggacgccagcgccccgccggctcccaccggccccgcggcgcccgccgccggcccctgcgaccctgacctgctgctcttcgccacaccgcaggcgccccggcccacacccagtgcgccgcggcccgcgctcggccgcccgccggtgaagcggaggctggacctggaaactgaccatcagtacctggccgagagcagtgggccagctcggggcagaggccgccatccaggaaaaggtgtgaaatccccgggggagaagtcacgctatgagacctcactgaatctgaccaccaagcgcttcctggagctgctgagccactcggctgacggtgtcgtcgacctgaactgggctgccgaggtgctgaaggtgcagaagcggcgcatctatgacatcaccaacgtccttgagggcatccagctcattgccaagaagtccaagaaccacatccagtggctgggcagccacaccacagtgggcgtcggcggacggcttgaggggttgacccaggacctccgacagctgcaggagagcgagcagcagctggaccacctgatgaatatctgtactacgcagctgcgcctgctctccgaggacactgacagccagcgcctggcctacgtgacgtgtcaggaccttcgtagcattgcagaccctgcagagcagatggttatggtgatcaaagcccctcctgagacccagctccaagccgtggactcttcggagaactttcagatctcccttaagagcaaacaaggcccgatcgatgttttcctgtgccctgaggagaccgtaggtgggatcagccctgggaagaccccatcccaggaggtcacttctgaggaggagaacagggccactgactctgccaccatagtgtcaccaccaccatcatctcccccctcatccctcaccacagatcccagccagtctctactcagcctggagcaagaaccgctgttgtcccggatgggcagcctgcgggctcccgtggacgaggaccgcctgtccccgctggtggcggccgactcgctcctggagcatgtgcgggaggacttctccggcctcctccctgaggagttcatcagcctttccccaccccacgaggccctcgactaccacttcggcctcgaggagggcgagggcatcagagacctcttcgactgtgactttggggacctcacccccctggatttc

SEQ ID NO: 5347 - DNA, 3297 bp, Homo sapiens
  source 1..3297: mol_type = genomic DNA
atggcacaccttgggcccaccccacctccacatagccttaattacaaatcagaggacaggcttagtgagcaagactggccagcatatttcaaggtcccatgttgtggggttgatacatctcaaattgagtcagaagaggcagaagtggatgtgagagaaagagagacacagagagacagagagccaaagagggcaagagacttgactttaagagactcctgtactgacaactccatgcagttcggaaccagaacgactacggctgaaccagggttcatggggacatggcaaaacgctgatactaacctcttattcagaatgtcccaacaggccatccgttgcacactggtaaactgcacatgtgaatgttttcagccagggaagattaacctgaggacttgtgatcagtgtaaacatggctgggtggcacatgccttggataagctcagcacgcagcacctgtaccaccccacccaagtggagattgtgcagtccaacgtcgtgtttgacatcagcagcctgatgctctatgggacacaagcagtgcctgtgcggctaaagatcctgctggaccgtctcttcagcgtcctgaagcaagaggaggtactgcacatactgcacggccttggctggactctgcgggactatgtccgaggatacatccttcaggatgctgctggcaaggtgctggaccgctgggccatcatgtctcgagaagaggaaatcatcacccttcagcagtttctgcggtttggagaaaccaaatccattgtggagctgatggcaattcaggagaaagaagggcaggccgtggctgtaccatcttcaaagacagactcagatataaggactttcattgagagcaataatcgcaccaggagtcccagcctccttgctcacttagagaacagcaatccttccagcattcatcacttcgaaaacatcccaaacagccttgcatttctgcttccattccagtacataaaccctgtctcagcaccactgctagggttgcctccaaatgggctactgttagagcaaccagggttgaggctgcgggaacccagcctttcaactcagaatgaatataatgagagcagcgaatccgaagtttctcccacaccttataagaatgatcaaacacccaatagaaatgccctgaccagcattactaatgtggagcccaaaaccgagccagcctgtgtctctcccattcagaattctgccccagtcagtgatctaaccaaaactgaacacccaaaaagctcattccggattcatcggatgagaaggatggggtcagcctctaggaaaggaagagtgttctgtaatgcatgtgggaagacattctatgacaaaggtactctcaaaattcattacaatgctgttcacctgaagatcaaacatcgatgcaccattgaaggttgcaacatggtctttagctccctccgaagtcgtaatcgccacagtgcaaaccccaatcctcgccttcacatgcctatgctaaggaataaccgagataaagatttaattcgggccacctcaggagctgccacccctgtcatagcaagtacaaaatcaaatctggcactcacaagccctggccgacccccaatgggttttaccactccccctctagaccctgtcttgcaaaatcctctccctagccagctagtattttctgggctaaagactgtacaaccagttcctccattttatagaagtttactcactccaggggaaatggtgagtcctccaacctccctcccaaccagtcccatcattccaaccagtggtaccatagagcagcaccccccgccaccctctgagccagtagtgccagcagtgatgatggccacccatgagcccagtgctgacctggcacccaagaaaaagcccaggaagtcaagcatgcctgtgaagattgagaaggaaattattgataccgccgatgagtttgatgatgaagatgatgaccccaatgatggtggagctgtggtcaatgacatgagccatgacaatcattgtcactcccaagaggagatgagcccaggcatgtctgtgaaggacttttctaagcataacaggacccggtgcatttcaaggactgaaataaggagggccgacagcatgacttctgaagaccaagaacctgagcgggactatgagaacgagtctgagtcttcggagcccaaactgggcgaggaatccatggaaggggatgagcacattcacagcgaagtgagtgaaaaagtcctgatgaatagtgagaggcctgatgagaaccacagtgagccctctcaccaggacgtcatcaaggtgaaggaagaatttacagaccccacttacgacatgttttacatgagccagtatggactgtacaatggtgggggtgccagcatggccgccttgcatgagagctttacatcgtctctgaattatggcagccctcaaaagttctccccagaaggtgacctatgttctagcccagaccccaaaatctgttatgtgtgcaagaagagtttcaaaagctcctacagtgtgaaacttcactacaggaacgttcacttgaaagagatgcacgtctgcacagtggctggttgcaatgctgcattcccctctcgccgaagccgagacagacacagtgccaacataaacctacatcgtaaactgttgaccaaagaactcgatgacatgggcctggactcgtcgcagccctcccttagcaaggacctccgcgatgaatttttggtgaagatatatggtgcccagcaccccatggggctcgatgtcagggaagacgcctcctctcccgcagggactgaagactcccacctgaacgggtatgggagaggcatggcagaggactacatggtccttgacttgagcaccacctccagcctccagtccagcagcagtatccattcctccagagaatccgacgcaggcagcgatgaggggattcttctcgatgacattgacggggcgagtgacagtggggagtcggcacacaaggccgaggcccctgccctccctggcagcctaggggctgaagtttcaggatctcttatgttcagcagcttgtctgggagcaatggtgggatcatgtgcaacatttgccacaaaatgtacagcaacaaggggaccctgagagtgcactacaaaactgtgcatttgagagaaatgcacaagtgcaaagtcccaggttgcaatatgatgttttcctctgtacgaagccgaaatcggcacagtcagaaccctaatctccacaaaaacattcccttcacttcagtagat

SEQ ID NO: 5348 - DNA, 2484 bp, Homo sapiens
  source 1..2484: mol_type = genomic DNA
atggacagcgaggcattccagagcgcgcgggactttctggacatgaacttccagtcgctggccatgaaacacatggatctgaagcagatggagctggacacggcggcggccaaggtggatgaactgaccaagcagctggagtcgctgtggtcagactctcccgcgcctcctggcccgcaggccggacccccttctaggccgccccggtacagctccagctcgatccctgagcccttcggcagccgagggtccccccggaaggcggccaccgacggcgcagacaccccgttcggacgatcagagagtgccccaaccctacacccctacagcccgctgtcccccaagggacggccgtcgtcgccgcgcaccccgctctacctgcagccggacgcctacggcagcctggaccgcgcgacctcgccccggccccgcgccttcgatggcgcaggcagctccctcggccgtgcgccctccccgcggcccgggccaggcccgctccgccagcagggtccccccacgcctttcgacttcctgggccgcgcaggctccccccgcggcagccccctggcggaggggccccaggccttcttccccgagcgtgggccgtcaccgcgcccccctgccacagcctacgacgcgccagcgtccgccttcgggagctccctgctaggctccggcggcagcgcattcgccccgcctctgcgcgcgcaagacgacctgacgctgcgccggcggcctccgaaagcctggaacgagtctgacctggacgtggcgtacgagaagaagccttcgcagacagcgagctatgaacgcctggacgtcttcgcaaggcctgcctcgccgagcctgcagctgttgccttggagggagagcagcctggatggactggggggcaccggcaaggacaacctcactagcgccaccctgccgcgcaattacaaggtctctcctctggccagcgaccggcgttcagacgcgggcagctaccggcgctcgctgggctccgcggggccgtcgggcactttgcctcgcagctggcagcccgtcagccgcatccccatgcccccctccagcccccagccccgcggggccccgcgccagcgtcccatccccctcagcatgatcttcaagctgcagaacgccttctgggagcacggggccagccgcgccatgctccctgggtcccccctcttcacccgagcacccccgcctaagctgcagccccaaccacaaccacagccccagccacaatcacaaccacagccccagctgcccccacagccccagacccaaccccaaacccctaccccagccccccagcatccccaacagacatggccccctgtgaacgaaggaccccccaaaccccccaccgagctggagcctgagccggagatagaggggctgctgacaccagtgctggaggctggcgatgtggatgaaggccctgtagcaaggcctctcagccccacgaggctgcagccagcactgccaccggaggcacagtcggtgcccgagctggaggaggtggcacgggtgttggcggaaattccccggcccctcaaacgcaggggctccatggagcaggcccctgctgtggccctgccccctacccacaagaaacagtaccagcagatcatcagccgcctcttccatcgtcatggggggccagggcccggggggccggagccagagctgtcccccatcactgagggatctgaggccagggcagggccccctgctcctgccccaccagctcccattccacccccggccccgtcccagagcagcccaccagagcagccgcagagcatggagatgcgctctgtgctgcggaaggcgggctccccgcgcaaggcccgccgcgcgcgcctcaaccctctggtgctcctcctggacgcggcgctgaccggggagctggaggtggtgcagcaggcggtgaaggagatgaacgacccgagccagcccaacgaggagggcatcactgccttgcacaacgccatctgcggcgccaactactctatcgtggatttcctcatcaccgcgggtgccaatgtcaactcccccgacagccacggctggacacccttgcactgcgcggcgtcgtgcaacgacacagtcatctgcatggcgctggtgcagcacggcgctgcaatcttcgccaccacgctcagcgacggcgccaccgccttcgagaagtgcgacccttaccgcgagggttatgctgactgcgccacctacctggcagacgtcgagcagagtatggggctgatgaacagcggggcagtgtacgctctctgggactacagcgccgagttcggggacgagctgtccttccgcgagggcgagtcggtcaccgtgctgcggagggacgggccggaggagaccgactggtggtgggccgcgctgcacggccaggagggctacgtgccgcggaactacttcgggctgttccccagggtgaagcctcaaaggagtaaagtc

SEQ ID NO: 5349 - DNA, 597 bp, Homo sapiens
  source 1..597: mol_type = genomic DNA
atgatggagaagcctgcaggcagaaaaaagaagacgccgaccccaagggaggaggcagacgtgcagaagagtgcgctcagagaggagaaggtgtccggggacagaaagccacctgagaggcccactgtgcccaggaagccccgcacagagccctgcctgagtcctgaagacgaagagcacgtctttgatgccttcgacgcttcatttaaagatgactttgagggggttcccgtgttcattccttttcagaggaagaaaccctatgagtgcagtgagtgtgggcggatctttaagcacaagacagaccacattcgccatcagagggtccacactggagagaagcccttcaagtgtgcgcagtgcgggaaggccttccggcacagctctgacgtcaccaaacaccagaggactcacacgggagagaagcccttcaaatgcggggagtgcgggaaagcctttaactgcggctccaatctcctgaaacatcagaagacgcacaccggggagaagccctacgaatgcacgcactgtgggaaagcctttgcctacagctcctgtctcatccgccatcagaaacgccaccctcggaagaagccc

SEQ ID NO: 5350 - DNA, 561 bp, Homo sapiens
  source 1..561: mol_type = genomic DNA
atgccgcgcgtcgtgcccgaccagagaagcaagttcgagaacgaggagttttttaggaagctgagccgcgagtgtgagattaagtacacgggcttcagggaccggccccacgaggaacgccaggcacgcttccagaacgcctgccgcgacggccgctcggaaatcgcttttgtggccacaggaaccaatctgtctctccagttttttccggccagctggcagggagaacagcgacaaacacctagccgagagtatgtcgacttagaaagagaagcaggcaaggtatatttgaaggctcccatgattctgaatggagtctgtgttatctggaaaggctggattgatctccaaagactggatggtatgggctgtctggagtttgatgaggagcgagcccagcaggaggatgcattagcacaacaggcctttgaagaggctcggagaaggacacgcgaatttgaagatagagacaggtctcatcgggaggaaatggaggcaagaagacaacaagaccctagtcctggttccaatttaggtggtggtgatgacctcaaacttcgt

SEQ ID NO: 5351 - DNA, 1119 bp, Homo sapiens
  source 1..1119: mol_type = genomic DNA
atgactgccgagagcgggccgccgccgccgcagccggaggtgctggctaccgtgaaggaagagcgcggcgagacggcagcaggggccggggtcccaggggaggccacgggccgcggggcgggcgggcggcgccgcaagcgccccctgcagcgcgggaagccgccctacagctacatcgcgctcatcgccatggccatcgcgcacgcgcccgagcgccgcctcacgctgggcggcatctacaagttcatcaccgagcgcttccccttctaccgcgacaaccccaaaaagtggcagaacagcatccgccacaacctcacactcaacgactgcttcctcaagatcccgcgcgaggccggccgcccgggtaagggcaactactgggcgcttgaccccaacgcggaggacatgttcgagagcggcagcttcctgcgccgccgcaagcgcttcaagcgctcggacctctccacctacccggcttacatgcacgacgcggcggctgccgcagccgccgccgccgccgccgccgccgccgccgccatcttcccaggcgcggtgcccgccgcgcgccccccctacccgggcgccgtctatgcaggctacgcgccgccgtcgctggccgcgccgcctccagtctactaccccgcggcgtcgcccggcccttgccgcgtcttcggcctggttcctgagcggccgctcagcccagagctggggcccgcaccgtcggggcccggcggctcttgcgcctttgcctccgccggcgcccccgctaccaccaccggctaccagcccgcaggctgcaccggggcccggccggccaacccctccgcctatgcggctgcctacgcgggccccgacggcgcgtacccgcagggcgccggcagtgcgatctttgccgctgctggccgcctggcgggacccgcttcgcccccagcgggcggcagcagtggcggcgtggagaccacggtggacttctacgggcgcacgtcgcccggccagttcggagcgctgggagcctgctacaaccctggcgggcagctcggaggggccagtgcaggcgcctaccatgctcgccatgctgccgcttatcccggtgggatagatcggttcgtgtccgccatg

SEQ ID NO: 5352 - DNA, 573 bp, Homo sapiens
  source 1..573: mol_type = genomic DNA
atgccaggctcagaggatcttcgtaaaggcaaggaccagatgcattcacacaggaaacgaaccatgttcactaagaagcaactggaagatctgaacatcttgttcaatgagaacccatacccaaaccccagccttcagaaagaaatggcctcgaaaatagacatacacccaacagtactgcaggtctggttcaagaatcacagagcaaaactcaagaaagcgaaatgcaagcatattcatcaaaaacaagaaactccacaaccgccaataccagagggtggggtctccaccagtgtcggcctgagaaatgcagacacactacccagattgcccaacgctgctcacccgatcggcctggtgtacacgggtcatcgagtcccctcattccagctcatcctgtaccccaacctcaaggtccctgcaaatgacttcattggccacagaatagtccattttggctgctgccgagatcctaatatatactgcctctaccccattttggaatcccaagtttgcgctccaagcttccattctggctctcctgcctgttcatctaaccaaagtcgagagaga

SEQ ID NO: 5353 - DNA, 1113 bp, Homo sapiens
  source 1..1113: mol_type = genomic DNA
atgtccagcacaccacatgaccccttctattcttctcctttcggcccattttataggaggcatacaccatacatggtacagccagagtaccgaatctatgagatgaacaagagactgcagtctcgcacagaggatagtgacaacctctggtgggacgcctttgccactgaattttttgaagatgacgccacattaaccctttcattttgtttggaagatggaccaaagcgatacactatcggcaggaccctcatcccccgttactttagcactgtgtttgaaggaggggtgaccgacctgtattacattctcaaacactcgaaagagtcataccacaactcatccatcacggtggactgcgaccagtgtaccatggtcacccagcacgggaagcccatgtttaccaaggtatgtacagaaggcagactgatcttggagttcacctttgatgatctcatgagaatcaaaacatggcactttaccattagacaataccgagagttagtcccgagaagcatcctagccatgcatgcacaagatcctcaggtcctggatcagctgtccaaaaacatcaccaggatggggctaacaaacttcaccctcaactacctcaggttgtgtgtaatattggagccaatgcaggaactgatgtcgagacataaaacttacaacctcagtccccgagactgcctgaagacctgcttgtttcagaagtggcagaggatggtggctccgccagcagaacccacaaggcaaccaacaaccaaacggagaaaaaggaaaaattccaccagcagcacttccaacagcagcgctgggaacaatgcaaacagcactggcagcaagaagaagaccacagctgcaaacctgagtctgtccagtcaggatgtgatggtggtaggagagccaactctgatgggaggtgagtttggggacgaggacgaaaggctaatcactagattagaaaacacgcaatatgatgcggccaacggcatggacgacgaggaggacttcaacaattcacccgcgctggggaacaacagcccgtggaacagtaaacctcccgccactcaagagaccaaatcagaaaaccccccaccccaggcttcccaa

SEQ ID NO: 5354 - DNA, 993 bp, Homo sapiens
  source 1..993: mol_type = genomic DNA
atgtccagcacaccacatgaccccttctattcttctcctttcggcccattttataggaggcatacaccatacatggtacagccagagtaccgaatctatgagatgaacaagagactgcagtctcgcacagaggatagtgacaacctctggtgggacgcctttgccactgaattttttgaagatgacgccacattaaccctttcattttgtttggaagatggaccaaagcgatacactatcggcaggaccctcatcccccgttactttagcactgtgtttgaaggaggggtgaccgacctgtattacattctcaaacactcgaaagagtcataccacaactcatccatcacggtggactgcgaccagtgtaccatggtcacccagcacgggaagcccatgtttaccaaggtatgtacagaaggcagactgatcttggagttcacctttgatgatctcatgagaatcaaaacatggcactttaccattagacaataccgagagttagtcccgagaagcatcctagccatgcatgcacaagatcctcaggtcctggatcagctgtccaaaaacatcaccaggatggggctaacaaacttcaccctcaactacctcaggttgtgtgtaatattggagccaatgcaggaactgatgtcgagacataaaacttacaacctcagtccccgagactgcctgaagacctgcttgtttcagaagtggcagaggatggtggctccgccagcagaacccacaaggcaaccaacaaccaaacggagaaaaaggaaaaattccaccagcagcacttccaacagcagcgctgggaacaatgcaaacagcactggcagcaagaagaagaccacagctgcaaacctgagtctgtccagtcaggtacctgggctaggagcgatcccgaactgcagcctcaaccctgggagggatggagacctgtgtcattcaacagcagtgaccccttctggccaatttaaggagaagcat

SEQ ID NO: 5355 - DNA, 1119 bp, Homo sapiens
  source 1..1119: mol_type = genomic DNA
atgtccagcacaccacatgaccccttctattcttctcctttcggcccattttataggaggcatacaccatacatggtacagccagagtaccgaatctatgagatgaacaagagactgcagtctcgcacagaggatagtgacaacctctggtgggacgcctttgccactgaattttttgaagatgacgccacattaaccctttcattttgtttggaagatggaccaaagcgatacactatcggcaggaccctcatcccccgttactttagcactgtgtttgaaggaggggtgaccgacctgtattacattctcaaacactcgaaagagtcataccacaactcatccatcacggtggactgcgaccagtgtaccatggtcacccagcacgggaagcccatgtttaccaaggtatgtacagaaggcagactgatcttggagttcacctttgatgatctcatgagaatcaaaacatggcactttaccattagacaataccgagagttagtcccgagaagcatcctagccatgcatgcacaagatcctcaggtcctggatcagctgtccaaaaacatcaccaggatggggctaacaaacttcaccctcaactacctcaggttgtgtgtaatattggagccaatgcaggaactgatgtcgagacataaaacttacaacctcagtccccgagactgcctgaagacctgcttgtttcagaagtggcagaggatggtggctccgccagcagaacccacaaggcaaccaacaaccaaacggagaaaaaggaaaaattccaccagcagcacttccaacagcagcgctgggaacaatgcaaacagcactggcagcaagaagaagaccacagctgcaaacctgagtctgtccagtcaggtacctgatgtgatggtggtaggagagccaactctgatgggaggtgagtttggggacgaggacgaaaggctaatcactagattagaaaacacgcaatatgatgcggccaacggcatggacgacgaggaggacttcaacaattcacccgcgctggggaacaacagcccgtggaacagtaaacctcccgccactcaagagaccaaatcagaaaaccccccaccccaggcttcccaa

SEQ ID NO: 5356 - DNA, 939 bp, Homo sapiens
  source 1..939: mol_type = genomic DNA
atgtccagcacaccacatgaccccttctattcttctcctttcggcccattttataggaggcatacaccatacatggtacagccagagtaccgaatctatgagatgaacaagagactgcagtctcgcacagaggatagtgacaacctctggtgggacgcctttgccactgaattttttgaagatgacgccacattaaccctttcattttgtttggaagatggaccaaagcgatacactatcggcaggaccctcatcccccgttactttagcactgtgtttgaaggaggggtgaccgacctgtattacattctcaaacactcgaaagagtcataccacaactcatccatcacggtggactgcgaccagtgtaccatggtcacccagcacgggaagcccatgtttaccaaggtatgtacagaaggcagactgatcttggagttcacctttgatgatctcatgagaatcaaaacatggcactttaccattagacaataccgagagttagtcccgagaagcatcctagccatgcatgcacaagatcctcaggtcctggatcagctgtccaaaaacatcaccaggatggggctaacaaacttcaccctcaactacctcaggttgtgtgtaatattggagccaatgcaggaactgatgtcgagacataaaacttacaacctcagtccccgagactgcctgaagacctgcttgtttcagaagtggcagaggatggtggctccgccagcagaacccacaaggcaaccaacaaccaaacggagaaaaaggaaaaattccaccagcagcacttccaacagcagcgctgggaacaatgcaaacagcactggcagcaagaagaagaccacagctgcaaacctgagtctgtccagtcaggtacctattgctagcattgctcgttctccagtgtcaggctgcgcactaaggaca

SEQ ID NO: 5357 - DNA, 1125 bp, Homo sapiens
  source 1..1125: mol_type = genomic DNA
atgctggatagggatgtgggcccaactcccatgtatccgcctacatacctggagccagggattgggaggcacacaccatatggcaaccaaactgactacagaatatttgagcttaacaaacggcttcagaactggacagaggagtgtgacaatctctggtgggatgcattcacgactgagttctttgaggatgatgccatgttgaccatcactttctgcctggaggatggaccaaagagatataccattggccggaccctgatcccacgctacttccgcagcatctttgaggggggtgctacggagctgtactatgttcttaagcaccccaaggaggcattccacagcaactttgtgtccctcgactgtgaccagggcagcatggtgacccagcatggcaagcccatgttcacccaggtgtgtgtggagggccggttgtacctggagttcatgtttgacgacatgatgcggataaagacgtggcacttcagcatccggcagcaccgagagctcatcccccgcagcatccttgccatgcatgcccaagacccccagatgttggatcagctctccaaaaacatcactcggtgtgggctgtccaattccactctcaactacctccgactctgtgtgatactcgagcccatgcaagagctcatgtcacgccacaagacctacagcctcagcccccgcgactgcctcaagacctgccttttccagaagtggcagcgcatggtagcaccccctgcggagcccacacgtcagcagcccagcaaacggcggaaacggaagatgtcagggggcagcaccatgagctctggtggtggcaacaccaacaacagcaacagcaagaagaagagcccagctagcaccttcgccctctccagccaggtacctgatgtgatggtggtgggggagcccaccctgatgggcggggagttcggggacgaggacgagaggctcatcacccggctggagaacacccagtttgacgcagccaacggcattgacgacgaggacagctttaacaactcccctgcactgggcgccaacagcccctggaacagcaagcctccgtccagccaagaaagcaaatcggagaaccccacgtcacaggcctcccag

SEQ ID NO: 5358 - DNA, 1233 bp, Homo sapiens
  source 1..1233: mol_type = genomic DNA
atgtcagtgggctgtgcctgtcctggttgttcctcaaagtcattcaagctgtactcgccgaaggagcccccgaacggcaacgcctttccccccttccatcccggcaccatgctggatagggatgtgggcccaactcccatgtatccgcctacatacctggagccagggattgggaggcacacaccatatggcaaccaaactgactacagaatatttgagcttaacaaacggcttcagaactggacagaggagtgtgacaatctctggtgggatgcattcacgactgagttctttgaggatgatgccatgttgaccatcactttctgcctggaggatggaccaaagagatataccattggccggaccctgatcccacgctacttccgcagcatctttgaggggggtgctacggagctgtactatgttcttaagcaccccaaggaggcattccacagcaactttgtgtccctcgactgtgaccagggcagcatggtgacccagcatggcaagcccatgttcacccaggtgtgtgtggagggccggttgtacctggagttcatgtttgacgacatgatgcggataaagacgtggcacttcagcatccggcagcaccgagagctcatcccccgcagcatccttgccatgcatgcccaagacccccagatgttggatcagctctccaaaaacatcactcggtgtgggctgtccaattccactctcaactacctccgactctgtgtgatactcgagcccatgcaagagctcatgtcacgccacaagacctacagcctcagcccccgcgactgcctcaagacctgccttttccagaagtggcagcgcatggtagcaccccctgcggagcccacacgtcagcagcccagcaaacggcggaaacggaagatgtcagggggcagcaccatgagctctggtggtggcaacaccaacaacagcaacagcaagaagaagagcccagctagcaccttcgccctctccagccaggtacctgatgtgatggtggtgggggagcccaccctgatgggcggggagttcggggacgaggacgagaggctcatcacccggctggagaacacccagtttgacgcagccaacggcattgacgacgaggacagctttaacaactcccctgcactgggcgccaacagcccctggaacagcaagcctccgtccagccaagaaagcaaatcggagaaccccacgtcacaggcctcccag

SEQ ID NO: 5359 - DNA, 1926 bp, Homo sapiens
  source 1..1926: mol_type = genomic DNA
atggaggaagaaagaaaaactgctgagttacagaaaaatagaatacaggactcagtagtctttgaggatgtggctgtggactttacccaggaggaatgggctttgctggatcttgctcagagaaacctctacagagatgtgatgctggaaaacttccagaacctggcctcactagggtatccgctacacacaccccatctgatctcccagtgggaacaagaggaggacctgcagacagtgaagagagaacttatccagggcatctttatgggagagcaccgggaaggttttgagactcaacttaaaactaatgaatcagttgcttcacaagatatttgtggagaaaaaatatccaatgaacagaaaatagtaagattcaaaaggaatgattcctggttctccagtttacatgaaaaccaggagtcctgtggtattgattatcagaacaaaagccatgagagacatttgagaaatcatatggtagagaacatctatgaatgttatgaagaaaatcaagatggacagactttcagccaagttccaaatcttgattcactcaagagaaatactgaagtaaaatcctgtgaatgccatgagtgtggaaaggccttcgtggatcattcatcccttaagagtcacatcaggtctcatactggaagcaaaccctatcagtgcaaggaatgtgggaaggccttccattttcttgcttgtttcaagaagcatatgaaaacccccactgaagagaagccctatgaatgtaaggaatgtaccaaagccttcagctgttcctcattctttagggcacatatgaagattcacatcggaaagacaaactatgaatgtaaagaatgtgggaaaggttttagttgttcctcatcgctcacagaacacaaaagaattcacagtggagataagccttatgaatgtaaggaatgtgggaaggccttcagttgttcctcctcactctccaaacacaaaagaattcacagtggagataagccatatgaatgtaaggaatgtgggaaggcctttagctcttcctctcaccttataatacatataagaattcacactggagagaagccttatgaatgtaaagagtgtgggaaggccttcagcgagtcctcaaaactcactgtacatgggaggacacatactggagagaaaccctataaatgtaaggaatgtgggaaagcctacaattgtccctcctccttaagtatccatatgagaaaacacactggagaaaaaccgtatgaatgtctggaatgtggaaaggccttctaccttcccacttcccttaatacacatgtgaaaaatcaaagtcgagagaaaccctatgaatgtaaggaatgtgggaaggcctttagttgtccctcgtcctttagagcacatgtgagagatcacactggaaagatacagtatgaatgtaaggagtgtgggaagacctttagtcgttcctcatccctcaccgaacacctaagaactcacagcggagagaagccgtatgaatgtaaagaatgtgggaaagcctttattagttcctcccaccttacagtacatatcagaactcacactggagagaaaccctatgaatgtaagaaatgtgggaaagcctttatttatccctcagcccttaggatccacatgagaacgcacactggggaaaaaccctatgaatgtaaggaatgtgggaaagcatttcgtcattcttcataccttactgtacatgcaagaatgcacactggagagaaaccctttgaatgtctggaatgtggaaaagctttcagttgtccctcatcctttcgaaggcatgtgagaagccacactggagagaaaccctatgaatgtaaggaatgtgggaaagcctttgtttgtcctgcctactttcgaaggcatgtgaaaactcacactagagaaaacata

SEQ ID NO: 5360 - DNA, 1683 bp, Homo sapiens
  source 1..1683: mol_type = genomic DNA
atggccgacccgcaggctggctccgcggccggggactgggagatcgatgtcgagagcctggagctggaagaggacgtctgcggggcgccgcggtccacgccccccgggcccagcccgccgccggcggacggggactgcgaggacgacgaagatgacgacggggtggacgaagacgcggaagaagagggcgacggcgaggaggcaggcgcgtcccccgggatgcccggccagccggagcagcgggggggaccgcagccgaggccgccgctcgcgcctcaggcctcacccgccggcaccggtccccgagagcgctgcactcccgcgggcggcggcgcggagccgcgcaagctgagccgcacgcccaagtgcgcgcgctgccgcaaccacggcgtggtgtcctgcctgaagggccacaagcgcttctgtcgctggcgcgactgccagtgcgccaactgcctgctggtggtggagcggcagcgcgtcatggccgcccaggtggcgctccggaggcagcaggccaccgaggacaagaaggggctttccgggaaacagaataatttcgagcgcaaagctgtgtaccagaggcaagtcagagcccccagtttgctggccaaaagcattttagaaggctatcgccccattccagcggagacttatgtaggagggaccttccctctacctcccccagttagtgacaggatgaggaaaagaagagcctttgctgataaagagttggagaacattatgctggagagagaatataaagaaagggagatgttggaaacttctcaagctgctgctctgtttctgcccaaccgcatggtgcctggacctgactacaattcctacaaaagtgcctacagccccagcccagtggaaccaccaagcaaggacttctgtaattttttgcccacctgccttgatttaaccatgcagtattcagggtctgggaatatggaactaatttcttctaatgtcagcgtggccacaacttatagacagtatcccttgtcctcaagatttttagtttggcccaagtgtggccccattagcgacaccctcctctaccagcaatgcctgctaaatgccaccacctcagttcaagccctgaagcctggggccagctgggacttgaagggagcacgagtccaggatggactcagtgcagagcaggacatgatgccatcgaaattggaaggttccctggtgctgcctcacactcctgagatccagaccacgagaagtgaccttcagggtcatcaggctgtcccagagaggtccgcgttctccccaccccgacggaatttctctcccattgttgacacggactccctggcagctcaagggcatgtcttaacgaagatcagcaaagaaaacaccaggcaccctctgccacttagacataatccattccactcattattccagcaaacacttactgacaaatcgggtcctgagttgaaaacaccatttgtcaaagaggcctttgaagagacccctaagaaacacagagagtgtttagttaaggacaaccagaagtacacatttacaatagatagatgtgcaaaagacctttttgtagccaaacaagttggaacaaaactctcggtgaatgaaccactgtcattttctgttgagtctattcttaagaggccttcatctgccatcactcgtgtctctcag

SEQ ID NO: 5361 - DNA, 678 bp, Homo sapiens
  source 1..678: mol_type = genomic DNA
atggccgacccgcaggctggctccgcggccggggactgggagatcgatgtcgagagcctggagctggaagaggacgtctgcggggcgccgcggtccacgccccccgggcccagcccgccgccggcggacggggactgcgaggacgacgaagatgacgacggggtggacgaagacgcggaagaagagggcgacggcgaggaggcaggcgcgtcccccgggatgcccggccagccggagcagcgggggggaccgcagccgaggccgccgctcgcgcctcaggcctcacccgccggcaccggtccccgagagcgctgcactcccgcgggcggcggcgcggagccgcgcaagctgagccgcacgcccaagtgcgcgcgctgccgcaaccacggcgtggtgtcctgcctgaagggccacaagcgcttctgtcgctggcgcgactgccagtgcgccaactgcctgctggtggtggagcggcagcgcgtcatggccgcccaggtggcgctccggaggcagcaggccaccgaggacaagaaggggctttccgggaaacagaataatttcgagcgcaaagctgtgtaccagaggcaagtcagagcccccagtttgctggccaaaagcattttagaagttctccttggattattctacagctattatgtgtacataatgaaccatctt

SEQ ID NO: 5362 - DNA, 1416 bp, Homo sapiens
  source 1..1416: mol_type = genomic DNA
atgaacggctacggctccccctacctgtacatgggcggcccggtgtcgcagccgccacgggcgcccctgcagcgcacgcccaagtgcgcgcgctgccgcaaccatggcgtcctgtcctggctcaagggccacaagcgttactgccgcttcaaggactgcacctgcgagaagtgcatcctcatcatcgagcggcagcgggtcatggctgcgcaggtggcgctgcgccggcagcaggccaacgagagcttggagagcctcatccccgactcgctgcgcgctctgccagggcccccgccgccgggggacgccgtcgccgccccgcagccgccgccagcctctcagccgtcgcagccgcagccgccgcgccctgctgccgagttggccgcggccgccgcgctgcgttggactgccgagccgcagcccggggctctgcaggcgcagctcgccaagccagatttgactgaagaacgacttggagacggcaagtcggcagacaatacagaggtcttcagtgacaaagacactgaccagaggagttccccagatgtggcaaagagtaagggctgcttcacccctgagagccctgagatagtgtccgtggaggaagggggatacgctgtccagaaaaacggaggcaaccccgagagccgccctgacagccccaagtgtcacgcggagcagaatcacctcctgattgagggcccctcggggactgtttctctgcccttcagcttgaaagccaacagaccgccgcttgaagtgttaaaaaagatattccccaaccagaagccaacggtgcttgagctcatcctcaagggctgtggcggggacctggtgagcgccgtggaagtccttctgtccagccgatcctcagtcacgggagcagagcgaacttccgcagaacctgagagtctagcgttgccctccaatgggcacatctttgaacacaccttgagctcctaccccatctcgtcttccaaatggtctgtgggatcagcctttcgagtcccagacacgttgaggttttctgccgactctagcaacgttgtccccagtcccttggctgggcctctgcagccccctttcccccagccaccccggtacccgctgatgctgaggaatactttggcgagaagccagtcgagcccctttttgcccaatgatgtcaccctgtggaacaccatgacgctgcagcagcagtatcagctgaggtcccagtatgtcagtcctttccccagtaactctaccagcgtcttcagaagctcgcccgtccttcctgcccgcgccacggaagaccctcggatttccatccctgatgatgggtgtccatttgtgtcaaagcagtccatttacaccgaggacgactatgacgagaggtctgactcctcagactctagaacactcaacacatcatct

SEQ ID NO: 5363 - DNA, 945 bp, Homo sapiens
  source 1..945: mol_type = genomic DNA
atgtcactctgttcaccaacccactctgctgaaatgtcgttatttcttcaaggcccggaggaaatgctaccactctcatcagagggttcagagatgggcagtgagaaggagcagagtccagaaccacacctgcctgaggaaggggaagggggtaagccttggagagtggatgactcagagggttcttggatcccacctggggagaaggagcatgggcaagagagcctgtcggatgaactgcaagaaactcatccaaaaaagccatggcagaaagtcactgtccgggctcgagagctaggggaccccattgctcatccaaggcatgaggcagatgagaagccctttatatgtgcccagtgtggcaaaaccttcaataatacctccaacctgagaacacaccagcggatccacactggtgagaagccttacaagtgttctgaatgtggcaagagcttctcgagaagctccaaccgcatccggcacgagcggatccacctggaagagaaacactacaaatgccccaagtgccaggagagctttcggcggcgctcagacctcaccacgcaccagcaagatcacctaggcaagcggccataccgctgtgacatctgtggcaagagcttcagccagagtgccacgctagctgtgcatcaccggacccacctggagccagcaccctacatctgctgtgagtgtgggaagagcttcagcaacagctccagctttggcgtgcatcaccgcacccacacaggtgagagaccttatgagtgcactgagtgtgggcggaccttcagcgatatctccaactttggagcacaccagcggacccacagaggggagaagccctaccggtgcactgtgtgtgggaaacacttctcccggagctcgaatctcatccgccaccagaaaactcacttgggcgaacaggctgggaaagattccagc

SEQ ID NO: 5364 - DNA, 918 bp, Homo sapiens
  source 1..918: mol_type = genomic DNA
atggcacaaatatcatctggtggtggtggacaaagccggtgccttctttttgctctgggttcagagatgggcagtgagaaggagcagagtccagaaccacacctgcctgaggaaggggaagggggtaagccttggagagtggatgactcagagggttcttggatcccacctggggagaaggagcatgggcaagagagcctgtcggatgaactgcaagaaactcatccaaaaaagccatggcagaaagtcactgtccgggctcgagagctaggggaccccattgctcatccaaggcatgaggcagatgagaagccctttatatgtgcccagtgtggcaaaaccttcaataatacctccaacctgagaacacaccagcggatccacactggtgagaagccttacaagtgttctgaatgtggcaagagcttctcgagaagctccaaccgcatccggcacgagcggatccacctggaagagaaacactacaaatgccccaagtgccaggagagctttcggcggcgctcagacctcaccacgcaccagcaagatcacctaggcaagcggccataccgctgtgacatctgtggcaagagcttcagccagagtgccacgctagctgtgcatcaccggacccacctggagccagcaccctacatctgctgtgagtgtgggaagagcttcagcaacagctccagctttggcgtgcatcaccgcacccacacaggtgagagaccttatgagtgcactgagtgtgggcggaccttcagcgatatctccaactttggagcacaccagcggacccacagaggggagaagccctaccggtgcactgtgtgtgggaaacacttctcccggagctcgaatctcatccgccaccagaaaactcacttgggcgaacaggctgggaaagattccagc

SEQ ID NO: 5365 - DNA, 852 bp, Homo sapiens
  source 1..852: mol_type = genomic DNA
atgggcagtgagaaggagcagagtccagaaccacacctgcctgaggaaggggaagggggtaagccttggagagtggatgactcagagggttcttggatcccacctggggagaaggagcatgggcaagagagcctgtcggatgaactgcaagaaactcatccaaaaaagccatggcagaaagtcactgtccgggctcgagagctaggggaccccattgctcatccaaggcatgaggcagatgagaagccctttatatgtgcccagtgtggcaaaaccttcaataatacctccaacctgagaacacaccagcggatccacactggtgagaagccttacaagtgttctgaatgtggcaagagcttctcgagaagctccaaccgcatccggcacgagcggatccacctggaagagaaacactacaaatgccccaagtgccaggagagctttcggcggcgctcagacctcaccacgcaccagcaagatcacctaggcaagcggccataccgctgtgacatctgtggcaagagcttcagccagagtgccacgctagctgtgcatcaccggacccacctggagccagcaccctacatctgctgtgagtgtgggaagagcttcagcaacagctccagctttggcgtgcatcaccgcacccacacaggtgagagaccttatgagtgcactgagtgtgggcggaccttcagcgatatctccaactttggagcacaccagcggacccacagaggggagaagccctaccggtgcactgtgtgtgggaaacacttctcccggagctcgaatctcatccgccaccagaaaactcacttgggcgaacaggctgggaaagattccagc

SEQ ID NO: 5366 - DNA, 1572 bp, Homo sapiens
  source 1..1572: mol_type = genomic DNA
atgcctctggtgcacatggcttcctccccggcggtggacgtgtcctgcaggcggcgggagaagcggcggcagctggacgcgcgccgcagcaagtgccgcatccgcctgggcggccacatggagcagtggtgcctcctcaaggagcggctgggcttctccctgcactcgcagctcgccaagttcctgttggaccggtacacttcttcaggctgtgtcctctgtgcaggtcctgagcctttgcctccaaaaggtctgcagtatctggtgctcttgtctcatgcccacagccgagagtgcagcctggtgcccgggcttcgggggcctggcggccaagatggggggcttgtgtgggagtgctcagcaggccataccttctcctggggaccctctttgagccctacaccttcagaggcacccaagccagcctcccttccacatactactcggagaagttggtgttccgaggccacgagtgggcaggagcttgcagatttggaatctgagcatgatgagaggactcaagaggccaggttgcccaggagggtgggacccccaccagagaccttcccacctccaggagaggaagagggtgaggaagaagaggacaatgatgaggatgaagaggagatgctcagtgatgccagcttatggacctacagctcctccccagatgatagtgagcctgatgcccccagactactgccttcccctgtcacctgcacacctaaagagggggagacaccaccagcccctgcagcactctccagtcctcttgctgtgccggccttgtcagcatcctcattgagttccagagctcctccacctgcagaagtcagggtgcagccacagctcagcaggacccctcaagcggcccagcagactgaggccctggccagcactgggagtcaggcccagtctgctccaaccccggcctgggatgaggacactgcacaaattggccccaagagaattaggaaagctgccaaaagagagctgatgccttgtgacttccctggctgtggaaggatcttctccaaccggcagtatttgaatcaccacaaaaagtaccagcacatccaccagaagtctttctcctgcccagagccagcctgtgggaagtctttcaactttaagaaacacctgaaggagcacatgaagctgcacagtgacacccgggactacatctgtgagttctgcgcccggtctttccgcactagcagcaaccttgtcatccacagacgtatccacactggagaaaaacccctgcagtgtgagatatgcgggtttacctgccgccagaaggcttccctgaactggcaccagcgcaagcatgcagagacggtggctgccttgcgcttcccctgtgaattctgcggcaagcgctttgagaagccagacagtgttgcagcccaccgtagcaaaagtcacccagccctgcttctagcccctcaagagtcacccagtggtcccctagagccctgtcccagcatctctgcccctgggcctctgggatccagcgaggggtccaggccctctgcatctcctcaggctccaaccctgcttcctcagcaa

SEQ ID NO: 5367 - DNA, 1422 bp, Homo sapiens
  source 1..1422: mol_type = genomic DNA
atggcttcctccccggcggtggacgtgtcctgcaggcggcgggagaagcggcggcagctggacgcgcgccgcagcaagtgccgcatccgcctgggcggccacatggagcagtggtgcctcctcaaggagcggctgggcttctccctgcactcgcagctcgccaagttcctgttggaccggtacacttcttcaggctgtgtcctctgtgcaggtcctgagcctttgcctccaaaaggtctgcagtatctggtgctcttgtctcatgcccacagccgagagtgcagcctggtgcccgggcttcgggggcctggcggccaagatggggggcttgtgtgggagtgctcagcaggccataccttctcctggggaccctctttgagccctacaccttcagaggcacccaagccagcctcccttccacatactactcggagaagttggtgttccgaggccacgagtgggcaggagcttgcagatttggaatctgagcatgatgagaggactcaagaggccaggttgcccagtagtgagcctgatgcccccagactactgccttcccctgtcacctgcacacctaaagagggggagacaccaccagcccctgcagcactctccagtcctcttgctgtgccggccttgtcagcatcctcattgagttccagagctcctccacctgcagaagtcagggtgcagccacagctcagcaggacccctcaagcggcccagcagactgaggccctggccagcactgggagtcaggcccagtctgctccaaccccggcctgggatgaggacactgcacaaattggccccaagagaattaggaaagctgccaaaagagagctgatgccttgtgacttccctggctgtggaaggatcttctccaaccggcagtatttgaatcaccacaaaaagtaccagcacatccaccagaagtctttctcctgcccagagccagcctgtgggaagtctttcaactttaagaaacacctgaaggagcacatgaagctgcacagtgacacccgggactacatctgtgagttctgcgcccggtctttccgcactagcagcaaccttgtcatccacagacgtatccacactggagaaaaacccctgcagtgtgagatatgcgggtttacctgccgccagaaggcttccctgaactggcaccagcgcaagcatgcagagacggtggctgccttgcgcttcccctgtgaattctgcggcaagcgctttgagaagccagacagtgttgcagcccaccgtagcaaaagtcacccagccctgcttctagcccctcaagagtcacccagtggtcccctagagccctgtcccagcatctctgcccctgggcctctgggatccagcgaggggtccaggccctctgcatctcctcaggctccaaccctgcttcctcagcaa

SEQ ID NO: 5368 - DNA, 516 bp, Homo sapiens
  source 1..516: mol_type = genomic DNA
atgggactattggcattcagggatgtggctctagaattctctccagaggagtgggaatgcctggacccagctcagcggagtttgtatagggatgtgatgttagagaactacagaaacctgatctcccttggtgaggatagcttcaatatgcaattcctatttcacagtcttgctatgtctaagccagaactgatcatctgtctggaggcaaggaaagagccctggaacgtgaacacagagaagacagccagacactcagttttgtcttcttatcttactgaagacattttgccagagcagggcctgcaagtttcattccaaaaagtgatgctgagaagatatgaaagatgttgtcttgagaaattacgcttaaggaatgactgggaaattccatgtgaagatgtgcttgcttcccctttgccttctgccatgattctaagtttcctgaggcctccccagaagcagaagcatgtaaagcccacagaaccggtccagtcgtcgaccatcgagctgctt

SEQ ID NO: 5369 - DNA, 1545 bp, Homo sapiens
  source 1..1545: mol_type = genomic DNA
atgggactattggcattcagggatgtggctctagaattctctccagaggagtgggaatgcctggacccagctcagcggagtttgtatagggatgtgatgttagagaactacagaaacctgatctcccttggtgaggatagcttcaatatgcaattcctatttcacagtcttgctatgtctaagccagaactgatcatctgtctggaggcaaggaaagagccctggaacgtgaacacagagaagacagccagacactcagttttgtcttcttatcttactgaagacattttgccagagcagggcctgcaagtttcattccaaaaagtgatgctgagaagatatgaaagatgttgtcttgagaaattacgcttaaggaatgactgggaaattgtgggtgagtggaaagggcagaaggcaagttataatggacttgacctatgctcagcaactactcatagcaaaaactttcaatgcaataaatgtgtgaaaggttttagtaaatttgcaaatctaaataaatgtaagataagccatactggagaaaaaccattcaaatgcaaagaatgtggcaatgtctcttgcatgtctttaataatgactcaacagcagagaatccatattggagagaacccgtaccaatgtaaaaaatgtggcaaagcctttaatgagtgctcatgctttactgactgtaagagaattcatgttggagagaaacattgcaaatgtgaagaatgtaataacatttttaagtcttgctcaagtcttgctgttgttgagaaaaatcatactgaaaagaaaacctacagatgtgaagaatgtggcaaagcttttaacctgtgctcagttcttactaaacataagaaaattcatactggagagaaaccatacaaatgtgaagaatgtggcaaatcctttaagttgttcccataccttactcaacacaagagaattcatagtagagagaaaccctacaagtgtgaagaatgtggcaaagtctttaaattgttgtcataccttactcaacatagaagaattcatactggagagaaaaccttccgatgtgaagaatgtggaaaagcctttaaccagagctcacatctgactgaacataggagaattcatactggtgagaaaccatacaaatgtgaggaatgtggcaaagcttttacctggttctcataccttattcagcataagagaattcatactgggcagaaaccctacaaatgtgaggaatgtggcaaagcttttacctggttttcataccttactcaacataagagaattcatactggagagaaaccctacaaatgtgatgaatgtggcaaagcttttaactggttttcatatcttactaatcataagagaattcatactggagagaaaccctacaaatgtgaagaatgtggcaaagcctttggccagagctcacacctttctaaacataagacaattcataccagagagaaaccatacaagtgtgaggaatgtggcaaagcctttaaccactctgcacaacttgctgtacatgagaaaactcatacc

SEQ ID NO: 5370 - DNA, 3807 bp, Homo sapiens
  source 1..3807: mol_type = genomic DNA
atgacagtgaagttgggcgacggcggcagcggggaggacgggctcaagaagctgggcaagcgggcggccgatgaggagtccctggaaggagaaggggccggcggcgcagacgcggccgaggagagcagcggcacaaagagggacgagaagaccccccgggccggcgccgacggcccccccgcgccccccggcgcgccgcaggcgccgtccccgccgcagggcagcccccaggaccagcaccacttcctccggtccagcgtgcggccgcagagcaagaggcccaggaaggatcctccgagcgctgtggggagcggcaacgccggtggctcggggccccgcggaaaaggagctgaaggtggtggatcatcgtctggaaatgtgtctggggttgcccctgctgcccctgcagggggctcgcgctcctcctcccggaacttagggtcttctggtggcgagaaggaagaaggcaaaaaggtccggcggcagtgggagtcgtggagcacagaggacaagaacaccttcttcgaggggctgtacgagcatgggaaagactttgaagcgattcagaacaacattgcgctgaagtacaagaagaaaggcaagccagcaagcatggtgaagaacaaggagcaggtccgccacttctactaccgcacctggcacaagatcaccaagtacatcgactttgatcatgtgttctctcgaggcctgaagaagtcatcccaggaactgtatggcctgatctgctatggcgagctgcgcaagaagattgggggctgtatggatgacaagaatgcaacaaagctgaatgaactcattcaggttggggccaccactgtacgttacaaagggcggaacctgcggatcaaagcgcccatgtgccgggccctgaagaagctgtgcgatccagatggcttgagtgatgaagaggaccagaagccagtgcgcctgcctctgaaagtccctatagagctacagccgcggaacaaccacgcctgggcccgtgtgcagagccttgcccagaacccacgcctcaggatgatcgtggagctacatcgaaaggtctccagcctcatcgaattcttgaagcagaagtgggcgctccatgaggtgcgagttcggaagacactcgaggagcggcagctgcaggactcatgctccgcaccgatgcaggagaaggtgacactgcacttgttcccaggcgagaactgtacactgacaccgctgccgggcgtggctcgcgtggtgcactccaaggccttctgcacagtgcactggcaggagggcggccggtgcaagcagagtgccaaggacgcccacgtgctgcccccagcccagatcctgggcatccagagtgggcagggcacggcccggggccaggtgaaatgcccgcggagcggagctgagggcaagggtgtggggcggccccctcctgcggctgacgccttgcagagctccggagagagttcccccgaaagcgcccccggggagggggctgccctaagcttgagcagcccggacgctcctgacaggcctcctcccaggcaccaggacactgggccatgtcttgagaagacccctgcagaaggcagggacagtcccacccgggagccaggggccttgccgtgtgcctgtggccagctcccagacctggaggacgagctctcgcttctagaccccttgccccgctacctaaagtcctgtcaggacctcattgtccccgagcagtgccgctgtgcggacacacggcctgggagcgagcagccccctctgggcggggcggcctccccagaggtgctggctcctgtcagcaaggaggctgctgaccttgctcccactggcccatccccgaggcccggccccgggctcctgctggatgtttgcactaaagacttggcagatgcacctgcggaggagctccaggagaaggggagccccgcggggcctccgccgtctcagggacagcctgccgccaggcccccgaaggaggtccccgccagccggctggctcagcagctccgtgaggagggctggaacctgcagacctccgaaagcctcacgctggccgaagtctacctcatgatgggcaagcccagcaagctgcagctggagtacgactggctggggcccggccgccaggacccccgccccggctccctacccaccgccctccacaagcagcgcctcctcagctgcctcctgaagctcatttccaccgaggtcaaccccaagctggctctggaagcaaacaccatctctacagcctcagtaaggcccgcccaggaggagcagtcgatgacgcccccagggaaggtggtgaccgtcagctctcgcagcccccgctgccctcggaaccaggcctccctccgcagcagcaagaccttcccgcccagctctgcaccctgctcctcaggtttgagaaaccctccaagacccctcttggtgcctggtccctccagcacaggaagcaatgactcagatggaggcctttttgctgtcccgacaaccttgccacccaacagccgacacgggaagctcttctctcccagtaaagaagcagagctgactttccgccagcatctgaactccatcagtatgcagtcggatttcttcctgccaaagccccggaagctgcggaaccggcacctgcggaagccactggtggtccagagaacactgctccctagaccatcggaaaaccagtcccacaacgtttgttccttctccatcctgtctaactcttccgtaactgggagaggttcgttccggcccatccagtcttctctgaccaaagcagctctgtctcggccgatcgtgcccaaggtccttccaccccaggccacgagtcacctggccagtgctatcgacttagcagctacaagtgccggcatcctttccgggaaccccctccctgccttggacaccgagggcttgtctggcatctctccactgtcttcagacgaggtgacgggtgccatctcggggcaggactctactggaactcaccaggatggagacaccctccccaccgtggggggctccgacccatttgtcagcatcccttcgaggcctgagcaggagccagtggcagacagtttccagggctcatctgttctctccttatctgagctgcccaaggcccctctccagaatggcctctccataccgctgtcctcgtcagagagctccagcacccggctgtctccaccagacgtctctgctctgctcgacatctccctgcccggcccacctgaggatgcgctgtcacagggcgagcctgccacacacattagcgactccatcattgagatcgccatcagctccggtcagtacggtgaaggagtccctctttctccagcaaaactgaatggcagtgacagttccaagagccttccctccccgtccagcagcccccagccacactggatcgcctctcccacccacgacccccagtggtaccccagtgactccaccgactcctcgctcagcagcctgtttgcaagcttcatctccccagagaagagccggaagatgttgccgactcccattgggaccaacagtggcacttccttgcttggccccagcttgttggatggaaactcgcgggactcatttgtgtccaggtccctggctgacgttgcagaggttgtggattcccagctggtgtgcatgatgaacgaaaacagcattgattacatttctcggttcaatgacctggcccaagagctgtccatcgctgagcctggccgccgagaagctctgtttgatggtggtggaggcggccccgctgtcagtgacctgtcccag

SEQ ID NO: 5371 - DNA, 1635 bp, Homo sapiens
  source 1..1635: mol_type = genomic DNA
atgaaacaagaagataatcagggtgtctgtgcacaccaggactcagaagacaaagggatgggttctgattttgaggactctgaggacagggaaggggacccagaagaaagagaaatgggctctaatccacatgacacaaacaagagagaaggccatccggagccggagatgggctccaacccacaggactcaaggcacagggaagcagtgcccgacatctgcacagaggggcagctgagtgaggaagaaggcgtttctgtccgtggggaagaggatgaccaatccggtgtagctgacatggcgatgttcccaggactgtctgagtctgacagcatatcccggagcctccgggaggacgacgacgagagtgctggggagaaccggctggaggaggaagaggagcagccggcccctcccgtacttccctggaggcgacatctctccctggggagtcggcaccgaggtgacaagcccgcccaccgccgcttccaccggctccaccaccccatggccgtggacctcggggagctggatagcctggtggccagcatcatggacgcgcccaccatctgccccgactgcggggagagcttcagtcctggcgccgccttcctgcagcaccagcgcattcaccgcctggctgaggccgctgccgccgccagcctggagcccttcggcctggcgggcgagtgcgacgcgatggtgggcatgatgggggtgggtgtggcggggggcttcggggccgggcccccgctggcccggcccccgcgcgaaaagcccttccgctgcggggagtgcggcaagggcttcagccgcaacacctacctgaccaaccacctgcgcctgcacacgggcgagcggcccaacctgtgcgccgactgcggcaagagcttcagctggcgcgccgacctgctcaagcaccggcgcctgcacacgggcgagaagccctacccgtgccccgagtgcggcgaggccttcagcctcagctcgcatctgttgagccaccggcgcgcgcacgcggcggccagcggcgcgggggcggcggcgctgcggcccttcgcctgcggggagtgcggcaagggcttcgtgcgccgttcgcacctggccaaccaccagcgcatccacacgggcgagaagccgcacggctgtggcgagtgcggcaagcgcttcagctggcgctcggacttggtgaagcaccagcgcgtgcacacgggcgagaagccctacatgtgctccgagtgcggcgagaccttcagcgtcagctcgcacctcttcacgcacaagcgcacgcactcgggtgagcggccctacgtgtgccgcgagtgcgggaagggcttcgggcgtaactcgcacctggtgaaccacctgcgcgtgcacaccggcgagaagcccttccgctgtggccagtgcgagaagcgcttcagcgacttctccacgctcacgcagcaccagcgcacgcacacgggcgagaagccctacacgtgcatcgagtgcggcaagagctttatccagagctcccacctgatccgccaccgccgcatccacacgggcaacaagccgcacaagtgtgcgggctgcggcaaaggcttccgctataaaacgcacctcgcgcagcaccagaagctgcacctgtgt

SEQ ID NO: 5372 - DNA, 1896 bp, Homo sapiens
  source 1..1896: mol_type = genomic DNA
atgagtagtaagaactctgaatctggaacagcaacaacaggaacctctttgtcagctccagacatcacagtcagaaatgtggttaatattgctcgaccctcaagccagcagtcttcttggacatctgccaataatgatgtcattgtaactggtatatacagtccagccagttcatcaagtaggcaaggaacaaacaaacatacagacacacaaattacagaagcacataaaatccctattcagaaaacagccactaaaaatgatactgagtttcagttacacattcctgtccaaagacaagtagcacactgtaaaaatgcttccctactcctaggtgaaaaaacaattattttgtcaagacagacaagtgtgctaaatgctggaaactcagtattcaatcacgcaaagaaaaactatggaaactcttcagtacaagcttctgaaatgacagtacctcaaaagccttctgtgtgccaccgaccttgtaaaattgaaccagttgggattcaaaggtcatataagcctgaacacacaggcccagcattacataacttatgtgggcaaaagccaactattagagacccttactgtagaacacaaaacttggaaatccgtgaagtgttttcattggcagttagcgattacccccagagaattctgggaggaaatgccccacagaagcctagctcagcagaaggaaattgtttgtccattgcaatggagactggagatgctgaggatgaatatgccagagaggaagagctggcatcgatgagagcacagataccaagctattcgagattttatgaaagtggcagttcccttcgagctgagaaccaaagtacaaccttgcccggaccaggaagaaatatgccaaattcacaaatggtgaatattagagatatgtcagacaatgtactgtatcaaaacagaaactaccatttgacaccacggacctcattacatacagcatctagtacaatgtacagtaataccaatccattacggagtaatttttctcctcattttgcatcatcaaaccaattgagattatcacaaaaccaaaacaattaccagatttcaggaaaccttactgtgccttggattacagggtgttctagaaaaagagcactacaggaccgcactcagttcagtgaccgagacttagccacccttaagaagtattgggacaatggcatgaccagcctgggctctgtttgtagagagaaaattgaagctgtggcaactgaattaaatgttgactgtgaaatagttcggacttggattgggaatcgaagaaggaaatatcgtttaatggggattgaagttccacctccaagaggaggccctgctgatttctctgagcagcctgagtctggttctttatctgcactcacaccaggagaggaagctgggcctgaagtaggagaggataatgacagaaatgatgaagtatccatctgtttgtctgaaggaagctctcaagaagagcccaatgaagttgttccgaatgatgcaagggctcataaggaagaggaccaccatgcagtaaccacagataatgtgaaaatagaaattattgatgatgaagaaagtgacatgataagtaattctgaagtagaacaagtaaactctttcttggattataagaatgaagaagtcaaattcattgaaaatgagctcgagattcaaaagcaaaaatactttaaacttcagacttttgttagaagcttgatattagcaatgaaagctgatgataaggaacaacagcaggcactgctgtcagatttacctcctgaattagaggaaatggatttcaatcatgcctcactggagcctgatgatacctcattcagtgtatcttctttgtcagagaaaaatgtctcagaaagtttg

SEQ ID NO: 5373 - DNA, 1809 bp, Homo sapiens
  source 1..1809: mol_type = genomic DNA
atgtcaccaggactcctgacaaccaggaaggaggcattgatggccttccgggatgtggctgtggccttcacccagaaggagtggaagctattgagttctgctcagaggaccctgtacagggaggtgatgctggagaactacagccatctggtctccctgggaattgcattttccaaaccaaaactcatcgaacagctggagcaaggcgacgaaccttggagagaggagaacgaacatcttctggacctttgtccagagcctagaacagaattccagccaagttttccccacctggtggccttttctagctcgcagctcctcagacaatatgcgctaagtggccatcccacacagatcttcccaagctcatctgcaggaggtgacttccaactagaagctccaagatgctctagtgaaaaaggagaaagtggagagacagaaggccccgacagctcattaagaaagaggccaagcagaatttctaggacattcttcagcccacatcaaggtgacccagtagaatgggtagaagggaacagagaaggaggaacagaccttcgcctggcccaaaggatgagtcttggggggtcagacacaatgttgaagggagcagacacttcagaatctggagcagtcatacgtggaaactatagactgggacttagcaaaaagtcaagcctgttcagccaccagaagcatcatgtgtgccctgaatgcgggagaggcttttgccagagatcagaccttatcaagcaccagaggacacacaccggggagaagccatacctgtgtcctgagtgtgggcgtcggtttagccagaaggcctccctctccatacaccagaggaagcactcgggggagaagccgtatgtgtgcagggaatgtgggcgacacttcaggtatacatcctctctcactaatcacaagaggattcactccggggagaggccctttgtatgtcaggagtgtgggcgaggctttcgccagaagatagccctccttctacaccagaggacgcacttggaggagaagcccttcgtgtgtcctgagtgtgggagaggcttttgccagaaggcatcactcctccagcaccagagctcacacacaggggagaggcccttcctgtgccttgagtgtgggcgtagcttcaggcagcagtcactcctccttagtcaccaggtcacacactcaggagagaagccttatgtctgtgctgagtgtgggcacagctttcgccaaaaggtcactctcatcaggcaccagaggacacacacaggggagaagccttacctgtgcccccagtgtgggcggggttttagccagaaggtcaccctcattggacaccagaggacacacacaggggagaagccctacctgtgccctgattgtgggcgtggctttggtcagaaggtcaccctcatcagacaccagaggacacacacaggggagaagccttatctgtgccccaagtgtgggcgtgcatttggctttaagtcgctcctcacccgacaccagaggacacactcagaggaggagctttacgtagacagggtgtgtggacaaggacttggccagaagtcacaccttatctctgaccaaaggacacactcaggagagaagccctgcatttgcgatgaatgtgggcgcggctttggctttaagtctgccctcatccgacatcagcggacccattctggggagaagccgtatgtctgcagggagtgtgggcgtggctttagccagaagtctcacttgcatagacacaggaggaccaagtctggtcatcagctcctaccccaagaggtcttc

SEQ ID NO: 5374 - DNA, 945 bp, Homo sapiens
  source 1..945: mol_type = genomic DNA
atggctggaagagctgtcttgttggcaggacctcctggaactggcaagacagctctggctctggctattgctcaggagctgggtagtaaggtccccttctgcccaatggtggggagtgaagtttactcaactgagatcaagaagacagaggtgctgatggagaacttccgcagggccattgggctgcgaataaaggagaccaaggaagtttatgaaggtgaagtcacagagctaactccgtgtgagacagagaatcccatgggaggatatggcaaaaccattagccatgtgatcataggactcaaaacagccaaaggaaccaaacagttgaaactggaccccagcatttttgaaagtttgcagaaagagcgagtagaagctggagatgtgatttacattgaagccaacagtggggccgtgaagaggcagggcaggtgtgatacctatgccacagaattcgaccttgaagctgaagagtatgtccccttgccaaaaggggatgtgcacaaaaagaaagaaatcatccaagatgtgaccttgcatgacttggatgtggctaatgcgcggccccaggggggacaagatatcctgtccatgatgggccagctaatgaagccaaagaagacagaaatcacagacaaacttcgaggggagattaataaggtggtgaacaagtacatcgaccagggcattgctgagctggtcccgggtgtgctgtttgttgatgaggtccacatgctggacattgagtgcttcacctacctgcaccgcgccctggagtcttctatcgctcccatcgtcatctttgcatccaaccgaggcaactgtgtcatcagaggcactgaggacatcacatcccctcacggcatccctcttgaccttctggaccgagtgatgataatccggaccatgctgtatactccacaggaaatgaaacaggtccca

SEQ ID NO: 5375 - DNA, 3678 bp, Homo sapiens
  source 1..3678: mol_type = genomic DNA
atgaatccgcggcaggggtattccctcagcggatactacacccatccatttcaaggctatgagcacagacagctcagataccagcagcctgggccaggatcttcccccagtagtttcctgcttaagcaaatagaatttctcaaggggcagctcccagaagcaccggtgattggaaagcagacaccgtcactgccaccttccctcccaggactccggccaaggtttccagtactacttgcctccagtaccagaggcaggcaagtggacatcaggggtgtccccaggggcgtgcatctcagaagtcaggggctccagagagggttccagcatccttcaccacgtggcaggagtctgccacagagaggtgttgattgcctttcctcacatttccaggaactgagtatctaccaagatcaggaacaaaggatcttaaagttcctggaagagcttggggaagggaaggccaccacagcacatgatctgtctgggaaacttgggactccgaagaaagaaatcaatcgagttttatactccctggcaaagaagggcaagctacagaaagaggcaggaacaccccctttgtggaaaatcgcggtctccactcaggcttggaaccagcacagcggagtggtaagaccagacggtcatagccaaggagccccaaactcagacccgagtttggaaccggaagacagaaactccacatctgtctcagaagatcttcttgagccttttattgcagtctcagctcaggcttggaaccagcacagcggagtggtaagaccagacagtcatagccaaggatccccaaactcagacccaggtttggaacctgaagacagcaactccacatctgccttggaagatcctcttgagtttttagacatggccgagatcaaggagaaaatctgcgactatctcttcaatgtgtctgactcctctgccctgaatttggctaaaaatattggccttaccaaggcccgagatataaatgctgtgctaattgacatggaaaggcagggggatgtctatagacaagggacaacccctcccatatggcatttgacagacaagaagcgagagaggatgcaaatcaagagaaatacgaacagtgttcctgaaaccgctccagctgcaatccctgagaccaaaagaaacgcagagttcctcacctgtaatatacccacatcaaatgcctcaaataacatggtaaccacagaaaaagtggagaatgggcaggaacctgtcataaagttagaaaacaggcaagaggccagaccagaaccagcaagactgaaaccacctgttcattacaatggcccctcaaaagcagggtatgttgactttgaaaatggccagtgggccacagatgacatcccagatgacttgaatagtatccgcgcagcaccaggtgagtttcgagccatcatggagatgccctccttctacagtcatggcttgccacggtgttcaccctacaagaaactgacagagtgccagctgaagaaccccatcagcgggctgttagaatatgcccagttcgctagtcaaacctgtgagttcaacatgatagagcagagtggaccaccccatgaacctcgatttaaattccaggttgtcatcaatggccgagagtttcccccagctgaagctggaagcaagaaagtggccaagcaggatgcagctatgaaagccatgacaattctgctagaggaagccaaagccaaggacagtggaaaatcagaagaatcatcccactattccacagagaaagaatcagagaagactgcagagtcccagacccccaccccttcagccacatccttcttttctgggaagagccccgtcaccacactgcttgagtgtatgcacaaattggggaactcctgcgaattccgtctcctgtccaaagaaggccctgcccatgaacccaagttccaatactgtgttgcagtgggagcccaaactttccccagtgtgagtgctcccagcaagaaagtggcaaagcagatggccgcagaggaagccatgaaggccctgcatggggaggcgaccaactccatggcttctgataaccagcctgaaggtatgatctcagagtcacttgataacttggaatccatgatgcccaacaaggtcaggaagattggcgagctcgtgagatacctgaacaccaaccctgtgggtggccttttggagtacgcccgctcccatggctttgctgctgaattcaagttggtcgaccagtccggacctcctcacgagcccaagttcgtttaccaagcaaaagttgggggtcgctggttcccagccgtctgcgcacacagcaagaagcaaggcaagcaggaagcagcagatgcggctctccgtgtcttgattggggagaacgagaaggcagaacgcatgggtttcacagaggtaaccccagtgacaggggccagtctcagaagaactatgctcctcctctcaaggtccccagaagcacagccaaagacactccctctcactggcagcaccttccatgaccagatagccatgctgagccaccggtgcttcaacactctgactaacagcttccagccctccttgctcggccgcaagattctggccgccatcattatgaaaaaagactctgaggacatgggtgtcgtcgtcagcttgggaacagggaatcgctgtgtgaaaggagattctctcagcctaaaaggagaaactgtcaatgactgccatgcagaaataatctcccggagaggcttcatcaggtttctctacagtgagttaatgaaatacaactcccagactgcgaaggatagtatatttgaacctgctaagggaggagaaaagctccaaataaaaaagactgtgtcattccatctgtatatcagcactgctccgtgtggagatggcgccctctttgacaagtcctgcagcgaccgtgctatggaaagcacagaatcccgccactaccctgtcttcgagaatcccaaacaaggaaagctccgcaccaaggtggagaacggagaaggcacaatccctgtggaatccagtgacattgtgcctacgtgggatggcattcggctcggggagagactccgtaccatgtcctgtagtgacaaaatcctacgctggaacgtgctgggcctgcaaggggcactgttgacccacttcctgcagcccatttatctcaaatctgtcacattgggttaccttttcagccaagggcatctgacccgtgctatttgctgtcgtgtgacaagagatgggagtgcatttgaggatggactacgacatccctttattgtcaaccaccccaaggttggcagagtcagcatatatgattccaaaaggcaatccgggaagactaaggagacaagcgtcaactggtgtctggctgatggctatgacctggagatcctggacggtaccagaggcactgtggatgggccacggaatgaattgtcccgggtctccaaaaagaacatttttcttctatttaagaagctctgctccttccgttaccgcagggatctactgagactctcctatggtgaggccaagaaagctgcccgtgactacgagacggccaagaactacttcaaaaaaggcctgaaggatatgggctatgggaactggattagcaaaccccaggaggaaaagaacttttatctctgcccagta

SEQ ID NO: 5376 - DNA, 2793 bp, Homo sapiens
  source 1..2793: mol_type = genomic DNA
atggccgagatcaaggagaaaatctgcgactatctcttcaatgtgtctgactcctctgccctgaatttggctaaaaatattggccttaccaaggcccgagatataaatgctgtgctaattgacatggaaaggcagggggatgtctatagacaagggacaacccctcccatatggcatttgacagacaagaagcgagagaggatgcaaatcaagagaaatacgaacagtgttcctgaaaccgctccagctgcaatccctgagaccaaaagaaacgcagagttcctcacctgtaatatacccacatcaaatgcctcaaataacatggtaaccacagaaaaagtggagaatgggcaggaacctgtcataaagttagaaaacaggcaagaggccagaccagaaccagcaagactgaaaccacctgttcattacaatggcccctcaaaagcagggtatgttgactttgaaaatggccagtgggccacagatgacatcccagatgacttgaatagtatccgcgcagcaccaggtgagtttcgagccatcatggagatgccctccttctacagtcatggcttgccacggtgttcaccctacaagaaactgacagagtgccagctgaagaaccccatcagcgggctgttagaatatgcccagttcgctagtcaaacctgtgagttcaacatgatagagcagagtggaccaccccatgaacctcgatttaaattccaggttgtcatcaatggccgagagtttcccccagctgaagctggaagcaagaaagtggccaagcaggatgcagctatgaaagccatgacaattctgctagaggaagccaaagccaaggacagtggaaaatcagaagaatcatcccactattccacagagaaagaatcagagaagactgcagagtcccagacccccaccccttcagccacatccttcttttctgggaagagccccgtcaccacactgcttgagtgtatgcacaaattggggaactcctgcgaattccgtctcctgtccaaagaaggccctgcccatgaacccaagttccaatactgtgttgcagtgggagcccaaactttccccagtgtgagtgctcccagcaagaaagtggcaaagcagatggccgcagaggaagccatgaaggccctgcatggggaggcgaccaactccatggcttctgataaccagcctgaaggtatgatctcagagtcacttgataacttggaatccatgatgcccaacaaggtcaggaagattggcgagctcgtgagatacctgaacaccaaccctgtgggtggccttttggagtacgcccgctcccatggctttgctgctgaattcaagttggtcgaccagtccggacctcctcacgagcccaagttcgtttaccaagcaaaagttgggggtcgctggttcccagccgtctgcgcacacagcaagaagcaaggcaagcaggaagcagcagatgcggctctccgtgtcttgattggggagaacgagaaggcagaacgcatgggtttcacagaggtaaccccagtgacaggggccagtctcagaagaactatgctcctcctctcaaggtccccagaagcacagccaaagacactccctctcactggcagcaccttccatgaccagatagccatgctgagccaccggtgcttcaacactctgactaacagcttccagccctccttgctcggccgcaagattctggccgccatcattatgaaaaaagactctgaggacatgggtgtcgtcgtcagcttgggaacagggaatcgctgtgtgaaaggagattctctcagcctaaaaggagaaactgtcaatgactgccatgcagaaataatctcccggagaggcttcatcaggtttctctacagtgagttaatgaaatacaactcccagactgcgaaggatagtatatttgaacctgctaagggaggagaaaagctccaaataaaaaagactgtgtcattccatctgtatatcagcactgctccgtgtggagatggcgccctctttgacaagtcctgcagcgaccgtgctatggaaagcacagaatcccgccactaccctgtcttcgagaatcccaaacaaggaaagctccgcaccaaggtggagaacggagaaggcacaatccctgtggaatccagtgacattgtgcctacgtgggatggcattcggctcggggagagactccgtaccatgtcctgtagtgacaaaatcctacgctggaacgtgctgggcctgcaaggggcactgttgacccacttcctgcagcccatttatctcaaatctgtcacattgggttaccttttcagccaagggcatctgacccgtgctatttgctgtcgtgtgacaagagatgggagtgcatttgaggatggactacgacatccctttattgtcaaccaccccaaggttggcagagtcagcatatatgattccaaaaggcaatccgggaagactaaggagacaagcgtcaactggtgtctggctgatggctatgacctggagatcctggacggtaccagaggcactgtggatgggccacggaatgaattgtcccgggtctccaaaaagaacatttttcttctatttaagaagctctgctccttccgttaccgcagggatctactgagactctcctatggtgaggccaagaaagctgcccgtgactacgagacggccaagaactacttcaaaaaaggcctgaaggatatgggctatgggaactggattagcaaaccccaggaggaaaagaacttttatctctgcccagta

SEQ ID NO: 5377 - DNA, 1617 bp, Homo sapiens
  source 1..1617: mol_type = genomic DNA
atggggagccccgaggatgacctgattgggattccattcccggaccacagcagtgagctcctgagctgcctcaatgagcagcgccagctgggccacctatgtgacctcaccatccggacgcagggccttgaataccgcacccacagggctgtgctagctgcctgtagccactacttcaagaagcttttcactgagggcggtggcggagctgtcatgggggccgggggtagcgggacggccactgggggagcaggggccggtgtgtgtgagctggactttgtagggccagaggcactaggcgccctccttgaatttgcctatacagccacactgaccaccagcagcgccaacatgccagctgtgctccaggctgcccgcctgctggagatcccgtgtgtcatcgctgcttgcatggagattctgcagggcagtgggctagaagctcccagcccggacgaggatgactgtgagcgagcccgccagtatctggaggcctttgccacagccacggcctctggagttcccaatggtgaagacagtcctccacaggtgcccctcccaccacctccgccaccgccacctcggcctgttgcccgccgcagccgcaagccccggaaagctttcctgcaaaccaagggggccagagcaaaccacctagtccctgaggtgcccacagtgcccgcccatcccttgacctatgaggaggaggaggtggcgggcagagtgggcagcagtgggggcagtgggccgggggacagctacagccctcccacaggaactgcctcccctcctgagggtccccagagctacgaaccctatgagggtgaggaagaagaagaggagctggtatatcccccagcctatgggctggcgcagggtggcgggcccccgctgtccccagaggagctgggctcagatgaggatgccatcgatcctgacctgatggcctacctaagctccctgcaccaggacaacctggcaccaggcctggacagccaagacaagctggtgcgcaaacgccgctcccagatgcctcaggagtgccctgtctgccacaagatcatccatggggcaggcaaactgcctcgccacatgaggacccacacaggcgagaagccctttgcctgcgaggtctgcggtgttcgattcaccaggaacgacaagctgaagatccacatgcggaagcacacgggagagcgcccctactcatgcccgcactgcccagcccgcttcctgcacagctacgacctcaagaaccacatgcacctgcacacaggggaccggccctatgagtgccacctgtgccacaaggctttcgccaaggaggaccacctgcagcgccacctcaaaggccagaactgcctggaggtgcgcacccgacggcgccgcaaggacgatgcaccaccccactacccaccaccctctaccgctgctgcatcccccgctggcctcgacctctccaatggccacctggacaccttccgcctctctctagctcgattctgggagcagtcagcccccactgggcccccggtctctaccccagggccccctgatgacgatgaggaggaaggggcacccaccacaccccaggctgaaggtgccatggagtcctct

SEQ ID NO: 5378 - DNA, 1719 bp, Homo sapiens
  source 1..1719: mol_type = genomic DNA
atgttacagcctggtcctcatcctccctcaccccaagctgctgctcctggagaagcctggccaggcccctctcaggctccctggcagagcctagaggagaagatggggagccccgaggatgacctgattgggattccattcccggaccacagcagtgagctcctgagctgcctcaatgagcagcgccagctgggccacctatgtgacctcaccatccggacgcagggccttgaataccgcacccacagggctgtgctagctgcctgtagccactacttcaagaagcttttcactgagggcggtggcggagctgtcatgggggccgggggtagcgggacggccactgggggagcaggggccggtgtgtgtgagctggactttgtagggccagaggcactaggcgccctccttgaatttgcctatacagccacactgaccaccagcagcgccaacatgccagctgtgctccaggctgcccgcctgctggagatcccgtgtgtcatcgctgcttgcatggagattctgcagggcagtgggctagaagctcccagcccggacgaggatgactgtgagcgagcccgccagtatctggaggcctttgccacagccacggcctctggagttcccaatggtgaagacagtcctccacaggtgcccctcccaccacctccgccaccgccacctcggcctgttgcccgccgcagccgcaagccccggaaagctttcctgcaaaccaagggggccagagcaaaccacctagtccctgaggtgcccacagtgcccgcccatcccttgacctatgaggaggaggaggtggcgggcagagtgggcagcagtgggggcagtgggccgggggacagctacagccctcccacaggaactgcctcccctcctgagggtccccagagctacgaaccctatgagggtgaggaagaagaagaggagctggtatatcccccagcctatgggctggcgcagggtggcgggcccccgctgtccccagaggagctgggctcagatgaggatgccatcgatcctgacctgatggcctacctaagctccctgcaccaggacaacctggcaccaggcctggacagccaagacaagctggtgcgcaaacgccgctcccagatgcctcaggagtgccctgtctgccacaagatcatccatggggcaggcaaactgcctcgccacatgaggacccacacaggcgagaagccctttgcctgcgaggtctgcggtgttcgattcaccaggaacgacaagctgaagatccacatgcggaagcacacgggagagcgcccctactcatgcccgcactgcccagcccgcttcctgcacagctacgacctcaagaaccacatgcacctgcacacaggggaccggccctatgagtgccacctgtgccacaaggctttcgccaaggaggaccacctgcagcgccacctcaaaggccagaactgcctggaggtgcgcacccgacggcgccgcaaggacgatgcaccaccccactacccaccaccctctaccgctgctgcatcccccgctggcctcgacctctccaatggccacctggacaccttccgcctctctctagctcgattctgggagcagtcagcccccactgggcccccggtctctaccccagggccccctgatgacgatgaggaggaaggggcacccaccacaccccaggctgaaggtgccatggagtcctct

SEQ ID NO: 5379 - DNA, 1455 bp, Homo sapiens
  source 1..1455: mol_type = genomic DNA
atggctacagaaccaaagaaagctgcagcccagaactctccagaggatgaaggacttctgatagtgaagatagaagaggaagaatttatccatgggcaggacacttgcttacagagaagtgaactccttaagcaggagctctgcaggcagctttttaggcagttctgctaccaggattctcctggacctcgcgaggcactgagccgcctccgggagctctgctgtcagtggctgaagccagagatccataccaaggaacagattctggaactgctggtgctagagcagttcctgaccatcctgccaggagatttgcaggcctgggtacatgaacattacccagagagtggagaggaggcagtgaccatactagaagatttggagagaggcactgatgaagcagtactccaggttcaagcccatgaacatggacaagaaatattccagaaaaaagtgtcacctcctggaccagcacttaatgtcaagttacagccagtggagaccaaggcccattttgattcatcagaaccccagctcctatgggactgtgataatgagagtgaaaacagtagatccatgccaaagctggaaatttttgaaaaaattgaatcacagagaattatatctggaagaatctcaggatacatatcagaagcatctggtgagtctcaagacatctgtaagtctgcaggcagggtaaagagacaatgggaaaaagaatcaggggagtctcagagactctcgtctgcccaggatgaaggttttggtaaaatcctcacccacaaaaatacagtcagaggtgaaataataagccacgatggatgtgagaggagattaaatctgaactcaaatgaattcacacaccagaaatcttgtaaacatggtacctgtgaccagagcttcaaatggaactcagattttattaaccatcaaataatttatgctggagaaaaaaatcaccaatatggaaaatctttcaagagcccaaaacttgctaaacatgcagcagttttcagtggagataaaactcatcagtgtaatgaatgtgggaaagctttcaggcacagctcaaaacttgctaggcatcagagaatccacactggagagagatgctatgaatgtaatgaatgtgggaaaagctttgcagagagctcagatcttactagacatcggcgaattcacactggggaaagaccctttggttgcaaagaatgtgggagagcattcaacctgaactcacatcttatcaggcatcagagaattcacaccagagagaaaccctacgagtgtagtgaatgtgggaaaaccttccgagtgagctcacatcttattcgacactttagaattcacactggagaaaaaccctatgaatgcagtgagtgtggaagagccttcagtcagagctcaaaccttagtcaacaccagagaattcacatgagggaaaacctattaatg

SEQ ID NO: 5380 - DNA, 1527 bp, Homo sapiens
  source 1..1527: mol_type = genomic DNA
atgagtgagaatgaggaagaggaaatttctcagcaagaaggcagtggggactatgaagtcgaagagataccatttgggcttgaaccccagagccctgggtttgagccacaaagcccagagtttgaaccccaaagccccagatttgagcctgaaagcccggggtttgagtcccgaagccctgggcttgtgcccccaagccctgagtttgcacccagaagccctgaatcagattctcagagccctgagtttgaatcccagagccctaggtatgaaccccaaagccctggctatgaacctcggagccccgggtatgaaccccggagccctggctatgaatctgagagctctagatatgaatcccagaacactgagctcaaaacccaaagcccagaatttgaagctcaaagttccaaattccaggaaggtgcggagatgcttctgaaccccgaggaaaagagtcctttgaatatctccgtaggagttcaccccctggactccttcactcaggggtttggggagcagcccacaggggacctgcccatagggccaccttttgagatgcccacaggggccctgctgtctacaccgcagtttgagatgcttcagaatcccctgggtctcacaggagcccttcgaggtccaggtcggcggggtggccgggccaggggtgggcagggccctcggcctaacatctgtggcatctgcgggaagagcttcgggcggggctccaccctgatccagcaccagcgcatccacaccggtgagaagccctacaaatgtgaggtctgcagcaaggccttctcccagagctctgacctcatcaaacaccagcgcacccacactggcgagcggccctacaaatgtccccgttgcggcaaggccttcgccgacagctcttacctgcttcgccaccagcgcactcactctggccagaagccctacaagtgcccacattgtggcaaggccttcggcgacagctcctacctcctgcgacaccagcgcacccacagccacgagcggccctacagctgcaccgagtgcggcaagtgctatagccagaactcgtccctgcgcagccatcagagggtgcacaccggtcagaggcccttcagctgtggcatctgcggcaagagcttctcccagcggtcggcccttatcccccatgcccgcagccacgcccgggagaagcccttcaagtgccctgagtgcggcaagcgctttggccagagctcggtgctggccatccacgcccgcacccacctgccaggccgcacctacagctgccccgactgcggcaagaccttcaatcgctcctccactctcatccagcaccagcgctcccacacgggcgagcggccctacaggtgcgccgtgtgcggcaagggcttctgccgctcctccacgcttctgcagcatcaccgggtccacagtggcgagcggccttacaagtgcgatgactgcggaaaggccttctcccagagctccgacctcatccgccaccagcggacccacgcggcgggccggcgc

SEQ ID NO: 5381 - DNA, 1620 bp, Homo sapiens
  source 1..1620: mol_type = genomic DNA
atggagcgggaggcgttgccgtggggcctcgagccccaggatgtgcagagttctgacgaaatgaggagccccgaagggtacctcagaggcaacatgagtgagaatgaggaagaggaaatttctcagcaagaaggcagtggggactatgaagtcgaagagataccatttgggcttgaaccccagagccctgggtttgagccacaaagcccagagtttgaaccccaaagccccagatttgagcctgaaagcccggggtttgagtcccgaagccctgggcttgtgcccccaagccctgagtttgcacccagaagccctgaatcagattctcagagccctgagtttgaatcccagagccctaggtatgaaccccaaagccctggctatgaacctcggagccccgggtatgaaccccggagccctggctatgaatctgagagctctagatatgaatcccagaacactgagctcaaaacccaaagcccagaatttgaagctcaaagttccaaattccaggaaggtgcggagatgcttctgaaccccgaggaaaagagtcctttgaatatctccgtaggagttcaccccctggactccttcactcaggggtttggggagcagcccacaggggacctgcccatagggccaccttttgagatgcccacaggggccctgctgtctacaccgcagtttgagatgcttcagaatcccctgggtctcacaggagcccttcgaggtccaggtcggcggggtggccgggccaggggtgggcagggccctcggcctaacatctgtggcatctgcgggaagagcttcgggcggggctccaccctgatccagcaccagcgcatccacaccggtgagaagccctacaaatgtgaggtctgcagcaaggccttctcccagagctctgacctcatcaaacaccagcgcacccacactggcgagcggccctacaaatgtccccgttgcggcaaggccttcgccgacagctcttacctgcttcgccaccagcgcactcactctggccagaagccctacaagtgcccacattgtggcaaggccttcggcgacagctcctacctcctgcgacaccagcgcacccacagccacgagcggccctacagctgcaccgagtgcggcaagtgctatagccagaactcgtccctgcgcagccatcagagggtgcacaccggtcagaggcccttcagctgtggcatctgcggcaagagcttctcccagcggtcggcccttatcccccatgcccgcagccacgcccgggagaagcccttcaagtgccctgagtgcggcaagcgctttggccagagctcggtgctggccatccacgcccgcacccacctgccaggccgcacctacagctgccccgactgcggcaagaccttcaatcgctcctccactctcatccagcaccagcgctcccacacgggcgagcggccctacaggtgcgccgtgtgcggcaagggcttctgccgctcctccacgcttctgcagcatcaccgggtccacagtggcgagcggccttacaagtgcgatgactgcggaaaggccttctcccagagctccgacctcatccgccaccagcggacccacgcggcgggccggcgc

SEQ ID NO: 5382 - DNA, 1569 bp, Homo sapiens
  source 1..1569: mol_type = genomic DNA
atggctcttcctcagggtctattgacattcagggatgtggccatagaattctctcaggaggagtggaaatgcctggaccctgctcagaggactctatacagggacgtgatgctggagaattataggaacctggtctccctggatatctcttccaaatgcatgatgaaggagttctcgtcaacagcacaaggcaatagagaagtgttccatgcagggacatctcaaagacatgaaagtcatcacaatggagatttttgtttccaggatattgataaagatattcatgacattgagtttcagtggcaagaagatgaaagaaatggccatgaagcactcatgacaaaaatcaaaaagttgacaggtagtacagagcgatatgatcaaaattatgctggaaacaagcctgttaaatatcagcttggattcagctttcattcgcatctgcctgaactgcacatatttcacactgaagagaaaattgataatcaagttgtgaagtctatccacgatgcttccttggtttcaacagcccaaagaatttcttgtaggcctgaaacccatatttctaatgactatgggaataatttcctgaattcttcattattcacacaaaaacaggaagtacatatgagggaaaaatctttccaatgcaatgacagtggcaaagcctataattgtagctcactcttaaggaaacatcagttaatccatttaggagagaaacaatataaatgcgatatatgtggcaaggtctttaattcgaagcgatacgttgcacgccatcgtagatgtcacactggtgagaaaccttacaagtgtaatgagtgtggcaagaccttcagtcagacatattacctaacatgccatcgtagacttcatactggagagaaaccttacaaatgtgaagaatgtgacaaagctttccatttcaaatcaaagcttcaaatacataggagaattcatactggagagaaaccgtacaagtgtaatgagtgtggcaagacctttagtcagaagtcgtaccttacatgccatcgtaggcttcatactggagagaaaccttacaagtgtaatgagtgtggcaagacctttagtcggaagtcacattttacatgccatcatagagttcatactggagagaaaccttacaagtgtaatgagtgtagcaagacctttagtcacaagtcatctcttacataccatcgtagacttcatactgaagagaaaccttacaagtgtaatgagtgtggcaagaccttcaatcagcagttaacccttaacatttgtagacttcatagtggagagaaaccttacaaatgtgaagaatgtgacaaagcctacagtttcaaatcaaaccttgaaatacatcagaaaattcatactgaagagaatccttacaagtgtaatgagtgtggcaagaccttcagccggacgtcatcccttacataccatcatagacttcatactggacagaaaccttacaaatgtgaagattgtgatgaagctttcagtttcaaatcaaaccttgaaagacataggagaatttatactggagagaaactacacgtg

SEQ ID NO: 5383 - DNA, 1221 bp, Homo sapiens
  source 1..1221: mol_type = genomic DNA
atggcgccgcctctggccccgctccctccccgggacccaaacggggccggacccgagtggagggagccgggggctgtgagcttcgcggacgtggccgtgtacttctgccgggaggagtggggctgcttgcggccagcgcagagggccctgtaccgggacgtgatgcgggagacctacggccacctgagcgctctcggaatcggaggcaacaagccagctctcatctcctgggtggaggaggaggccgaactgtggggtccggctgcccaggatccggaggtggcgaaatgtcagacacaaacggacccagattccagaaacaagaaaaaggaaagacaaagggaagggacgggagccctggagaagcccgaccctgtggccgccgggtctcctgggctgaagtctccccaagccccctcggccgggcccccttatggttgggagcagctgtccaaggcaccgcaccggggacgcccctccctctgtgcccacccccctgtcccccgagctgaccagcgtcatggctgctacgtgtgcgggaagagctttgcctggcgctccacactggtggagcacgtctacagtcacactggcgagaagcccttccactgcactgactgcggcaagggcttcggccacgcttcctccctgagcaaacaccgggccatccatcgtggggagcggccccaccgctgtctggagtgtggccgggccttcacgcagcgctcggcgctgacttcgcacctgcgcgtccacaccggcgagaaaccctatggctgcgccgactgtggccgccgcttcagccagagctctgccctctaccagcaccggcgcgtgcacagcggcgagacccccttcccctgcccggactgtggccgcgccttcgcctacccctcggacctgcggcgccacgtgcgcacccacaccggcgagaagccctacccgtgcccggactgcgggcgctgcttccgccagagctcggagatggcagcccacaggcgcacccacagcggcgagaagccctacccctgcccgcagtgcggccgccgctttggccagaagtcagccgtggccaaacaccagtgggttcatcggcccggggccgggggccacaggggccgggtcgccgggcgtctgtctgtgaccctgacccctggccacggagacctggacccgcccgtgggcttccagctgtacccggagatattccaggagtgtggg

SEQ ID NO: 5384 - DNA, 1224 bp, Homo sapiens
  source 1..1224: mol_type = genomic DNA
atggcgccgcctctggccccgctccctccccgggacccaaacggggccggacccgagtggagggagccgggggctgtgagcttcgcggacgtggccgtgtacttctgccgggaggagtggggctgcttgcggccagcgcagagggccctgtaccgggacgtgatgcgggagacctacggccacctgagcgctctcggaatcggaggcaacaagccagctctcatctcctgggtggaggaggaggccgaactgtggggtccggctgcccaggatccggaggtggcgaaatgtcagacacaaacggacccagcagattccagaaacaagaaaaaggaaagacaaagggaagggacgggagccctggagaagcccgaccctgtggccgccgggtctcctgggctgaagtctccccaagccccctcggccgggcccccttatggttgggagcagctgtccaaggcaccgcaccggggacgcccctccctctgtgcccacccccctgtcccccgagctgaccagcgtcatggctgctacgtgtgcgggaagagctttgcctggcgctccacactggtggagcacgtctacagtcacactggcgagaagcccttccactgcactgactgcggcaagggcttcggccacgcttcctccctgagcaaacaccgggccatccatcgtggggagcggccccaccgctgtctggagtgtggccgggccttcacgcagcgctcggcgctgacttcgcacctgcgcgtccacaccggcgagaaaccctatggctgcgccgactgtggccgccgcttcagccagagctctgccctctaccagcaccggcgcgtgcacagcggcgagacccccttcccctgcccggactgtggccgcgccttcgcctacccctcggacctgcggcgccacgtgcgcacccacaccggcgagaagccctacccgtgcccggactgcgggcgctgcttccgccagagctcggagatggcagcccacaggcgcacccacagcggcgagaagccctacccctgcccgcagtgcggccgccgctttggccagaagtcagccgtggccaaacaccagtgggttcatcggcccggggccgggggccacaggggccgggtcgccgggcgtctgtctgtgaccctgacccctggccacggagacctggacccgcccgtgggcttccagctgtacccggagatattccaggagtgtggg

SEQ ID NO: 5385 - DNA, 1404 bp, Homo sapiens
  source 1..1404: mol_type = genomic DNA
atggcgcaactgcggcgcggacacttgacattcagggacgtggccatagaattctctcaggaggagtggaaatgcctggaccctgtgcagaaggctttatacagggatgtgatgttggagaactacaggaacctggtctccctgggaatctgtcttcctgacctgagtattatctccatgatgaagcaaaggacagagccctggactgtggagaatgaaatgaaagtagcaaaaaatccagataggtgggaaggtatcaaagatatcaacacagggaggagctgtgcagtgagaagcaaagcaggaaacaagcctattacaaatcaacttggattaacctttcagttacctctgccagaactggagatatttcaaggtgaagggaagatttatgaatgtaatcaagttcaaaagttcatcagccacagttcttcagtttcgccacttcaaagaatttactctggggtcaaaacccacatatttaataaacataggaatgattttgttgattttccattgctgtcacaagaacagaaagcacacattaggagaaaaccttacgaatgtaatgagcagggcaaagtcttcagagtgtcttcaagccttcctaatcatcaagtaatccacactgcagataaacctaacagatgtcatgaatgtggtaaaaccgtcagggacaagtcaggcctcgcagaacattggagaattcgtacaggagagaaaccttacaaatgtaaagagtgtggcaagctcttcaatcgaattgcataccttgcacgacacgagaaagtgcatactggagagagtccttacaaatgtaatgagtgtggcaaggtcttcagtcgaattacataccttgtacgacatcagaaaattcatactagagagaaacctcataaatgtaacaaatgtggcaaggtttatagtagcagttcatacctagcacaacattggagaattcatacaggagagaaactttacaaatgtaataaatgtggcaaagaatttagtgggcattcaagcctcaccacccatctgttaatccacactggagagaaaccttacaaatgtaaagaatgtgacaaagcttttaggcacaagttctccctgacagttcatcagagaaatcataatggagagaaaccttataaatgtcatgaatgtggcaaagtcttcactcaagtttcacatcttgcacgacatcagaaaattcacactggagagaaaccttacaaatgtaatgagtgtggcaaagtcttcactcagaattcacaccttgcaaatcatcagagaatccacactggagagaaaccttacaaatgccatgtgtgtggtaaggtctttaggcacagttcatggtttgtacagcatcagagaagtgttcatgagagagtccttacaaac

SEQ ID NO: 5386 - DNA, 2238 bp, Homo sapiens
  source 1..2238: mol_type = genomic DNA
atggctttttctcagggtctattgacattcagggatgtggccatagaattctctcaggaggagtggaaatgcctggaccctgctcagaggactctatacagggacgtgatgctggagaattataggaacctggtctccctggatatctcttccaaatgcacgatgaaggagttcttgtcaacagcgcaaggcaacagagaagtgttccatgcagggacattgcaaatacatgaaagtcatcacaatggagatttttgctaccaggatgttgataaagatattcatgactatgaatttcaatggcaagaagatgaaagaaatggccatgaagcacccatgacaaaaatcaaaaagttgacaggtattacagaacgatatgatcaaagtcatgctagaaacaagcctattaaagatcagcttggatcaagctttcattcgcatctgcctgaaatgcacatatttcagaccgaagagaaaattgataatcaagttgtgaagtctgtccacgatgcttccttggtttcaacagcccaaagaatttcttgtaggcccaaaacccatatatctaataaccatgggaataatttctggaattcttcattactcacacaaaaacaggaagtacacatgagagaaaaatctttccaatgtaatgagagtggcaaagcctttaattacagctcactcttaaggaaacatcagataatccatttagcagacaaatataaatgtgatgtatgtggcaagctctttaatcagaagcgaaacctagcatgccatcgtagatgtcacactggtgagaatccttacaagtgtaatgagtgtggcaagaccttcagtcagacgtcatcccttacatgccatcgtagacttcatactggagagaaaccttacaaatgtgaagaatgtgacaaagctttccatttcaaatcaatacttgaaagacataggataattcatactgaagagaaaccatataagtgtaatgagtgtggcaagacctttaggcagaagtcaatccttacacgccatcatcgacttcatactggagagaaaccttacaagtgtaatgagtgtggcaagacctttagtcacaagtcatcccttacatgccatcatagacttcatactggagagaaaccctacaaatgtaatgagtgtggcaagacctttagtcacaagtcatcccttacatgccatcgtagacttcatactggagagaaaccttacaaatgtgaagaatgtgacaaagcttacagtttcagatcaaattttgaaatacatcggaaaattcatactgaagacaatgcttacaagtgtaatgagtgtggaaagacctttagccggacatcatcccttacatgccatcgtagacgtcatactggagagcaaccttacaaatgtgaagaatgtgacaaagctttccgtttcaaatcaaaccttgaaagacataggagaattcatactggagagaaaccatacaagtgtaatgagtgtggcaagacctttagtcggaagtcatacctcacatgccatcatagacttcatactggagagaaagcttacaagtgtaatgagtgcggcaagacctttagttggaagtcatcccttacctgccatcgtagacttcattctggagagaaaccttacaagtgtaaggagtgtggcaagaccttcaatcagcagttaacccttaaacgccatcgtagacttcatagtggagagaacccttacaaatgtgaagatagtgacaaagcttacagtttcaaatcaaaccttgaaatacatcagaaaattcatactgaagagaatccttacaagtgtaatgagtgtggcaagaccttcagtcggacgtcatcccttacatgccatcgtagacttcataccggagagaaaccttacaaatgtgaagaatgtgacaaagctttccgtgtgaaatcaaaccttgaaggacataggagaattcatactggagagaaaccttacaagtgtaatgagtgtggcaagacctttagtcggaagtcatattttatatgccatcatagacttcatactggagagaaaccttataagtgtaatgagtgtggcaagaactttagtcagaagtcatcccttatatgccaccatagacttcatactggagagaaaccttacaagtgtaatgagtgtggcaagacctttagtcagaagtcaaaccttacatgccatcgtagacttcatactggagaaaaacaagtg

SEQ ID NO: 5387 - DNA, 210 bp, Homo sapiens
  source 1..210: mol_type = genomic DNA
atggctttttctcagggtctattgacattcagggatgtggccatagaattctctcaggaggagtggaaatgcctggaccctgctcagaggactctatacagggacgtgatgctggagaattataggaacctggtctccctggggtcttgctgtgttgttgaaattcatcttgatctcctgagctcaagagatcctcctcagtctcccaag

SEQ ID NO: 5388 - DNA, 1191 bp, Homo sapiens
  source 1..1191: mol_type = genomic DNA
atgatgtttcaggaccctgtggcctgtgaggatgttgctgtgaacttcacccaggaggagtgggctttgctggatatttcgcagaggaaactctacagggaagtgatgctggaaactttcaggaacctgacctctatagggaaaaagtggaaagaccagaacattgaatatgagtaccaaaaccccaggagaaacttcaggagtctcatagaagggaatgtcaatgaaattaaagaagacagtcattgtggagaaacttttacccaggttccagatgacaggctgaacttccaggagaagaaagcttctcctgaagcaaaatcatgtgataactttgtatgtggagaagttggcataggtaactcatcttttaatatgaacatcagaggtgacattgggcacaaggcatacgagtatcaggactatgcaccaaagccatataagtgtcaacaacctaagaaagccttcagatatcacccctcctttagaacacaagaaaggaatcacaccggagagaaaccctatgcttgtaaagaatgtggaaaaacctttatttcccattcaggcattcgaagacgcatggtaatgcacagtggggatggaccttataaatgtaagttttgtgggaaagctgtccattgtctcagattatatcttatccatgaaagaactcacactggagagaaaccgtatgaatgtaaacaatgtgttaaatcctttagttattctgctacccatcgaatacatgaaagaactcacactggagaaaagccttatgaatgtcagcaatgtgggaaagcattccatagttccagttcttttcaagcacataaaagaacccacactgggggaaagccatatgaatgtaaacaatgtggcaaatccttcagttggtgtcattcctttcaaatacatgaaagaactcacactggggagaagccctgtgaatgtagcaaatgtaataaagcattccgtagttacagatcctatcttagacataaaaggagtcacacgggagagaagccttatcaatgtaaggaatgtagaaaagcattcacgtatcccagttcccttcgtagacatgaaaggacccactctgcgaaaaaaccttatgaatgtaagcagtgtgggaaagcattatcttataagttttcaaacacacctaagaatgcgctctggagaaagacctta

SEQ ID NO: 5389 - DNA, 2253 bp, Homo sapiens
  source 1..2253: mol_type = genomic DNA
atggaagatctgtcctctccagactccacccttctccaagggggacataatctactctcatcagccagttttcaggaagcggtgactttcaaggatgtgatagtggactttacccaggaagaatggaaacagctggaccctggccagagagatttgttcagggatgtgacattggaaaattatacacacctggtctctataggactccaagtttctaaacctgatgtgatttcccagttagagcaagggacagagccatggatcatggagccaagcattccagtaggtacctgtgcagactgggagacaagacttgaaaatagtgtgtcagccccagagcctgacatttctgaagaagagctatctccagaggtaatagtggaaaaacacaaaagagatgattcttggagttccaacttgctagaaagttgggaatatgaaggcagtttagagagacagcaggcaaaccaacagacactgccaaaggaaataaaggtaaccgaaaagacaatacccagttgggaaaaaggccctgtaaataatgaatttgggaaaagtgtcaatgtgagttcaaaccttgtaacacaagaaccatctccagaagagacctctactaaaagaagcatcaaacagaattcaaacccagttaaaaaagagaaatcttgtaagtgcaatgaatgtgggaaagcctttagttattgttcagctcttattcgccatcagagaacacatactggagaaaaaccctacaaatgtaatgaatgtgaaaaagccttcagccggagtgaaaaccttataaaccatcaaagaattcatactggagataaaccatataaatgtgatcagtgtggaaaaggcttcattgagggtccatctcttactcaacatcaaagaattcatactggagaaaaaccatataaatgtgatgaatgtgggaaagcctttagtcagaggacccatcttgttcagcatcagagaattcatactggcgagaagccatacacttgtaatgagtgtggaaaagcctttagccagagaggccactttatggaacatcagaaaattcatacgggagaaaaaccttttaaatgtgatgaatgtgataaaaccttcaccaggagcacacaccttactcaacatcaaaaaattcatactggagaaaaaacctataaatgtaatgaatgtggaaaggccttcaacgggccctcaacttttatccgtcatcatatgattcatactggtgaaaaaccgtacgaatgcaatgaatgtgggaaagccttcagccagcactcaaacctcactcagcatcaaaaaactcatactggggagaaaccctatgattgtgcagaatgtggaaaatcttttagttactggtcatcccttgctcaacacctgaaaattcatactggagaaaaaccttacaaatgcaatgaatgtggaaaggccttcagttactgctcatcccttactcaacatcggagaattcacacgagagaaaagccctttgaatgcagtgaatgtggaaaggctttcagttatctctcaaaccttaatcagcatcagaaaactcatactcaagagaaagcttatgaatgtaaagaatgtgggaaagcttttattcggagttcatctcttgctaagcatgaaagaattcatactggagagaaaccctatcagtgtcatgaatgtgggaaaaccttcagttatggttcatcccttattcagcataggaagatccatactggagaacgaccttacaagtgtaatgagtgtgggagagcattcaaccagaacatacaccttacacagcataagagaattcatacaggagccaagccttatgagtgtgctgagtgtggtaaagcctttcgacattgttcatctcttgctcaacatcaaaaaactcacacagaagaaaaaccctaccagtgtaataaatgtgaaaagacctttagccagagctcccatctaactcagcatcaacgaattcacactggggagaagccctataagtgcaatgaatgtgacaaagcctttagccggagcactcatctgactgaacatcagaatactcatactggagagaaaccttataactgtaatgaatgcagaaagacttttagccagagcacatatctcattcagcaccagagaattcattcaggagagaagccttttggatgtaatgattgtggaaaatccttcagatatcgctctgctctcaacaaacatcagagactgcatcctggcata

SEQ ID NO: 5390 - DNA, 1710 bp, Homo sapiens
  source 1..1710: mol_type = genomic DNA
atgcctcaggtgacatttaatgatgtggctatagacttcactcatgaagagtggggatggctcagttctgctcagagggacttatacaaggatgtgatggtccagaattatgagaacctggtctctgtaggtctttctgtaactaagccatatgtgatcacgttattggaggatggaaaagagccctggatgatggagaaaaaactgtcaaaaggtatgattccagattgggaatcaagatgggaaaacaaggaattatcaacaaagaaggataattatgatgaagattcaccccaaacagtaataatagaaaaagttgtaaaacaaagttatgaattttcaaattctaagaagaatttggaatatatagagaagttggaagggaagcatggaagtcaggtagaccatttcagaccagcaattctcacctctagagaaagccccactgcagacagtgtttacaaatacaatatatttagaagcacctttcattcaaagtctactctttctgaaccacaaaaaatttctgctgaagggaattcacacaaatatgatatattaaagaagaacttaccaaaaaagtcagttataaaaaatgagaaagtcaatggtggaaagaaacttttgaattctaataaaagtggggcagccttcagccagggcaaatctcttacccttccccagacttgtaatagagagaaaatctatacatgcagtgaatgtgggaaagcctttggcaaacagtcaatcctcaatcgccactggagaattcatacaggagagaagccctatgaatgtcgtgaatgtgggaagacttttagccatggctcatcccttacacgacatctgataagccatagtggagagaaaccttacaaatgtattgaatgtgggaaggcctttagccatgtctcatcacttactaaccatcagagcactcacactggagagaaaccatatgaatgtatgaactgtggaaagtcttttagtcgtgtgtcccatcttattgaacatctaagaattcatactcaagaaaaactctatgagtgtcgtatatgtggaaaggccttcattcataggtcatctctcattcaccatcagaaaatccatactggagagaagccttatgaatgtagagaatgtgggaaagctttctgctgtagctcacaccttactcgacatcaaagaattcacactatggagaaacaatatgaatgcaacaaatgtctgaaagtctttagtagcctctcatttcttgttcagcatcagagtattcatactgaagaaaaaccctttgaatgtcagaaatgcaggaaatccttcaaccagcttgaatcactgaatatgcatttgagaaatcacattagattgaaaccctacgaatgcagtatatgtgggaaagcctttagtcataggtcatccctgcttcaacatcacagaattcatactggagagaaaccttatgaatgtattaaatgtgggaagaccttcagctgtagttcaaaccttaccgtacatcagagaattcacactggagaaaagccatataaatgtaatgagtgtgggaaagcttttagcaaaggctcaaatcttactgcccatcaaagagtacataatggagagaaacccaatagtgtggtaagtgtggaaaagcctttagactatatgaatcactatacatgtgagaaatcttacagaagagaaactgta

SEQ ID NO: 5391 - DNA, 2001 bp, Homo sapiens
  source 1..2001: mol_type = genomic DNA
atgcgcgcatgcgcagggtctacgcgggaagctggaagcggtgctcaggacctcagcaccctgctgtgcctggaggagagcatggaagagcaggatgagaagcccccagagcccccgaaggtctgtgcacaggaaggagtgaacttcaaaattgtgactgtggacttcacacgggaggaacagggtacttgcaaccctgctcagaggaccctggacagagatgtgatcctggagaaccacagggacctagtctcttgggacttggcaactgcagttggaaaaaaagattcaacttcaaagcagaggatttttgatgaagaaccagctaatggagtgaagatagaaaggtttacaagggatgatccttggttatcttcatgtgaagaagtggatgattgtaaagaccagttggagaagcaacaggaaaaacaagagatacttttgcaggaagtggcattcactcaaaggaaagcagttattcatgagagagtctgcaaaagtgatgaaactggggagaagagtggtctgaattccagtctattttcatccccagttatacccataagaaaccattttcataaacatgtatcacatgctaaaaaatggcatcttaatgctgctgtaaacagtcatcagaagattaatgagaatgagacactatatgaaaataatgaatgtggaaaaccccctcagagcattcaccttattcagtttacaagaactcaaacaaaagataaatcctatggatttagtgaccgtattcaatctttttgccatggtacacccctacatatacatgaaaaaattcatggaggaggaaaaacctttgattttaaagaatgtgggcaggttttgaaccccaaaatatcccataatgaacaacagagaattccttttgaagagagtcaatataaatgtagtgaaacctctcatagttcctcccttactcaaaacatgagaaataattctgaagagaaaccttttgaatgtaatcagtgtgggaaatccttcagctggagctcgcatcttgttgcacatcagagaactcacacaggggagaaaccttatgaatgtagtgaatgtggaaaatccttcagccggagctcgcaccttgtttcccatcagagaactcatactggagagaaaccttacaggtgtaatcaatgtgggaaatcctttagccagagttatgtccttgttgtgcatcaaagaactcatactggggagaagccttatgaatgcaatcagtgtggaaagtcattcaggcagagctataaacttattgcacatcaaagaacacataccggagagaagccctatgaatgtaatcaatgtgggaaatcatttatccagagctataaacttattgcacatcaaagaattcatactggggaaaaaccctatgaatgcaatcagtgtgggaaatcctttagtcaaagttataaacttgttgctcatcagagaactcacacaggagaaaaaccctttgaatgtaatcagtgtgggaaatccttcagctggagctctcagcttgttgcacatcaaagaactcacactggagagaaaccgtatgaatgtagtgaatgtggaaaatcttttaaccgcagttctcaccttgttatgcatcagagaattcacactggggaaaaaccgtatgaatgtaatcagtgtgggaaatccttcagccagagttatgttcttgttgtacatcagagaactcatactggagaaaagccctatgaatgcagtcaatgtgggaagtccttcagacagagttcatgccttactcaacatcagagaactcatactggagagaaaccatttgaatgtaatcagtgtggaaaaacatttagcttgagtgctcgacttattgtgcatcaaagaactcatactggagagaaaccctttacatgtattcagtgtggaaaagctttcattaatagctataaacttattaggcatcaggcaactcatactgaagagaaactctatgaatgtaac

SEQ ID NO: 5392 - DNA, 2076 bp, Homo sapiens
  source 1..2076: mol_type = genomic DNA
atgcgcgcatgcgcagggtctacgcgggaagctggaagcggtgctcaggacctcagcaccctgctgtgcctggaggagagcatggaagagcaggatgagaagcccccagagcccccgaaggtctgtgcacaggattctttccttcctcaagagattatcatcaaagtcgagggagaagacactgggtctctgaccatcccatctcaggaaggagtgaacttcaaaattgtgactgtggacttcacacgggaggaacagggtacttgcaaccctgctcagaggaccctggacagagatgtgatcctggagaaccacagggacctagtctcttgggacttggcaactgcagttggaaaaaaagattcaacttcaaagcagaggatttttgatgaagaaccagctaatggagtgaagatagaaaggtttacaagggatgatccttggttatcttcatgtgaagaagtggatgattgtaaagaccagttggagaagcaacaggaaaaacaagagatacttttgcaggaagtggcattcactcaaaggaaagcagttattcatgagagagtctgcaaaagtgatgaaactggggagaagagtggtctgaattccagtctattttcatccccagttatacccataagaaaccattttcataaacatgtatcacatgctaaaaaatggcatcttaatgctgctgtaaacagtcatcagaagattaatgagaatgagacactatatgaaaataatgaatgtggaaaaccccctcagagcattcaccttattcagtttacaagaactcaaacaaaagataaatcctatggatttagtgaccgtattcaatctttttgccatggtacacccctacatatacatgaaaaaattcatggaggaggaaaaacctttgattttaaagaatgtgggcaggttttgaaccccaaaatatcccataatgaacaacagagaattccttttgaagagagtcaatataaatgtagtgaaacctctcatagttcctcccttactcaaaacatgagaaataattctgaagagaaaccttttgaatgtaatcagtgtgggaaatccttcagctggagctcgcatcttgttgcacatcagagaactcacacaggggagaaaccttatgaatgtagtgaatgtggaaaatccttcagccggagctcgcaccttgtttcccatcagagaactcatactggagagaaaccttacaggtgtaatcaatgtgggaaatcctttagccagagttatgtccttgttgtgcatcaaagaactcatactggggagaagccttatgaatgcaatcagtgtggaaagtcattcaggcagagctataaacttattgcacatcaaagaacacataccggagagaagccctatgaatgtaatcaatgtgggaaatcatttatccagagctataaacttattgcacatcaaagaattcatactggggaaaaaccctatgaatgcaatcagtgtgggaaatcctttagtcaaagttataaacttgttgctcatcagagaactcacacaggagaaaaaccctttgaatgtaatcagtgtgggaaatccttcagctggagctctcagcttgttgcacatcaaagaactcacactggagagaaaccgtatgaatgtagtgaatgtggaaaatcttttaaccgcagttctcaccttgttatgcatcagagaattcacactggggaaaaaccgtatgaatgtaatcagtgtgggaaatccttcagccagagttatgttcttgttgtacatcagagaactcatactggagaaaagccctatgaatgcagtcaatgtgggaagtccttcagacagagttcatgccttactcaacatcagagaactcatactggagagaaaccatttgaatgtaatcagtgtggaaaaacatttagcttgagtgctcgacttattgtgcatcaaagaactcatactggagagaaaccctttacatgtattcagtgtggaaaagctttcattaatagctataaacttattaggcatcaggcaactcatactgaagagaaactctatgaatgtaac

SEQ ID NO: 5393 - DNA, 1995 bp, Homo sapiens
  source 1..1995: mol_type = genomic DNA
atggaagagcaggatgagaagcccccagagcccccgaaggtctgtgcacaggattctttccttcctcaagagattatcatcaaagtcgagggagaagacactgggtctctgaccatcccatctcaggaaggagtgaacttcaaaattgtgactgtggacttcacacgggaggaacagggtacttgcaaccctgctcagaggaccctggacagagatgtgatcctggagaaccacagggacctagtctcttgggacttggcaactgcagttggaaaaaaagattcaacttcaaagcagaggatttttgatgaagaaccagctaatggagtgaagatagaaaggtttacaagggatgatccttggttatcttcatgtgaagaagtggatgattgtaaagaccagttggagaagcaacaggaaaaacaagagatacttttgcaggaagtggcattcactcaaaggaaagcagttattcatgagagagtctgcaaaagtgatgaaactggggagaagagtggtctgaattccagtctattttcatccccagttatacccataagaaaccattttcataaacatgtatcacatgctaaaaaatggcatcttaatgctgctgtaaacagtcatcagaagattaatgagaatgagacactatatgaaaataatgaatgtggaaaaccccctcagagcattcaccttattcagtttacaagaactcaaacaaaagataaatcctatggatttagtgaccgtattcaatctttttgccatggtacacccctacatatacatgaaaaaattcatggaggaggaaaaacctttgattttaaagaatgtgggcaggttttgaaccccaaaatatcccataatgaacaacagagaattccttttgaagagagtcaatataaatgtagtgaaacctctcatagttcctcccttactcaaaacatgagaaataattctgaagagaaaccttttgaatgtaatcagtgtgggaaatccttcagctggagctcgcatcttgttgcacatcagagaactcacacaggggagaaaccttatgaatgtagtgaatgtggaaaatccttcagccggagctcgcaccttgtttcccatcagagaactcatactggagagaaaccttacaggtgtaatcaatgtgggaaatcctttagccagagttatgtccttgttgtgcatcaaagaactcatactggggagaagccttatgaatgcaatcagtgtggaaagtcattcaggcagagctataaacttattgcacatcaaagaacacataccggagagaagccctatgaatgtaatcaatgtgggaaatcatttatccagagctataaacttattgcacatcaaagaattcatactggggaaaaaccctatgaatgcaatcagtgtgggaaatcctttagtcaaagttataaacttgttgctcatcagagaactcacacaggagaaaaaccctttgaatgtaatcagtgtgggaaatccttcagctggagctctcagcttgttgcacatcaaagaactcacactggagagaaaccgtatgaatgtagtgaatgtggaaaatcttttaaccgcagttctcaccttgttatgcatcagagaattcacactggggaaaaaccgtatgaatgtaatcagtgtgggaaatccttcagccagagttatgttcttgttgtacatcagagaactcatactggagaaaagccctatgaatgcagtcaatgtgggaagtccttcagacagagttcatgccttactcaacatcagagaactcatactggagagaaaccatttgaatgtaatcagtgtggaaaaacatttagcttgagtgctcgacttattgtgcatcaaagaactcatactggagagaaaccctttacatgtattcagtgtggaaaagctttcattaatagctataaacttattaggcatcaggcaactcatactgaagagaaactctatgaatgtaac

SEQ ID NO: 5394 - DNA, 1860 bp, Homo sapiens
  source 1..1860: mol_type = genomic DNA
atggccaaaccccaggggctagtgacatttgaagatgtagctgtggatttcacccaggaggagtggcagtacctgaacccaccacagaggaccctgtacagagacgtgatgctggagacctacagcaacttggtctttgtggggcagcaggttaccaaaccaaacctcatcctcaagttggaggtagaagaatgcccggcagaaggaaaaatcccattttggaactttccagaagtctgtcaagttgatgaacagattgagaggcaacatcaggatgaccaagataaatgtctgctgatgcaagttggattttctgacaagaaaacaattatcaccaagagtgctcgtgactgtcatgagtttggaaacatacttcatctgagtacaaaccttgttgcttcaatacaaagacccgataaacacgaatcatttggaaataatatggtagataatttagacttatttagtagaagttctgcagaaaataaatatgataatggatgtgcaaaattgttcttccatactgagtatgagaaaacaaatcctggaatgaagccctatggctataaagagtgtgggaaaggtcttaggcgaaagaaaggccttagtctacatcagagaattaaaaatggagagaaaccctttgaatgtactgcatgtaggaaaaccttcagcaagaagtcacacctcattgtacattggagaactcatacgggagagaaaccttttggatgtaccgaatgtggaaaagcttttagccaaaaatctcagctcattatacacttgcgaactcatacaggagagagaccctttgagtgtcctgaatgtggaaaagccttcagagaaaagtcaactgtcatcatacattacaggactcacacaggagaaaaaccttatgaatgtaatgaatgtggaaaagccttcactcagaagtccaacctcattgtccatcagaaaacccacactggagagaaaacctatgaatgcactaaatgtggagaatctttcatacagaagcttgatctaattatacatcatagtacccatacaggaaagaaaccccatgaatgtaatgagtgtaagaaaactttcagtgataagtcaactctcattatacaccagagaactcatacgggagagaaacctcataaatgtactgaatgtgggaagtctttcaatgagaagtcaaccctcattgtgcatcaaagaactcatacaggagagaaaccctatgaatgtgatgtgtgtggaaaaaccttcacgcaaaagtcaaaccttggtgtacatcagagaactcattcaggagagaaaccctttgaatgtaatgaatgtgagaaagccttctctcagaagtcctacctcatgctgcatcagagaggtcatacaggagagaaaccttacgagtgcaatgaatgtgaaaaagcattttcacagaaatcatatctcattatacatcaaagaactcatacagaagaaaaaccctataaatgtaatgaatgtggcaaagccttcagagaaaagtcaaagctcattatacatcagagaattcatacaggagagaaaccttatgaatgtcctgtgtgttggaaagcttttagccagaagtcacagctcataatacatcagagaacgcacacgggagagaaaccctatgcatgcactgagtgtggcaaagccttccgagaaaagtcaacattcactgtacatcaaagaactcatactggagagaaaccctataaatgtacagaatgtgggaaagcctttacccaaaaatcaaaccttattgtacatcagcgaacccatgcaggaaagaaagcccatggaagaggccacactcggaagtcaaagttcatggcacat

SEQ ID NO: 5395 - DNA, 1917 bp, Homo sapiens
  source 1..1917: mol_type = genomic DNA
atgacaccagcatctgcatctggtgaggactcaggaagcttctactcatggcagaaggcaaagagggaacaggggctagtgacatttgaagatgtagctgtggatttcacccaggaggagtggcagtacctgaacccaccacagaggaccctgtacagagacgtgatgctggagacctacagcaacttggtctttgtggggcagcaggttaccaaaccaaacctcatcctcaagttggaggtagaagaatgcccggcagaaggaaaaatcccattttggaactttccagaagtctgtcaagttgatgaacagattgagaggcaacatcaggatgaccaagataaatgtctgctgatgcaagttggattttctgacaagaaaacaattatcaccaagagtgctcgtgactgtcatgagtttggaaacatacttcatctgagtacaaaccttgttgcttcaatacaaagacccgataaacacgaatcatttggaaataatatggtagataatttagacttatttagtagaagttctgcagaaaataaatatgataatggatgtgcaaaattgttcttccatactgagtatgagaaaacaaatcctggaatgaagccctatggctataaagagtgtgggaaaggtcttaggcgaaagaaaggccttagtctacatcagagaattaaaaatggagagaaaccctttgaatgtactgcatgtaggaaaaccttcagcaagaagtcacacctcattgtacattggagaactcatacgggagagaaaccttttggatgtaccgaatgtggaaaagcttttagccaaaaatctcagctcattatacacttgcgaactcatacaggagagagaccctttgagtgtcctgaatgtggaaaagccttcagagaaaagtcaactgtcatcatacattacaggactcacacaggagaaaaaccttatgaatgtaatgaatgtggaaaagccttcactcagaagtccaacctcattgtccatcagaaaacccacactggagagaaaacctatgaatgcactaaatgtggagaatctttcatacagaagcttgatctaattatacatcatagtacccatacaggaaagaaaccccatgaatgtaatgagtgtaagaaaactttcagtgataagtcaactctcattatacaccagagaactcatacgggagagaaacctcataaatgtactgaatgtgggaagtctttcaatgagaagtcaaccctcattgtgcatcaaagaactcatacaggagagaaaccctatgaatgtgatgtgtgtggaaaaaccttcacgcaaaagtcaaaccttggtgtacatcagagaactcattcaggagagaaaccctttgaatgtaatgaatgtgagaaagccttctctcagaagtcctacctcatgctgcatcagagaggtcatacaggagagaaaccttacgagtgcaatgaatgtgaaaaagcattttcacagaaatcatatctcattatacatcaaagaactcatacagaagaaaaaccctataaatgtaatgaatgtggcaaagccttcagagaaaagtcaaagctcattatacatcagagaattcatacaggagagaaaccttatgaatgtcctgtgtgttggaaagcttttagccagaagtcacagctcataatacatcagagaacgcacacgggagagaaaccctatgcatgcactgagtgtggcaaagccttccgagaaaagtcaacattcactgtacatcaaagaactcatactggagagaaaccctataaatgtacagaatgtgggaaagcctttacccaaaaatcaaaccttattgtacatcagcgaacccatgcaggaaagaaagcccatggaagaggccacactcggaagtcaaagttcatggcacat

SEQ ID NO: 5396 - DNA, 255 bp, Homo sapiens
  source 1..255: mol_type = genomic DNA
atggcttccccgagccccccgccggagtcgaaggaggagtgggattatctggacccagctcagagaagcctgtataaagatgtcatgatggagaattatggaaacctggtctcactgggtctcactctattgcctaggctggtgtgcagcgacgcaaacacagcttgctgcagcctcaacctgttgggcttaagtgatcaatcctcccacctcagctacctgagtagctgggactacagatgttttgaacagaga

SEQ ID NO: 5397 - DNA, 1752 bp, Homo sapiens
  source 1..1752: mol_type = genomic DNA
atgatggagaattatggaaacctggtctcactggatgttttgaacagagataaggatgaggagccaactgtaaaacaagagattgaagaaattgaggaagaagtggaaccacagggtgtaatagttacaagaatcaaaagtgaaattgaccaggatcctatgggtagagaaacatttgaacttgttggtaggttagataaacaaagagggatcttcctatgggaaataccaagggaatctttgacccaggaacagagaatgttcagagaaaacactaacattatccgtaaaagaccaaactcagaagagaaatgccataaatgtgaagaatgtggaaagggttttgtccgcaaggcccatttcattcaacatcaaagggtccatactggtgagaaaccttttcagtgcaatgaatgtgggaaaagttttagtcgcagttcatttgttattgaacatcagagaattcacactggggaaaggccctatgagtgtaattactgtggaaaaacctttagtgtgagctcaacccttattagacatcagagaatccacactggagaaagaccctatcagtgtaatcagtgtaaacagagcttcagccagagaaggagccttgttaaacatcaaaggattcatacaggtgagaaaccccataaatgtagtgactgtgggaaagccttcagttggaaatcacaccttattgagcatcaaagaactcacactggtgagaaaccttatcactgtaccaaatgtaagaagagctttagtcgaaattcattgcttgttgagcatcaaagaattcacactggggaaagaccccataaatgtggtgaatgtgggaaagcctttcgattaagcacataccttatacaacaccaaaaaattcacactggcgagaagccttttctttgtattgagtgtggaaaaagtttcagtcggagctcattccttattgaacatcagaggatccatactggtgaaagaccttatcagtgcaaagagtgtgggaaaagtttcagtcagctttgcaaccttactcgtcatcagagaattcacacaggagacaagccccataaatgtgaggaatgtggaaaagcctttagtagaagctcaggtcttattcagcatcagagaattcacaccagggagaagacttatccatacaatgaaactaaggaaagttttgatccaaattgcagtcttgttatacagcaggaagtctaccctaaggagaaatcttataaatgtgatgaatgtgggaaaacttttagtgttagtgctcatcttgtacaacatcaaagaatccacactggtgaaaagccctatctatgtactgtctgtgggaaaagcttcagccggagctcatttcttattgaacatcagagaatccacactggtgagagaccctatctgtgcagacagtgtggaaaaagctttagtcagctttgtaatcttattcgacatcagggtgttcacacaggtaataaaccccataaatgtgatgaatgtggaaaggcctttagccggaactcgggtcttattcagcatcagagaatacacacaggagagaaaccttataagtgtgagaagtgcgacaaaagtttcagtcaacagcgcagtcttgtcaaccatcagaagatccatgcagaggtgaaaacccaagaaacccatgaatgtgacgcttgtggtgaagcctttaattgccgtatttctcttattcagcatcagaaattgcacacagcatggatgcaa

SEQ ID NO: 5398 - DNA, 1878 bp, Homo sapiens
  source 1..1878: mol_type = genomic DNA
atggcttccccgagccccccgccggagtcgaaggggttgctgacatttgaggatgtggctgtgttttttacccaggaggagtgggattatctggacccagctcagagaagcctgtataaagatgtcatgatggagaattatggaaacctggtctcactggatgttttgaacagagataaggatgaggagccaactgtaaaacaagagattgaagaaattgaggaagaagtggaaccacagggtgtaatagttacaagaatcaaaagtgaaattgaccaggatcctatgggtagagaaacatttgaacttgttggtaggttagataaacaaagagggatcttcctatgggaaataccaagggaatctttgacccaggaacagagaatgttcagagaaaacactaacattatccgtaaaagaccaaactcagaagagaaatgccataaatgtgaagaatgtggaaagggttttgtccgcaaggcccatttcattcaacatcaaagggtccatactggtgagaaaccttttcagtgcaatgaatgtgggaaaagttttagtcgcagttcatttgttattgaacatcagagaattcacactggggaaaggccctatgagtgtaattactgtggaaaaacctttagtgtgagctcaacccttattagacatcagagaatccacactggagaaagaccctatcagtgtaatcagtgtaaacagagcttcagccagagaaggagccttgttaaacatcaaaggattcatacaggtgagaaaccccataaatgtagtgactgtgggaaagccttcagttggaaatcacaccttattgagcatcaaagaactcacactggtgagaaaccttatcactgtaccaaatgtaagaagagctttagtcgaaattcattgcttgttgagcatcaaagaattcacactggggaaagaccccataaatgtggtgaatgtgggaaagcctttcgattaagcacataccttatacaacaccaaaaaattcacactggcgagaagccttttctttgtattgagtgtggaaaaagtttcagtcggagctcattccttattgaacatcagaggatccatactggtgaaagaccttatcagtgcaaagagtgtgggaaaagtttcagtcagctttgcaaccttactcgtcatcagagaattcacacaggagacaagccccataaatgtgaggaatgtggaaaagcctttagtagaagctcaggtcttattcagcatcagagaattcacaccagggagaagacttatccatacaatgaaactaaggaaagttttgatccaaattgcagtcttgttatacagcaggaagtctaccctaaggagaaatcttataaatgtgatgaatgtgggaaaacttttagtgttagtgctcatcttgtacaacatcaaagaatccacactggtgaaaagccctatctatgtactgtctgtgggaaaagcttcagccggagctcatttcttattgaacatcagagaatccacactggtgagagaccctatctgtgcagacagtgtggaaaaagctttagtcagctttgtaatcttattcgacatcagggtgttcacacaggtaataaaccccataaatgtgatgaatgtggaaaggcctttagccggaactcgggtcttattcagcatcagagaatacacacaggagagaaaccttataagtgtgagaagtgcgacaaaagtttcagtcaacagcgcagtcttgtcaaccatcagaagatccatgcagaggtgaaaacccaagaaacccatgaatgtgacgcttgtggtgaagcctttaattgccgtatttctcttattcagcatcagaaattgcacacagcatggatgcaa

SEQ ID NO: 5399 - DNA, 792 bp, Homo sapiens
  source 1..792: mol_type = genomic DNA
atgcccgattccgcgcccgccatggccgacaaaatggacatgtctctggacgacatcattaaactgaaccggagccagcgaggcggccggggcgggggccggggccgcggccgggccggctcccagggcggccgcggcggtggggcgcaggccgccgcgcgagtgaatcgaggcggcgggcccatccggaaccggccggccatcgcccgcggcgcggccggcggaggcggcaggaaccgaccggcgccctacagcaggccaaaacaacttcccgacaagtggcagcacgatcttttcgacagtggcttcggcggtggtgccggcgtggagacaggtgggaaactgctggtgtccaatctggattttggagtctcagacgccgatattcaggaactctttgctgaatttggaacgctgaagaaggcggctgtgcactatgatcgctctggtcgcagcttaggaacagcagacgtgcactttgagcggaaggcagatgccctgaaggccatgaagcagtacaacggcgtccctctggatggccgccccatgaacattcagcttgtcacgtcacagattgacgcacagcggaggcctgcacagagcgtaaacagaggtggcatgactagaaaccgtggcgctggaggttttggtggtggtggaggcacccggagaggcacccgcggaggcgcccgtggaagaggcagaggtgccggcaggaattcaaagcagcagctttcggcagaggagctggatgcccagctggacgcctataatgcgagaatggacaccagt

SEQ ID NO: 5400 - DNA, 1368 bp, Homo sapiens
  source 1..1368: mol_type = genomic DNA
atgaacaagttccagggacccgtgacattaaaggatgttattgtggaattcaccaaggaagaatggaagttactgacccctgctcagaggactctgtataaggatgtgatgctggaaaactatagtcaccttgtctcagtgggttaccatgtgaataagccaaatgcagtcttcaagttgaagcaaggaaaagagccatggatattagaagtagaatttccacatcggggcttccctgaagacctatggagcattcatgatctagaagcaagataccaggaaagccaagctggaaattcaaggaatggagaactcacaaaacatcagaaaactcataccacagagaaagcctgtgaatgtaaggaatgtgggaagttcttctgccagaagtctgccctcatagtacatcagcatactcactcaaagggcaaatcctatgactgtgataaatgtgggaaatctttctctaaaaatgaagacctcataagacatcagaaaattcacacgagagataaaacctatgagtgtaaagaatgtaagaaaatattttaccacctatcatctctcagtagacatctgagaacccatgcaggagagaaaccctatgaatgtaatcagtgtgaaaaatccttctaccagaaaccacatctcacagaacatcagaaaacacacacaggggagaaaccttttgaatgtactgaatgtgggaagttcttctatgtgaaggcatacctcatggtacatcagaaaacacacacaggggagaaaccctatgagtgtaaggagtgtgggaaagccttttcccagaagtcacacctcacagtacatcagagaatgcacacaggggagaaaccctataaatgtaaggaatgtgggaaattcttctctaggaattcacacctcaaaactcatcagagaagtcacacaggagagaaaccctatgaatgtaaggaatgtaggaaatgcttctaccagaagtcagccctcacagtacatcagcgaactcacacaggggagaaaccctttgaatgtaataaatgtgggaaaacattttactataaatcagacctcactaaacatcagagaaaacacacaggggagaagccctatgaatgcacagaatgtggcaaatcttttgctgtgaattcagtcctcagattacatcaaaggactcacacaggagagaagccctatgcatgcaaggaatgtgggaagtccttttctcagaagtcacattttattatacatcagagaaaacacacaggggagaagccctatgagtgtcaggagtgtggggaaacctttatccagaagtcacaactcactgcacatcagaagacacacacaaagaagaggaatgctgagaag

SEQ ID NO: 5401 - DNA, 1104 bp, Homo sapiens
  source 1..1104: mol_type = genomic DNA
atgtctgcacagtcagtggaagaagattcaatacttatcatcccaactccagatgaagaggaaaaaattctgagagtgaagttggaggaggatcctgatggcgaagagggatcaagtatcccctggaaccatctcccagacccagagattttccgacagcgattcaggcagtttggataccaggattcacctgggccccgtgaggctgtgagccagctccgagaactttgccgtctgtggctcaggccagagacgcacacaaaagaacaaatcttggagctggtagtgctggagcagtttgttgccatcctacccaaagagctacagacttgggttcgagatcatcatccagagaatggagaggaggcagtgacagtgctggaggatttggagagtgaacttgatgaccctggacaaccggtttctctccgtcgacgaaaacgggaagtactagtagaagacatggtatctcaagaagaagctcagggattaccaagttctgagcttgatgctgtggagaaccagctcaagtgggcatcctgggagctccattccctaaggcactgtgatgatgatggtaggactgaaaatggagcactagctccaaagcaggagcttccttcagcattagaatcccatgaagttcctggcactctcaatatgggtgttcctcaaatttttaaatatggagaaacctgtttccccaagggcaggtttgaaagaaagagaaatccctctcgaaagaaacaacatatatgtgatgaatgtggaaaacacttcagtcagggctcagcccttattcttcatcaaagaattcacagtggggagaaaccttatggatgtgttgagtgtgggaaagcattcagccgaagttccattcttgtgcaacaccagagagtccacactggagaaaaaccttacaaatgtcttgaatgtgggaaagcctttagccagaattcggggcttattaatcatcagagaatccatactggggagaaaccttatgaatgcgttcagtgtgggaaatcgtatagtcaaagctcaaatctttttagacatcagagaagacacaatgcagaaaaacttctgaatgttgtgaaagtt

SEQ ID NO: 5402 - DNA, 579 bp, Homo sapiens
  source 1..579: mol_type = genomic DNA
atgtctgcacagtcagtggaagaagattcaatacttatcatcccaactccagatgaagaggaaaaaattctgagagtgaagttggaggaggatcctgatggcgaagagggatcaagtatcccctggaaccatctcccagacccagagattttccgacagcgattcaggcagtttggataccaggattcacctgggccccgtgaggctgtgagccagctccgagaactttgccgtctgtggctcaggccagagacgcacacaaaagaacaaatcttggagctggtagtgctggagcagtttgttgccatcctacccaaagagctacagacttgggttcgagatcatcatccagagaatggagaggaggcagtgacagtgctggaggatttggagagtgaacttgatgaccctggacaaccggtttctctccgtcgacgaaaacgggaagtactagtagaagacatggtatctcaagaagaagctcagggattaccaagttctgagcttgatgctgtggagaaccagctcaagtgggcatcctgggagctccattccctaaggcactgtgtaatcattcct

SEQ ID NO: 5403 - DNA, 1539 bp, Homo sapiens
  source 1..1539: mol_type = genomic DNA
atggagttcacctgggatgaatggcagctactggattctacacagaagtacctgtacagagatgtgatattggaaaactatcataacctgatatcagtggggtatcatggtaccaagcctgacttaatcttcaagttggaacaaggagaagatccatggataataaatgccaaaatttccaggcagagctgtccagatggctgggaagaatggtaccagaacaatcaagatgagcttgagagtattgaaagaagctatgcttgtagtgtgttgggaagacttaatctgagcaaaacccatgattcttcaagacagagactctataacacacgtggaaaaagtttgacacaaaactcagctccaagcagaagttatttaagaaagaatcctgataagtttcatggttatgaagaaccatattttcttaagcatcaaagagctcatagcatagaaaaaaactgtgtgtgtagtgaatgtgggaaagcttttcgttgtaagtcacagctcattgtacatctcagaattcatacaggagagagaccttatgaatgcagtaaatgtgaaagagccttcagtgccaagtcaaaccttaatgctcatcagagagttcatacaggagaaaaaccctactcatgtagtgagtgcgagaaggtcttctctttcaggtcacagctcattgtccatcaggaaattcacacaggagggaaaccctatggctgcagtgaatgtgggaaagcctacagttggaaatcacagcttcttttacaccagagaagtcacacaggagtgaaaccgtatgaatgcagcgaatgtgggaaagcctttagtttgaagtctccattcgttgtacaccagagaactcatacaggagtgaaaccccataaatgcagtgaatgtgggaaagcctttaggagtaagtcctatctccttgttcacatccgaatgcatacaggagaaaaaccctatcaatgcagtgattgtgggaaagccttcaatatgaagacacaactcattgtacatcagggagttcacacaggaaataatccttatcaatgcggtgaatgtgggaaagcctttggtaggaaggaacagctcactgcacatctgagagctcatgcaggagagaagccctatggatgcagtgaatgtgggaaggctttcagcagcaagtcataccttgttatacataggagaacacacaccggagagagaccctatgaatgtagtttgtgtgagagagccttttgtggaaaatcacagctgattatacatcagagaactcattcaactgagaagccctatgaatgcaatgaatgtgaaaaagcctaccctaggaaggcatcacttcagatacaccagaaaactcattcgggagagaaaccttttaaatgcagtgaatgtggaaaagccttcactcagaagtcatctctcagtgaacatcagagagttcacaccggagagaaaccatggaaatgctctgaatgtgggaaatccttctgttggaattcagggcttcgtatacatcggaagactcataaa

SEQ ID NO: 5404 - DNA, 1596 bp, Homo sapiens
  source 1..1596: mol_type = genomic DNA
atgatgtttcaggattcagtggcctttgaggatgtggctgtcagcttcacccaggaggagtgggctttgctggatccttcccagaagaatctctacagggatgtgatgcaggaaaccttcaagaacctgacctctgtaggaaaaacatggaaagttcagaacattgaagatgagtacaaaaatcccaggagaaatctaagtcttatgagagagaaactctgtgaaagtaaagaaagtcatcactgtggagaaagcttcaaccagattgcagatgacatgctgaacaggaaaactcttcctggaataacaccatgtgaaagcagtgtgtgtggagaagttggcacgggtcattcatctcttaatacgcatatcagagctgacactggacacaagtcatctgagtatcaggaatatggagagaatccatatagaaataaggaatgtaagaaagccttcagttatcttgactcctttcaatcacatgataaagcttgcactaaagagaaaccctatgatggtaaagaatgtacagaaaccttcatttcccattcatgcattcaaagacacagggtaatgcacagtggagatggaccttataaatgtaagttttgtgggaaagccttctattttctcaatttatgtcttatccatgaacgaattcacactggtgtgaaaccatataagtgtaaacaatgtggtaaggcctttactcgttccactacccttccagtacatgaaagaactcacacaggagtgaatgccgatgaatgtaaagaatgtgggaatgcattcagttttcctagtgaaattcgtagacataaaaggtctcacactggagaaaaaccctatgagtgtaagcaatgtgggaaagtcttcatttctttcagttccattcagtatcataagatgactcacactggagagaaaccctatgaatgtaagcagtgtgggaaagcctttagatgtggctcacaccttcaaaagcatggaaggactcacactggagagaaaccctatgaatgtaggcaatgtggtaaagccttcagatgtacctcggaccttcaaaggcatgaaaagacacacactgaggataaaccctatggatgtaagcagtgtgggaaaggctttagatgtgcttcacaacttcaaattcatgaaaggacgcacagtggagagaaaccccatgaatgtaaggaatgtggaaaagtattcaagtatttttcttccttgcgtatacatgaaaggacgcacactggagagaagccccatgaatgtaagcaatgtggaaaagcattcaggtatttctcttccttgcatatacatgaaaggacacacactggagataagccatatgagtgtaaggtatgtggcaaagccttcacttgttccagttccattcgatatcatgaaaggactcacactggagagaaaccctatgaatgtaagcactgtggtaaggcctttatttccaattacattcgatatcatgaaaggactcacactggagagaaaccctatcaatgcaagcaatgtggcaaagcctttattcgtgccagttcatgtcgagaacatgaaagaactcataccattaataga

SEQ ID NO: 5405 - DNA, 1929 bp, Homo sapiens
  source 1..1929: mol_type = genomic DNA
atgctggagaattatgggaatgtggcctccctgggatttccacttctcaaacctgctgtgatctcacaactggagggaggaagtgagctggggggctcatctccactggctgcaggaacaggcctccagggcctccagactgatattcagactgacaatgatttgacaaaggaaatgtatgaaggaaaagagaatgtatcatttgaacttcaaagagacttttcccaggaaacagacttttcagaagcctctcttctagagaaacaacaggaagtccactcagcaggaaatataaagaaggagaagagcaacaccattgatggaacagtgaaagatgagacaagccccgtggaggagtgtttttttagtcaaagttcaaactcatatcagtgtcataccatcactggagagcagccctctgggtgtacaggattggggaaatccatcagctttgatacaaaactcgtgaagcatgaaataattaattctgaggaaagacctttcaaatgtgaagaattagtagagccctttaggtgtgactctcaacttattcaacatcaagagaacaacactgaggaaaagccttatcagtgttcggagtgtggcaaagctttcagcattaatgagaaattaatttggcatcagagacttcacagtggggagaaacccttcaaatgtgtggagtgtgggaaaagcttcagctacagttcccattatatcacacatcagacaatccacagtggggagaagccctatcagtgtaagatgtgtgggaaggccttcagtgttaatggaagcctaagtaggcatcagagaatccatacgggagagaagccctatcagtgcaaggaatgtggaaatggcttcagctgtagttctgcatatattacacatcagagagtccacactggagagaaaccttacgagtgtaatgactgtgggaaagcgttcaatgttaatgcaaaattaattcaacatcagagaatccatactggagagaaaccttatgaatgtaatgaatgtggaaaaggcttcaggtgcagctcccagcttaggcagcatcagagcatccacacaggagaaaagccctatcagtgtaaagagtgtggaaaaggcttcaataataatacaaaactcattcagcatcagagaatccacacaggtgagaaaccctatgaatgcactgaatgtggaaaagccttcagtgtcaaagggaagttaatccaacaccagagaattcacacaggcgagaaaccctatgagtgtaatgaatgcgggaaagccttcagatgtaactcccaatttcggcagcatctgagaattcacactggggagaagccctatgagtgtaatgagtgtggaaaggccttcagcgttaatgggaaactaatgcggcatcagagaattcacactggggagaaaccttttgaatgtaatgagtgtgggagatgctttacttctaaaagaaacctacttgatcatcaccgaatccatactggagaaaagccctatcaatgtaaggaatgtgggaaagccttcagtatcaatgccaaactaactaggcatcagaggatacatactggggagaaacctttcaaatgtatggaatgtgagaaagcattcagctgtagttctaactatattgtgcaccagagaatccatacaggagagaaaccctttcagtgtaaggagtgtggaaaagccttccatgttaatgcccatttaattcggcatcagagaagccacactggggagaaacccttcagatgtgtggaatgtggcaaaggcttcagctttagttctgactacattatacatcagacagtccacacttggaagaaaccctatatgtgtagtgtgtgtgggaaagcattcaggtttagcttccagctcagtcagcatcagagtgtccatagtgaaggaaaatcc

SEQ ID NO: 5406 - DNA, 1755 bp, Homo sapiens
  source 1..1755: mol_type = genomic DNA
atgtatgaaggaaaagagaatgtatcatttgaacttcaaagagacttttcccaggaaacagacttttcagaagcctctcttctagagaaacaacaggaagtccactcagcaggaaatataaagaaggagaagagcaacaccattgatggaacagtgaaagatgagacaagccccgtggaggagtgtttttttagtcaaagttcaaactcatatcagtgtcataccatcactggagagcagccctctgggtgtacaggattggggaaatccatcagctttgatacaaaactcgtgaagcatgaaataattaattctgaggaaagacctttcaaatgtgaagaattagtagagccctttaggtgtgactctcaacttattcaacatcaagagaacaacactgaggaaaagccttatcagtgttcggagtgtggcaaagctttcagcattaatgagaaattaatttggcatcagagacttcacagtggggagaaacccttcaaatgtgtggagtgtgggaaaagcttcagctacagttcccattatatcacacatcagacaatccacagtggggagaagccctatcagtgtaagatgtgtgggaaggccttcagtgttaatggaagcctaagtaggcatcagagaatccatacgggagagaagccctatcagtgcaaggaatgtggaaatggcttcagctgtagttctgcatatattacacatcagagagtccacactggagagaaaccttacgagtgtaatgactgtgggaaagcgttcaatgttaatgcaaaattaattcaacatcagagaatccatactggagagaaaccttatgaatgtaatgaatgtggaaaaggcttcaggtgcagctcccagcttaggcagcatcagagcatccacacaggagaaaagccctatcagtgtaaagagtgtggaaaaggcttcaataataatacaaaactcattcagcatcagagaatccacacaggtgagaaaccctatgaatgcactgaatgtggaaaagccttcagtgtcaaagggaagttaatccaacaccagagaattcacacaggcgagaaaccctatgagtgtaatgaatgcgggaaagccttcagatgtaactcccaatttcggcagcatctgagaattcacactggggagaagccctatgagtgtaatgagtgtggaaaggccttcagcgttaatgggaaactaatgcggcatcagagaattcacactggggagaaaccttttgaatgtaatgagtgtgggagatgctttacttctaaaagaaacctacttgatcatcaccgaatccatactggagaaaagccctatcaatgtaaggaatgtgggaaagccttcagtatcaatgccaaactaactaggcatcagaggatacatactggggagaaacctttcaaatgtatggaatgtgagaaagcattcagctgtagttctaactatattgtgcaccagagaatccatacaggagagaaaccctttcagtgtaaggagtgtggaaaagccttccatgttaatgcccatttaattcggcatcagagaagccacactggggagaaacccttcagatgtgtggaatgtggcaaaggcttcagctttagttctgactacattatacatcagacagtccacacttggaagaaaccctatatgtgtagtgtgtgtgggaaagcattcaggtttagcttccagctcagtcagcatcagagtgtccatagtgaaggaaaatcc

SEQ ID NO: 5407 - DNA, 672 bp, Homo sapiens
  source 1..672: mol_type = genomic DNA
atgaggttagcaaagcctaaagcgggtatttctcggagctcaagccaaggaaaggcctatgagaacaagcgcaaaacaggccggcagcggcagaagtggggcatgactattcgatttgactcaagcttcagtagactcagaagaagcttggatgacaaaccctataaatgtactgaatgtgaaaagagtttcagtcagagttcaactctttttcaacaccagaagatccatactggaaagaaatcccataaatgtgctgattgtgggaaaagtttctttcagagttctaatctcattcagcatcgacggatccatacgggggaaaagccctacaaatgtgatgagtgtggagaaagcttcaaacagagctcaaatctcattcagcaccagagaattcatactggagaaaaaccctatcagtgtgatgagtgtggccggtgtttcagccagagctcccaccttattcaacatcagagaacccacactggggagaaaccctaccagtgcagtgaatgtggcaaatgtttcagtcagagctctcatctgaggcagcacatgaaggtgcataaagaagagaagcctcgtaaaacccggggcaaaaatatcagggtgaagactcacttaccctcttggaaagctggtacaggaaggaagtctgtggctggtctccgt

SEQ ID NO: 5408 - DNA, 2154 bp, Homo sapiens
  source 1..2154: mol_type = genomic DNA
atggctcttcctcagggtctattgacattcagggacgtggccatagaattctctcaggaggagtggaaatgcctggaccctgctcagaggactctttacagggatgtgatgctggagaattataggaacctggtctccctggatatctcttccaaatgcatgatgaagacattcttctcaacagggcaaggcaatacagaagcgttccacacagggacattgcaaagacaagcaagtcatcacattggagatttttgcttccagaaaattgagaaagacattcatggcttccagtttcagtggaaagaagatgaaacaaatgaccatgcagcacccatgacagaaatcaaagagttgactggtagtacaggccaacatgatcaaaggcatgctggaaacaagcatattaaagatcagcttggattaagctttcattcgcatctgcctgaactgcacatatttcagcctgaagggaaaattggtaatcaagttgagaagtctatcaacaatgcttcctcagtttcaacatcccaaagaatttgttgtaggcccaaaacccatatttctaataagtatggaaataattccctccattcttcattactcacacaaaaacggaatgtacacatgagagaaaaatctttccaatgtattgagagtggcaaatcctttaattgtagctcacttttaaaaaaacatcagataacccacttagaagagaaacaatgtaaatgtgatgtatatggcaaggtatttaatcagaagcgataccttgcatgccatcgtagatctcacattgatgagaaaccttacaagtgtaatgagtgtggcaagatctttggtcacaatacatccctcttccttcacaaggcgcttcatactgcagacaaaccttatgaatgtgaagaatgtgacaaagttttcagtcgcaaatcacaccttgaaacacataagataatttatactggagggaaaccatacaaatgtaaggtttgtgacaaagctttcacatgtaattcatacctagcaaaacatactataattcacactggagagaaaccttacaagtgtaatgaatgtggcaaggtttttaatcgactgtcaacccttgcacgccatcgtaggcttcatactggagagaaaccttatgaatgtgaagaatgtgaaaaagttttcagtcgcaaatcacatcttgaaagacataagaggattcatactggagagaaaccatacaaatgtaaggtttgtgacaaggcttttgcatataattcatacctggcaaaacatagtataattcacactggagagaagccttacaagtgtaatgaatgtggcaaggtttttaatcaacaatcaactcttgcacgccatcatagacttcatactgcagagaaaccatacaaatgtgaagaatgtgacaaagttttcaggtgcaaatcacaccttgaaagacataggaggattcatactggagagaaaccatacaaatgtaaggtttgtgacaaggctttccggagtgattcatgccttacagaacatcagagagttcatactggagagaaaccatacatgtgtaatgaatgtggcaaggtttttagtacaaaagcaaaccttgcatgtcatcataaacttcatactgcagagaaaccgtacaaatgtgaagaatgtgagaaagttttcagtcgcaaatcacacatggaaagacataggaggattcatactggagagaaaccgtacaaatgtaaggtttgtgacaaggctttccggagggattcacacctggcacaacatcagagagttcatactggagagaaaccttacaagtgtaatgagtgtggcaagaccttccgtcagacatcatcgcttataatccatcgtaggcttcatactggagagaaaccttacaagtgtaatgagtgtggcaagaccttcagtcagatgtcatccctcgtataccatcataggcttcatagtggagagaaaccttacaagtgtaatgaatgtggcaaggtttttaatcaacaagcacaccttgcacagcatcagagagttcatactggagagaaaccttacaagtgtaatgagtgtggcaagaccttcagtcagatgtcaaaccttgtataccatcatagacttcatagtggagagaaacct

SEQ ID NO: 5409 - DNA, 8568 bp, Homo sapiens
  source 1..8568: mol_type = genomic DNA
atggaggagaaacagcagattatattggctaatcaagatggtggaacagtggcaggagcagcacctaccttctttgtcatcttaaagcagccaggaaatggcaaaactgatcaaggaattttggttactaatcaggatgcctgtgctttggctagtagtgtgtcatcaccagtaaaatctaaagggaagatttgccttccagctgattgtactgtgggtggaatcactgttaccctcgataacaatagtatgtggaatgagttctatcatcgaagcacagagatgattctgaccaagcaaggaagacgcatgtttccttactgtcgttattggataacaggtttagattcaaatttgaagtatattcttgtcatggatatatctcctgtggataaccatcgttataagtggaatggtcgttggtgggaacctagtgggaaggctgaacctcatgttttggggagggttttcattcatccagaatctccttccacaggtcattattggatgcatcaaccagtatctttctataaactcaaacttaccaacaatacactggaccaagaagggcatatcatcttgcactctatgcatcgttacctgccgaggcttcatttggtgcctgcagaaaaggctgtggaggtgatacaattaaatggccctggtgtccacacttttaccttcccacagactgaattctttgcagtaacagcttatcagaacattcagattactcagctgaaaatagattacaatccatttgccaaaggctttcgggatgatgggctgaataataagccccagagagatggaaaacaaaagaacagctctgaccaagaagggaataatatttccagttcttctggtcatcgggtccgtcttacagaaggtcaggggtcagagatacaaccaggtgatttggatcctttgtcaaggggtcatgaaacatcaggcaagggtttggagaagacttcccttaatataaaacgagactttcttggtttcatggatactgattcagcacttagtgaagttcctcaattgaagcaagagatttctgaatgtcttattgccagcagttttgaagatgactcccgtgtagcctcaccgttagaccagaacggaagcttcaatgttgttattaaagaggaacctctagatgattatgactacgaacttggtgagtgcccagaaggggtcactgtgaaacaggaagagacagatgaagagacggatgtatactcaaacagtgatgatgatcctatactagagaaacagctaaagaggcacaataaagttgacaacccagaagctgaccatctatcttctaaatggcttccaagcagcccatcaggtgttgctaaagctaaaatgttcaaattagacactggaaagatgccagtagtctatctggagccctgtgctgtcaccagaagcacagttaagatttctgaactccccgataacatgctttccacatctcgaaaggataaatcttctatgttggcagaattggaatatttgcctacatacattgaaaattccaatgagactgccttctgcttaggcaaggaatcagaaaatggtcttagaaaacattcaccagatctcagagtggtacaaaaatatcccttactgaaagagcctcagtggaaatatcctgatatatctgacagcattagcacagaaagaatactcgacgattcaaaggattcagttggagactcactttcaggaaaagaggacttgggcagaaagagaacaactatgcttaagattgcaacagccgcaaaggtagtgaatgctaatcagaatgcctctccaaatgtccctggaaaaagaggaaggccacgaaaattgaaactctgtaaggcaggacgaccacctaagaacacaggaaagtctttaatttctacaaagaatacacctgtaagccctgggagtacctttccagatgtgaagcctgatctggaagatgtggatggtgttctctttgtttcctttgaatcaaaggaagctctagacattcatgcagttgatgggacaacagaagaatcttctagtctccaggcatcaaccacaaatgactcaggttacagagcaagaatttcccagttggaaaaggaattgatagaagatttgaagactttgcggcacaagcaggtgatacatcctggtcttcaagaagtgggcttaaaattgaattcagtggatccaacaatgagcattgatcttaaatacttgggagtacagttacctttggctccagctactagctttcctttttggaaccttacaggaaccaaccctgcctctcctgatgcgggatttccctttgtttctaggacagggaaaaccaatgatttcactaagatcaagggatggaggggaaaatttcatagtgcttctgcatctaggaatgaaggtggaaattcagaaagttcactgaaaaatcgttctgctttctgtagtgataagctagatgaatacttggaaaatgaaggcaagctgatggaaacaagcatgggtttttcttctaatgctcccacatctcctgtggtgtaccagcttcccactaagagtaccagttatgtacgaacacttgatagtgtactaaagaagcaatctactatttccccttctacctcttattctttgaaacctcattctgtaccccctgtctctcgaaaggcaaagtctcaaaacagacaggcaactttcagtggccgaactaaatcatcttataaatccattttaccataccctgtttcaccaaagcagaaatactctcatgtgattctaggagataaggttaccaagaattcttcaggcatcatctcagaaaatcaggcgaataactttgttgtgccaactttggatgaaaatatatttccaaagcagattagtttgcggcaggcacagcagcagcagcaacagcaacagggaagtcgccctccaggcttgtctaaatctcaggtgaagctaatggacctggaagactgtgcactttgggaaggaaaaccaaggacatacatcacagaagagcgagcagatgtatccttaacaactctacttacagctcaagcatccctcaaaactaaacctatccacacaatcataaggaaacgagcccctccctgcaacaatgacttctgtcgactgggttgtgtatgttccagtctagctttggagaagcgccaacctgctcactgccgccgaccagactgcatgtttggttgtacttgtttgaaaagaaaagttgtacttgttaaaggaggatccaaaactaagcattttcagaggaaggctgctcatcgagatccagtattttatgatactctgggagaggaggcaagggaggaggaagaaggaatcagggaggaggaggaacaattgaaagagaaaaagaagagaaagaagctagaatacactatatgtgagacagagcctgaacagcctgttcgacattacccattatgggtaaaagtagaaggtgaagtagatccagaaccagtttatatccccacgccttctgtcattgagcctatgaaaccattgttattgcctcagccagaagttttatctcctactgtgaagggcaaactgctcactggaattaaatctccacggtcatatactcccaaacccaatcctgtgattcgggaagaggacaaagatccagtctacttgtactttgaaagtatgatgacttgtgctcgagttcgagtatatgagcgaaaaaaagaggaccagagacaaccatcttcctcctcctccccatctccatcatttcagcagcaaacttcatgtcattctagccctgagaaccataataatgcaaaggaacctgattctgaacagcagcccttaaaacaactcacctgtgacttggaggatgattctgataaattacaagaaaagagctggaagtcttcctgcaatgaaggagaatcctcttctacttcttatatgcatcagaggtcacctggtggtcccaccaaactgattgagatcatctcagactgcaactgggaggaagatcggaacaagattttgagcatcttatcccagcacatcaatagcaacatgccacaatcacttaaggtgggcagcttcatcattgagttggcttctcagcgaaagagccggggtgagaagaaccctcctgtttattcttctcgtgtgaaaatctctatgccatcatgtcaagaccaagatgatatggctgagaaatctggatcagagactcctgatggtccattgtcccctgggaaaatggaggatatctctcctgtgcagacagatgccctggattcagtgagggagagattacatggaggcaaaggtctgcctttttatgcagggctttctcctgcagggaagcttgtggcctataaacgtaaacccagttcaagtacatctgggcttatccaggtagcatccaatgccaaggtggctgcatccaggaaaccacgtaccctgttgccttcaacatccaattccaaaatggcatcctcctctggcactgcaacaaatcgccctgggaagaatctgaaggcgtttgtcccagcaaaacggccaattgaaaatgctgctcaaattccagtggctactccacaggtctctcctaacacagtgaaacgtgctggacctcgattgttgttgattccagtgcagcagggttctcctactcttagacctgtctcaaacacacaacttcagggacatcggatggtcttgcagcctgttaggagtccaagtggaatgaacttattcaggcaccctaatgggcagattgtccagcttctacctttgcatcagcttcgaggctctaatacccagcccaacttacagcctgtcatgtttcggaacccagggtctgtgatgggaatccggttacctgctccttccaaaccctctgagactccgccatcttccacttcgtcctctgctttctctgtcatgaatcctgtaattcaagctgttgggtcttcttcagcagtgaatgttatcactcaggcaccatcattgctttcctctggagctagttttgtgtctcaggctggtacattgaccctgaggatttctcctcctgaaccacaaagctttgcaagtaaaacaggctctgaaaccaaaataacttatagctcaggaggacagcctgttggtacagccagtcttattcctctccagtctggtagttttgccttgttacagctcccaggacaaaagcctgttcctagctccattcttcagcatgttgcttcccttcagatgaagagagaatctcagaatccagaccagaaagatgaaacaaactcaataaaaagagagcaagaaacgaagaaggttctacagtcagaaggagaggctgtagaccctgaggctaatgtaataaaacaaaactcaggagctgctacctcagaagaaactctgaatgattccttggaagataggggtgatcatttggatgaagaatgccttccagaagaaggttgtgcaactgtcaaaccatctgagcattcctgtatcactgggtcacatacagatcaagattataaagatgttaatgaagaatatggggctaggaatcgtaagagttccaaagaaaaagtggctgttctggaagttaggaccatttctgaaaaagccagtaataagacagtccaaaatttaagtaaagtacagcatcaaaaacttggtgatgtgaaggtggaacagcagaaaggatttgacaatccagaagaaaactcaagtgaatttccagtcacctttaaggaagaaagtaaatttgaattgtcaggaagcaaagttatggagcagcaatctaatctacagccagaggccaaagagaaggaatgtggagactctctggagaaagacagggaaagatggagaaaacatctgaagggccccttaaccaggaaatgtgttggagcttcacaggaatgtaagaaagaggcagacgagcagttaattaaagaaacaaagacatgtcaggaaaattcagatgtgtttcagcaagaacaaggcatctctgacttacttggaaaaagtggaattactgaagatgccagagttttgaaaactgaatgtgattcttggagtaggatttctaatccttcagccttctccattgttcctaggagagctgcaaaaagcagcagagggaatggacattttcagggtcacttactgctacctggagaacagatacaaccaaagcaagagaagaagggtgggagaagcagtgctgacttcactgttttggatttggaagaagatgatgaagatgataatgagaaaactgatgattctattgatgaaattgtggatgttgtttctgactaccagagtgaggaggttgatgatgtagaaaagaataactgtgtagaatacattgaggatgatgaggagcacgtggacattgagactgtagaagagctctcagaggaaattaatgttgctcacctgaagaccacagcggcccacacacagtcattcaaacagccgtcctgtactcacatctctgcagatgaaaaagcagctgaaaggagtcgaaaggctccaccaattcctctaaaactgaagcctgattactggagtgacaaactacagaaagaagcagaagcgtttgcttattatcgccggacacacactgccaatgagcggcggcggcgtggtgaaatgagggatctctttgagaaattaaagatcacattgggattacttcattcttccaaggtttccaaaagtctcattcttactcgagccttcagtgaaattcagggactaacagatcaggcagacaaattgataggacagaaaaatctcctgactcgaaaacggaatattctgatacggaaagtatcgtctctttcaggtaagacagaagaagtggtcctgaagaagctagagtatatttatgcaaaacagcaagcactagaggcacaaaaaagaaaaaagaagatgggatcagatgagtttgacatatctcccagaattagcaaacagcaggaaggatcttctgcatcatctgtagatcttggacagatgtttataaataacaggagggggaaacctttgattctttccagaaaaaaagaccaggccacagaaaatacctcacccttgaacactccacacacctctgccaaccttgtgatgactccgcaagggcaattgctcaccctaaaaggtcccctattctcaggaccagtggtagctgtttctcctgatctcttagaatctgatcttaagcctcaagttgccggtagtgctgtggctctaccagaaaatgacgacttatttatgatgccacgaattgttaatgtgacatcattggccacagagggaggtttggtagatatgggtggcagcaaatatcctcatgaagttcctgatagcaagccatctgaccatctgaaagacaccgtcaggaatgaagataattccttagaggataagggtagaatctcttccagaggaaacagagatggcagagtgacgttgggtccaacgcaggtttttctggcaaacaaagattctggttatccacaaatagttgacgtttccaatatgcagaaagcacaagagttcttacctaaaaagatttctggtgatatgagagggattcagtataaatggaaagagagtgaatcaagaggggagagagtgaagtcaaaggattcttcatttcataaattaaagatgaaagatctcaaggactcaagcatagagatggaactgaggaaagtaacatcagctatagaggaagcagctcttgattccagtgaactgctgactaacatggaagatgaggatgatactgatgagacactgacttcactgctcaatgaaattgcctttcttaatcaacaactaaatgatgactctgttggcctggctgaactacccagctctatggatacagagttcccaggggatgctcggcgggcttttattagtaaggttcctcctggaagcagagcaactttccaggttgagcacttgggaactggtttgaaagagttgcctgatgttcaaggggagagtgactctatcagtcccctcctcttgcacttggaagacgatgacttttctgagaatgaaaaacaacttgcagaaccagcctctgagccagatgtccttaagattgttattgactctgaaataaaggattccctcctttccaacaagaaagctattgatggagggaagaatacttctggcctccctgcagagcccgaaagtgtgtcctcaccccccaccctacacatgaagactggcttggagaacagcaacagcacagacactttgtggaggcctatgccaaagttggcccctctaggtttaaaagtagctaatccttccagtgatgcagatggtcagagtctcaaggtgatgccttgtttggcacctatagctgccaaagttgggtcagttggacacaaaatgaacttaacagggaatgaccaggaaggccgggaaagcaaggtgatgcctacattggcacctgttgtggctaaattgggcaactcgggggcctcaccaagttctgcagggaaa

SEQ ID NO: 5410 - DNA, 9195 bp, Homo sapiens
  source 1..9195: mol_type = genomic DNA
atggaggagaaacagcagattatattggctaatcaagatggtggaacagtggcaggagcagcacctaccttctttgtcatcttaaagcagccaggaaatggcaaaactgatcaaggaattttggttactaatcaggatgcctgtgctttggctagtagtgtgtcatcaccagtaaaatctaaagggaagatttgccttccagctgattgtactgtgggtggaatcactgttaccctcgataacaatagtatgtggaatgagttctatcatcgaagcacagagatgattctgaccaagcaaggaagacgcatgtttccttactgtcgttattggataacaggtttagattcaaatttgaagtatattcttgtcatggatatatctcctgtggataaccatcgttataagtggaatggtcgttggtgggaacctagtgggaaggctgaacctcatgttttggggagggttttcattcatccagaatctccttccacaggtcattattggatgcatcaaccagtatctttctataaactcaaacttaccaacaatacactggaccaagaagggcatatcatcttgcactctatgcatcgttacctgccgaggcttcatttggtgcctgcagaaaaggctgtggaggtgatacaattaaatggccctggtgtccacacttttaccttcccacagactgaattctttgcagtaacagcttatcagaacattcagattactcagctgaaaatagattacaatccatttgccaaaggctttcgggatgatgggctgaataataagccccagagagatggaaaacaaaagaacagctctgaccaagaagggaataatatttccagttcttctggtcatcgggtccgtcttacagaaggtcaggggtcagagatacaaccaggtgatttggatcctttgtcaaggggtcatgaaacatcaggcaagggtttggagaagacttcccttaatataaaacgagactttcttggtttcatggatactgattcagcacttagtgaagttcctcaattgaagcaagagatttctgaatgtcttattgccagcagttttgaagatgactcccgtgtagcctcaccgttagaccagaacggaagcttcaatgttgttattaaagaggaacctctagatgattatgactacgaacttggtgagtgcccagaaggggtcactgtgaaacaggaagagacagatgaagagacggatgtatactcaaacagtgatgatgatcctatactagagaaacagctaaagaggcacaataaagttgacaacccagaagctgaccatctatcttctaaatggcttccaagcagcccatcaggtgttgctaaagctaaaatgttcaaattagacactggaaagatgccagtagtctatctggagccctgtgctgtcaccagaagcacagttaagatttctgaactccccgataacatgctttccacatctcgaaaggataaatcttctatgttggcagaattggaatatttgcctacatacattgaaaattccaatgagactgccttctgcttaggcaaggaatcagaaaatggtcttagaaaacattcaccagatctcagagtggtacaaaaatatcccttactgaaagagcctcagtggaaatatcctgatatatctgacagcattagcacagaaagaatactcgacgattcaaaggattcagttggagactcactttcaggaaaagaggacttgggcagaaagagaacaactatgcttaagattgcaacagccgcaaaggtagtgaatgctaatcagaatgcctctccaaatgtccctggaaaaagaggaaggccacgaaaattgaaactctgtaaggcaggacgaccacctaagaacacaggaaagtctttaatttctacaaagaatacacctgtaagccctgggagtacctttccagatgtgaagcctgatctggaagatgtggatggtgttctctttgtttcctttgaatcaaaggaagctctagacattcatgcagttgatgggacaacagaagaatcttctagtctccaggcatcaaccacaaatgactcaggttacagagcaagaatttcccagttggaaaaggaattgatagaagatttgaagactttgcggcacaagcaggtgatacatcctggtcttcaagaagtgggcttaaaattgaattcagtggatccaacaatgagcattgatcttaaatacttgggagtacagttacctttggctccagctactagctttcctttttggaaccttacaggaaccaaccctgcctctcctgatgcgggatttccctttgtttctaggacagggaaaaccaatgatttcactaagatcaagggatggaggggaaaatttcatagtgcttctgcatctaggaatgaaggtggaaattcagaaagttcactgaaaaatcgttctgctttctgtagtgataagctagatgaatacttggaaaatgaaggcaagctgatggaaacaagcatgggtttttcttctaatgctcccacatctcctgtggtgtaccagcttcccactaagagtaccagttatgtacgaacacttgatagtgtactaaagaagcaatctactatttccccttctacctcttattctttgaaacctcattctgtaccccctgtctctcgaaaggcaaagtctcaaaacagacaggcaactttcagtggccgaactaaatcatcttataaatccattttaccataccctgtttcaccaaagcagaaatactctcatgtgattctaggagataaggttaccaagaattcttcaggcatcatctcagaaaatcaggcgaataactttgttgtgccaactttggatgaaaatatatttccaaagcagattagtttgcggcaggcacagcagcagcagcaacagcaacagggaagtcgccctccaggcttgtctaaatctcaggtgaagctaatggacctggaagactgtgcactttgggaaggaaaaccaaggacatacatcacagaagagcgagcagatgtatccttaacaactctacttacagctcaagcatccctcaaaactaaacctatccacacaatcataaggaaacgagcccctccctgcaacaatgacttctgtcgactgggttgtgtatgttccagtctagctttggagaagcgccaacctgctcactgccgccgaccagactgcatgtttggttgtacttgtttgaaaagaaaagttgtacttgttaaaggaggatccaaaactaagcattttcagaggaaggctgctcatcgagatccagtattttatgatactctgggagaggaggcaagggaggaggaagaaggaatcagggaggaggaggaacaattgaaagagaaaaagaagagaaagaagctagaatacactatatgtgagacagagcctgaacagcctgttcgacattacccattatgggtaaaagtagaaggtgaagtagatccagaaccagtttatatccccacgccttctgtcattgagcctatgaaaccattgttattgcctcagccagaagttttatctcctactgtgaagggcaaactgctcactggaattaaatctccacggtcatatactcccaaacccaatcctgtgattcgggaagaggacaaagatccagtctacttgtactttgaaagtatgatgacttgtgctcgagttcgagtatatgagcgaaaaaaagaggaccagagacaaccatcttcctcctcctccccatctccatcatttcagcagcaaacttcatgtcattctagccctgagaaccataataatgcaaaggaacctgattctgaacagcagcccttaaaacaactcacctgtgacttggaggatgattctgataaattacaagaaaagagctggaagtcttcctgcaatgaaggagaatcctcttctacttcttatatgcatcagaggtcacctggtggtcccaccaaactgattgagatcatctcagactgcaactgggaggaagatcggaacaagattttgagcatcttatcccagcacatcaatagcaacatgccacaatcacttaaggtgggcagcttcatcattgagttggcttctcagcgaaagagccggggtgagaagaaccctcctgtttattcttctcgtgtgaaaatctctatgccatcatgtcaagaccaagatgatatggctgagaaatctggatcagagactcctgatggtccattgtcccctgggaaaatggaggatatctctcctgtgcagacagatgccctggattcagtgagggagagattacatggaggcaaaggtctgcctttttatgcagggctttctcctgcagggaagcttgtggcctataaacgtaaacccagttcaagtacatctgggcttatccaggtagcatccaatgccaaggtggctgcatccaggaaaccacgtaccctgttgccttcaacatccaattccaaaatggcatcctcctctggcactgcaacaaatcgccctgggaagaatctgaaggcgtttgtcccagcaaaacggccaattgcggctcgaccctctcctggtggtgtgttcacacagtttgtgatgagtaaagttggagccttgcagcagaagatacctggagttagcacaccccaaaccctggcagggacacagaagttcagtatcagaccttctccagtaatggtcgtcacacctgtggtttcttctgagccagttcaggtgtgcagccctgtgactgctgctgtcactactaccacccctcaagtgtttttagaaaatactactgctgtgacacctatgactgctatttctgacgtggaaactaaagaaactacttattcttctggtgccaccactacaggggttgttgaggtctctgaaactaataccagcacctctgtaacatctacccagtctacagccactgtgaaccttaccaaaaccactgggataactacccctgtggcttcagttgcttttcctaagtctttggtagcatctccttcaaccataactcttcctgttgcttccactgcttccacctccttagtcgtggtgactgcagctgcatcttcctccatggtgaccacaccaacttcatctctgggctctgttcctattatactctcaggaattaatgggagtccaccagtgagccagagaccagaaaatgctgctcaaattccagtggctactccacaggtctctcctaacacagtgaaacgtgctggacctcgattgttgttgattccagtgcagcagggttctcctactcttagacctgtctcaaacacacaacttcagggacatcggatggtcttgcagcctgttaggagtccaagtggaatgaacttattcaggcaccctaatgggcagattgtccagcttctacctttgcatcagcttcgaggctctaatacccagcccaacttacagcctgtcatgtttcggaacccagggtctgtgatgggaatccggttacctgctccttccaaaccctctgagactccgccatcttccacttcgtcctctgctttctctgtcatgaatcctgtaattcaagctgttgggtcttcttcagcagtgaatgttatcactcaggcaccatcattgctttcctctggagctagttttgtgtctcaggctggtacattgaccctgaggatttctcctcctgaaccacaaagctttgcaagtaaaacaggctctgaaaccaaaataacttatagctcaggaggacagcctgttggtacagccagtcttattcctctccagtctggtagttttgccttgttacagctcccaggacaaaagcctgttcctagctccattcttcagcatgttgcttcccttcagatgaagagagaatctcagaatccagaccagaaagatgaaacaaactcaataaaaagagagcaagaaacgaagaaggttctacagtcagaaggagaggctgtagaccctgaggctaatgtaataaaacaaaactcaggagctgctacctcagaagaaactctgaatgattccttggaagataggggtgatcatttggatgaagaatgccttccagaagaaggttgtgcaactgtcaaaccatctgagcattcctgtatcactgggtcacatacagatcaagattataaagatgttaatgaagaatatggggctaggaatcgtaagagttccaaagaaaaagtggctgttctggaagttaggaccatttctgaaaaagccagtaataagacagtccaaaatttaagtaaagtacagcatcaaaaacttggtgatgtgaaggtggaacagcagaaaggatttgacaatccagaagaaaactcaagtgaatttccagtcacctttaaggaagaaagtaaatttgaattgtcaggaagcaaagttatggagcagcaatctaatctacagccagaggccaaagagaaggaatgtggagactctctggagaaagacagggaaagatggagaaaacatctgaagggccccttaaccaggaaatgtgttggagcttcacaggaatgtaagaaagaggcagacgagcagttaattaaagaaacaaagacatgtcaggaaaattcagatgtgtttcagcaagaacaaggcatctctgacttacttggaaaaagtggaattactgaagatgccagagttttgaaaactgaatgtgattcttggagtaggatttctaatccttcagccttctccattgttcctaggagagctgcaaaaagcagcagagggaatggacattttcagggtcacttactgctacctggagaacagatacaaccaaagcaagagaagaagggtgggagaagcagtgctgacttcactgttttggatttggaagaagatgatgaagatgataatgagaaaactgatgattctattgatgaaattgtggatgttgtttctgactaccagagtgaggaggttgatgatgtagaaaagaataactgtgtagaatacattgaggatgatgaggagcacgtggacattgagactgtagaagagctctcagaggaaattaatgttgctcacctgaagaccacagcggcccacacacagtcattcaaacagccgtcctgtactcacatctctgcagatgaaaaagcagctgaaaggagtcgaaaggctccaccaattcctctaaaactgaagcctgattactggagtgacaaactacagaaagaagcagaagcgtttgcttattatcgccggacacacactgccaatgagcggcggcggcgtggtgaaatgagggatctctttgagaaattaaagatcacattgggattacttcattcttccaaggtttccaaaagtctcattcttactcgagccttcagtgaaattcagggactaacagatcaggcagacaaattgataggacagaaaaatctcctgactcgaaaacggaatattctgatacggaaagtatcgtctctttcaggtaagacagaagaagtggtcctgaagaagctagagtatatttatgcaaaacagcaagcactagaggcacaaaaaagaaaaaagaagatgggatcagatgagtttgacatatctcccagaattagcaaacagcaggaaggatcttctgcatcatctgtagatcttggacagatgtttataaataacaggagggggaaacctttgattctttccagaaaaaaagaccaggccacagaaaatacctcacccttgaacactccacacacctctgccaaccttgtgatgactccgcaagggcaattgctcaccctaaaaggtcccctattctcaggaccagtggtagctgtttctcctgatctcttagaatctgatcttaagcctcaagttgccggtagtgctgtggctctaccagaaaatgacgacttatttatgatgccacgaattgttaatgtgacatcattggccacagagggaggtttggtagatatgggtggcagcaaatatcctcatgaagttcctgatagcaagccatctgaccatctgaaagacaccgtcaggaatgaagataattccttagaggataagggtagaatctcttccagaggaaacagagatggcagagtgacgttgggtccaacgcaggtttttctggcaaacaaagattctggttatccacaaatagttgacgtttccaatatgcagaaagcacaagagttcttacctaaaaagatttctggtgatatgagagggattcagtataaatggaaagagagtgaatcaagaggggagagagtgaagtcaaaggattcttcatttcataaattaaagatgaaagatctcaaggactcaagcatagagatggaactgaggaaagtaacatcagctatagaggaagcagctcttgattccagtgaactgctgactaacatggaagatgaggatgatactgatgagacactgacttcactgctcaatgaaattgcctttcttaatcaacaactaaatgatgactctgttggcctggctgaactacccagctctatggatacagagttcccaggggatgctcggcgggcttttattagtaaggttcctcctggaagcagagcaactttccaggttgagcacttgggaactggtttgaaagagttgcctgatgttcaaggggagagtgactctatcagtcccctcctcttgcacttggaagacgatgacttttctgagaatgaaaaacaacttgcagaaccagcctctgagccagatgtccttaagattgttattgactctgaaataaaggattccctcctttccaacaagaaagctattgatggagggaagaatacttctggcctccctgcagagcccgaaagtgtgtcctcaccccccaccctacacatgaagactggcttggagaacagcaacagcacagacactttgtggaggcctatgccaaagttggcccctctaggtttaaaagtagctaatccttccagtgatgcagatggtcagagtctcaaggtgatgccttgtttggcacctatagctgccaaagttgggtcagttggacacaaaatgaacttaacagggaatgaccaggaaggccgggaaagcaaggtgatgcctacattggcacctgttgtggctaaattgggcaactcgggggcctcaccaagttctgcagggaaa

SEQ ID NO: 5411 - DNA, 1017 bp, Homo sapiens
  source 1..1017: mol_type = genomic DNA
atggatcagaacaacagcctgccaccttacgctcagggcttggcctcccctcagggtgccatgactcccggaatccctatctttagtccaatgatgccttatggcactggactgaccccacagcctattcagaacaccaatagtctgtctattttggaagagcaacaaaggcagcagcagcaacaacaacagcagcagcagcagcagcagcagcaacagcaacagcagcagcagcagcagcagcagcagcagcagcagcagcagcagcagcagcagcagcaacaggcagtggcagctgcagccgttcagcagtcaacgtcccagcaggcaacacagggaacctcaggccaggcaccacagctcttccactcacagactctcacaactgcacccttgccgggcaccactccactgtatccctcccccatgactcccatgacccccatcactcctgccacgccagcttcggagagttctgggattgtaccgcagctgcaaaatattgtatccacagtgaatcttggttgtaaacttgacctaaagaccattgcacttcgtgcccgaaacgccgaatataatcccaagcggtttgctgcggtaatcatgaggataagagagccacgaaccacggcactgattttcagttctgggaaaatggtgtgcacaggagccaagagtgaagaacagtccagactggcagcaagaaaatatgctagagttgtacagaagttgggttttccagctaagttcttggacttcaagattcagaatatggtggggagctgtgatgtgaagtttcctataaggttagaaggccttgtgctcacccaccaacaatttagtagttatgagccagagttatttcctggtttaatctacagaatgatcaaacccagaattgttctccttatttttgtttctggaaaagttgtattaacaggtgctaaagtcagagcagaaatttatgaagcatttgaaaacatctaccctattctaaagggattcaggaagacgacg

SEQ ID NO: 5412 - DNA, 957 bp, Homo sapiens
  source 1..957: mol_type = genomic DNA
atgactcccggaatccctatctttagtccaatgatgccttatggcactggactgaccccacagcctattcagaacaccaatagtctgtctattttggaagagcaacaaaggcagcagcagcaacaacaacagcagcagcagcagcagcagcagcaacagcaacagcagcagcagcagcagcagcagcagcagcagcagcagcagcagcagcagcagcagcaacaggcagtggcagctgcagccgttcagcagtcaacgtcccagcaggcaacacagggaacctcaggccaggcaccacagctcttccactcacagactctcacaactgcacccttgccgggcaccactccactgtatccctcccccatgactcccatgacccccatcactcctgccacgccagcttcggagagttctgggattgtaccgcagctgcaaaatattgtatccacagtgaatcttggttgtaaacttgacctaaagaccattgcacttcgtgcccgaaacgccgaatataatcccaagcggtttgctgcggtaatcatgaggataagagagccacgaaccacggcactgattttcagttctgggaaaatggtgtgcacaggagccaagagtgaagaacagtccagactggcagcaagaaaatatgctagagttgtacagaagttgggttttccagctaagttcttggacttcaagattcagaatatggtggggagctgtgatgtgaagtttcctataaggttagaaggccttgtgctcacccaccaacaatttagtagttatgagccagagttatttcctggtttaatctacagaatgatcaaacccagaattgttctccttatttttgtttctggaaaagttgtattaacaggtgctaaagtcagagcagaaatttatgaagcatttgaaaacatctaccctattctaaagggattcaggaagacgacg

SEQ ID NO: 5413 - DNA, 813 bp, Homo sapiens
  source 1..813: mol_type = genomic DNA
atgaattccagccaaatatcactcagaatgaaacatgggagagttaacatgcagaagaaaccttcaaagtgtagtgaatgtgggaagttctttactcagagatcatctcttacccagcaccagaggattcacagaggagagaagccctatgtgtgcagtgaatgtggaagttgtttccgtaaacagtcaaatcttactcaacatctgagaattcataccggagagaaaccttataaatgtaatgaatgtgagaaagcctttcaaacaaaagcaattcttgttcagcatctgagaattcatactggagagaaaccctataaatgcaatgaatgtggaaaagccttttgtcagagcccatcccttattaaacaccagcgaattcatactggagagaaaccatataaatgtacagaatgtggcaaagccttcagtcagagcatatgccttactcgtcatcagagaagtcattctggagataaaccttttaagtgtaatgaatgtgggaaagcctttaatcagagtgcatgtctcatgcagcatcagagaattcattcaggagagaagccctacacatgcactgaatgtggtaaagccttcactcagaactcttcccttgttgaacatgaaaggactcacactggagagaaactttataagtgtagtgagtgtgaaaaaactttccgcaaacaagcacaccttagtgagcattacagaattcatactggagaaaaaccttatgagtgtgttggatgtgggaaatcctttaggcacagttcagcacttcttcgacatcagaggcttcatgctggagag

SEQ ID NO: 5414 - DNA, 1440 bp, Homo sapiens
  source 1..1440: mol_type = genomic DNA
atggccactgtccctggcctccagcccctgccaaccttggagcaggacctggaacaggaagagatcctgattgtgaaggtggaggaggacttctgcttggaagaggagccctccgtggagacggaggaccccagccctgagactttccgccagctcttccggctcttctgctaccaggaggtggctgggccccgggaggccctgagccgcctctgggagctgtgctgccgctggctgcggccggagctgcgcaccaaggagcagatcctggagctgctggtgctggagcagttcctgactgtgctgccgggggagatccaggctcgggtacgcgagcagcagccggagagcggtgaggaggccgtggtccttgtggaagggctgcagcggaagcccaggaaacacaggcagcggggctcagagctgctttctgatgacgaggtgcccctcgggatagggggacagttcttaaaacaccaggcagaggctcagccagaggatctgtccctggaggaagaggctcgattctccagccagcagcccccagcccagctgagccacaggccacagaggggcccgctgttgtggccagagagaggccctccagctccccggcatcaggagatggcgtcagcctcgcccttcctttcggcctggtcccaggtgcccgtgaacttggaggacgtggctgtatacctttctggggaggagccaagatgcatggacccagctcagcgggacgcgccgctggagaatgaaggacctgggatccagttggaggacggcggtgatggcagggaggatgccccgttgagaatggagtggtaccgagtgctctcggcacgatgccaggggcctggccacccgctcccaggtcagaggccagccccagtcaggggcttggtcaggcctgatcagccaagaggcggccccccaccaggaagacgggcttcccatggggctgacaagccgtacacctgccccgaatgtggcaaaggcttcagcaagacgtcccacttgaccaagcaccagcgcacacacacgggcgagcggccttacaagtgcctagtctgtgggaagggctttagcgaccgctccaacttcagcacgcaccagagggtgcacacaggcgagaagccctacccgtgccccgagtgtgggaagcgcttcagccagagctccagcctggtcatccaccgcaggacacacagcggggagcggccctatgcctgcacccagtgcgggaagcgcttcaacaacagctcgcacttcagcgcccaccgccggacgcacacaggtgagaagccctacacctgcccggcctgtggccggggcttccgccggggcaccgacctgcacaagcaccagcggacccacatgggggcaggctccttgccgacgctccagccggtggctcctggaggccccggtgccaaagcc

SEQ ID NO: 5415 - DNA, 1323 bp, Homo sapiens
  source 1..1323: mol_type = genomic DNA
atggccactgtccctggcctccagcccctgccaaccttggagcaggacctggaacaggaagagatcctgattgtgaaggtggaggaggacttctgcttggaagaggagccctccgtggagacggaggaccccagccctgagactttccgccagctcttccggctcttctgctaccaggaggtggctgggccccgggaggccctgagccgcctctgggagctgtgctgccgctggctgcggccggagctgcgcaccaaggagcagatcctggagctgctggtgctggagcagttcctgactgtgctgccgggggagatccaggctcgggtacgcgagcagcagccggagagcggtgaggaggccgtggtccttgtggaagggctgcagcggaagcccaggaaacacaggcagcggggctcagagctgctttctgatgacgaggtgcccctcgggatagggggacagttcttaaaacaccaggcagaggctcagccagaggatctgtccctggaggaagaggctcgattctccagccagcagcccccagcccagctgagccacaggccacagaggggcccgctgttgtggccagagagaggccctccagctccccggcatcaggagatggcgtcagcctcgcccttcctttcggcctggtcccaggtgcccgtgaacttggaggacgtggctgtatacctttctggggaggagccaagatgcatggacccagctcagcgggacgcgccgctggagaatgaaggacctgggatccagttggaggacggcggtgatggcagggaggatgccccgttgagaatggagtggtaccgagtgctctcggcacgatgccaggggcctggccacccgctcccaggtcagaggccagccccagtcaggggcttggtcaggcctgatcagccaagaggcggccccccaccaggaagacgggcttcccatggggctgacaagccgtacacctgccccgaatgtggcaaaggcttcagcaagacgtcccacttgaccaagcaccagcgcacacacacgggcgagcggccttacaagtgcctagtctgtgggaagggctttagcgaccgctccaacttcagcacgcaccagagggtgcacacaggcgagaagccctacccgtgccccgagtgtgggaagcgcttcagccagagctccagcctggtcatccaccgcaggacacacagcggggagcggccctatgcctgcacccagtgcgggaagcgcttcaacaacagctcgcacttcagcgcccaccgccggacgcacacaggtcacattctgaggtctgggtgcaca

SEQ ID NO: 5416 - DNA, 1887 bp, Homo sapiens
  source 1..1887: mol_type = genomic DNA
atggaatttagcatcaagcagagtcccctttctgttcagagtgttgtaaagtgcataaagatgaagcaggcaccagaaatcctcggcagtgccaacgggaagactccgagctgcgaggtgaaccgcgagtgttctgtgttcctcagcaaagcccagctctccagtagcctgcaggagggggtcatgcagaagtttaacggccacgacgccctgccctttattccagccgacaagctgaaagatcttacttcccgggtgtttaatggagaacccggcgcacacgatgccaaactgcgttttgagtcccaggaaatgaaagggattgggacaccccctaacactacccctatcaaaaatggctctccagaaattaagctgaaaatcaccaaaacatacatgaatgggaagcctctctttgaatcttccatttgtggtgacagtgctgctgatgtgtctcagtcagaagaaaatggacaaaaaccagaaaacaaggcgagaaggaacaggaagaggagcataaaatatgactccttgctggagcagggccttgtcgaagcagctcttgtgtctaagatctcaagtccttcagataaaaagattccagctaagaaagagtcttgtccaaacactggaagagacaaagaccacctgttgaaatacaacgttggtgatttggtgtggtccaaagtgtcgggttacccttggtggccttgcatggtttctgcagatccactccttcacagctataccaaacttaaaggtcagaaaaagagtgcacgccagtatcacgtacagttctttggtgacgccccagaaagagcttggatatttgagaagagcctcgtagcttttgaaggagaaggacagtttgaaaaattatgccaggaaagtgccaagcaggcacccacgaaagctgagaaaattaagctattgaaaccaatttcagggaaattgagggcccagtgggaaatgggcattgttcaagcagaagaagctgcaagcatgtcagtggaggagcggaaagccaagttcacctttctctatgtgggggaccagcttcatctcaaccctcaagtagccaaggaggctggcattgctgcagagtctttgggagaaatggcagaatcctcaggagtcagtgaagaagctgctgaaaaccccaagtctgtgagagaagagtgcattcccatgaagagaaggcggagggccaaactgtgtagctctgcagagaccctggagagtcaccccgacatagggaagagtactcctcaaaagacggcagaggctgaccccagaagaggagtagggtctcctcctgggaggaagaagaccacagtctccatgccacgaagcaggaagggagatgcagcatcccagtttttggtcttctgtcaaaaacacagggatgaggtggtagctgagcacccagatgcttcaggtgaggagattgaagagctgctcaggtcacagtggagtctgctgagtgagaagcagagagcacgctacaacaccaagtttgccctggtggcccctgtccaggctgaagaagactctggtaatgtaaatgggaaaaaaagaaaccacacaaagaggatacaggaccctacagaagatgctgaagctgaggacacacccaggaaaagactcaggacggacaagcacagtcttcggaagagagacacaatcactgacaaaacggccagaacaagctcttacaaggccatggaggcagcctcctcgctcaagagccaggcagcaacgaaaaatctgtctgatgcatgtaaaccactgaagaagcgaaatcgggcttccacggcagcatcttcagctcttgggtttagcaaaagttcatctccttctgcatccttaactgagaatgaggtaaaa

SEQ ID NO: 5417 - DNA, 4095 bp, Homo sapiens
  source 1..4095: mol_type = genomic DNA
atggaatttagcatcaagcagagtcccctttctgttcagagtgttgtaaagtgcataaagatgaagcaggcaccagaaatcctcggcagtgccaacgggaagactccgagctgcgaggtgaaccgcgagtgttctgtgttcctcagcaaagcccagctctccagtagcctgcaggagggggtcatgcagaagtttaacggccacgacgccctgccctttattccagccgacaagctgaaagatcttacttcccgggtgtttaatggagaacccggcgcacacgatgccaaactgcgttttgagtcccaggaaatgaaagggattgggacaccccctaacactacccctatcaaaaatggctctccagaaattaagctgaaaatcaccaaaacatacatgaatgggaagcctctctttgaatcttccatttgtggtgacagtgctgctgatgtgtctcagtcagaagaaaatggacaaaaaccagaaaacaaggcgagaaggaacaggaagaggagcataaaatatgactccttgctggagcagggccttgtcgaagcagctcttgtgtctaagatctcaagtccttcagataaaaagattccagctaagaaagagtcttgtccaaacactggaagagacaaagaccacctgttgaaatacaacgttggtgatttggtgtggtccaaagtgtcgggttacccttggtggccttgcatggtttctgcagatccactccttcacagctataccaaacttaaaggtcagaaaaagagtgcacgccagtatcacgtacagttctttggtgacgccccagaaagagcttggatatttgagaagagcctcgtagcttttgaaggagaaggacagtttgaaaaattatgccaggaaagtgccaagcaggcacccacgaaagctgagaaaattaagctattgaaaccaatttcagggaaattgagggcccagtgggaaatgggcattgttcaagcagaagaagctgcaagcatgtcagtggaggagcggaaagccaagttcacctttctctatgtgggggaccagcttcatctcaaccctcaagtagccaaggaggctggcattgctgcagagtctttgggagaaatggcagaatcctcaggagtcagtgaagaagctgctgaaaaccccaagtctgtgagagaagagtgcattcccatgaagagaaggcggagggccaaactgtgtagctctgcagagaccctggagagtcaccccgacatagggaagagtactcctcaaaagacggcagaggctgaccccagaagaggagtagggtctcctcctgggaggaagaagaccacagtctccatgccacgaagcaggaagggagatgcagcatcccagtttttggtcttctgtcaaaaacacagggatgaggtggtagctgagcacccagatgcttcaggtgaggagattgaagagctgctcaggtcacagtggagtctgctgagtgagaagcagagagcacgctacaacaccaagtttgccctggtggcccctgtccaggctgaagaagactctggtaatgtaaatgggaaaaaaagaaaccacacaaagaggatacaggaccctacagaagatgctgaagctgaggacacacccaggaaaagactcaggacggacaagcacagtcttcggaagagagacacaatcactgacaaaacggccagaacaagctcttacaaggccatggaggcagcctcctcgctcaagagccaggcagcaacgaaaaatctgtctgatgcatgtaaaccactgaagaagcgaaatcgggcttccacggcagcatcttcagctcttgggtttagcaaaagttcatctccttctgcatccttaactgagaatgaggtctcggacagcccgggagacgagccctcggagtccccatacgaaagtgcagacgaaacacaaactgaagtatctgtctcatccaaaaagtctgagcgaggagtgactgccaaaaaggagtatgtgtgccagctgtgtgagaagccgggcagcctcctgctctgtgaaggaccctgctgcggagctttccacctcgcctgccttgggctttcccggaggccagaagggaggttcacctgcagcgagtgtgcctcagggattcactcatgtttcgtgtgtaaagagagcaagacagatgttaagcgctgtgtggtaactcagtgtggaaaattttaccatgaggcttgtgtgaaaaaataccctctgactgtatttgagagccgaggtttccgctgccccctccacagctgtgtgagctgccatgcttccaacccttcaaacccaaggccgtcaaaaggtaaaatgatgcggtgtgtccgctgccccgttgcctatcacagcggggatgcttgtctggcagcaggatgctcagtgatcgcctccaacagcatcatctgcactgcccacttcactgctcggaaggggaagcgacaccacgcccacgtcaacgtgagctggtgcttcgtgtgctccaaaggggggagccttctgtgctgtgagtcctgcccagcggccttccaccctgactgcctgaacatcgagatgcctgacggcagctggttctgcaatgactgcagggctgggaagaagctgcacttccaggatatcatttgggtgaaacttgggaactacagatggtggccggcagaagtttgccatcccaaaaatgttcccccaaatattcagaaaatgaagcacgagattggagaattccctgtgtttttctttgggtctaaagattattactggacgcatcaggcgcgagtgttcccgtacatggagggggaccggggcagccgctaccagggggtcagagggatcggaagagtcttcaaaaacgcactgcaagaagctgaagctcgttttcgtgaaattaagcttcagagggaagcccgagaaacacaggagagcgagcgcaagcccccaccatacaagcacatcaaggtgaataagccttacgggaaagtccagatctacacagcggatatttcagaaatccctaagtgcaactgcaagcccacagatgagaatccttgtggctttgattcggagtgtctgaacaggatgctgatgtttgagtgccacccgcaggtgtgtcccgcgggcgagttctgccagaaccagtgcttcaccaagcgccagtacccagagaccaagatcatcaagacagatggcaaagggtggggcctggtcgccaagagggacatcagaaagggagaatttgttaacgagtacgttggggagctgatcgacgaggaggagtgcatggcgagaatcaagcacgcacacgagaacgacatcacccacttctacatgctcactatagacaaggaccgtataatagacgctggccccaaaggaaactactctcgatttatgaatcacagctgccagcccaactgtgagaccctcaagtggacagtgaatggggacactcgtgtgggcctgtttgccgtctgtgacattcctgcagggacggagctgacttttaactacaacctcgattgtctgggcaatgaaaaaacggtctgccggtgtggagcctccaattgcagtggattcctcggggatagaccaaagacctcgacgaccctttcatcagaggaaaagggcaaaaagaccaagaagaaaacgaggcggcgcagagcaaaaggggaagggaagaggcagtcagaggacgagtgcttccgctgcggtgatggcgggcagctggtgctgtgtgaccgcaagttctgcaccaaggcctaccacctgtcctgcctgggccttggcaagcggcccttcgggaagtgggaatgtccttggcatcattgtgacgtgtgtggcaaaccttcgacttcattttgccacctctgccccaattcgttctgtaaggagcaccaggacgggacagccttcagctgcaccccggacgggcggtcctactgctgtgagcatgacttaggggcggcatcggtcagaagcaccaagactgagaagccccccccagagccagggaagccgaaggggaagaggcggcggcggaggggctggcggagagtcacagagggcaaa

SEQ ID NO: 5418 - DNA, 1941 bp, Homo sapiens
  source 1..1941: mol_type = genomic DNA
atggaatttagcatcaagcagagtcccctttctgttcagagtgttgtaaagtgcataaagatgaagcaggcaccagaaatcctcggcagtgccaacgggaagactccgagctgcgaggtgaaccgcgagtgttctgtgttcctcagcaaagcccagctctccagtagcctgcaggagggggtcatgcagaagtttaacggccacgacgccctgccctttattccagccgacaagctgaaagatcttacttcccgggtgtttaatggagaacccggcgcacacgatgccaaactgcgttttgagtcccaggaaatgaaagggattgggacaccccctaacactacccctatcaaaaatggctctccagaaattaagctgaaaatcaccaaaacatacatgaatgggaagcctctctttgaatcttccatttgtggtgacagtgctgctgatgtgtctcagtcagaagaaaatggacaaaaaccagaaaacaaggcgagaaggaacaggaagaggagcataaaatatgactccttgctggagcagggccttgtcgaagcagctcttgtgtctaagatctcaagtccttcagataaaaagattccagctaagaaagagtcttgtccaaacactggaagagacaaagaccacctgttgaaatacaacgttggtgatttggtgtggtccaaagtgtcgggttacccttggtggccttgcatggtttctgcagatccactccttcacagctataccaaacttaaaggtcagaaaaagagtgcacgccagtatcacgtacagttctttggtgacgccccagaaagagcttggatatttgagaagagcctcgtagcttttgaaggagaaggacagtttgaaaaattatgccaggaaagtgccaagcaggcacccacgaaagctgagaaaattaagctattgaaaccaatttcagggaaattgagggcccagtgggaaatgggcattgttcaagcagaagaagctgcaagcatgtcagtggaggagcggaaagccaagttcacctttctctatgtgggggaccagcttcatctcaaccctcaagtagccaaggaggctggcattgctgcagagtctttgggagaaatggcagaatcctcaggagtcagtgaagaagctgctgaaaaccccaagtctgtgagagaagagtgcattcccatgaagagaaggcggagggccaaactgtgtagctctgcagagaccctggagagtcaccccgacatagggaagagtactcctcaaaagacggcagaggctgaccccagaagaggagtagggtctcctcctgggaggaagaagaccacagtctccatgccacgaagcaggaagggagatgcagcatcccagtttttggtcttctgtcaaaaacacagggatgaggtggtagctgagcacccagatgcttcaggtgaggagattgaagagctgctcaggtcacagtggagtctgctgagtgagaagcagagagcacgctacaacaccaagtttgccctggtggcccctgtccaggctgaagaagactctggtaatgtaaatgggaaaaaaagaaaccacacaaagaggatacaggaccctacagaagatgctgaagctgaggacacacccaggaaaagactcaggacggacaagcacagtcttcggaagagagacacaatcactgacaaaacggccagaacaagctcttacaaggccatggaggcagcctcctcgctcaagagccaggcagcaacgaaaaatctgtctgatgcatgtaaaccactgaagaagcgaaatcgggcttccacggcagcatcttcagctcttgggtttagcaaaagttcatctccttctgcatccttaactgagaatgagcttttgtgggagcccacaccagtcaagttggatttgaacccagctgctctgtactgcact

SEQ ID NO: 5419 - DNA, 2859 bp, Homo sapiens
  source 1..2859: mol_type = genomic DNA
atggaagaaagtagcagtgttgccatgttggtgccagatattggggaacaggaagctatactgactgctgaaagtatcatcagtccttcattggaaattgatgaacaaagaaaaactaaaccagatccattaatccatgttatccagaagttaagcaagatagtggaaaatgaaaagtcacaaaaatgtcttttaattgggaagaaacgcccacgttcaagtgctgcaacacactctcttgaaacccaagaactttgtgagattccggctaaagtaatccagtcacctgctgctgatactagaagggctgagatgtcacaaacaaattttacccctgacactcttgcccagaatgaagggaaggctatgtcttatcagtgtagcctttgtaagtttctatcatcatccttttccgtgttaaaagatcatattaagcaacatggtcagcaaaatgaagtgatactgatgtgctcagagtgccatattacatctagaagccaggaggaacttgaagcccacgtggtgaatgaccatgacaatgatgccaatatccacacccaatccaaagcccaacagtgcgtaagcccctccagctctttgtgtcggaaaaccacagaaagaaatgaaaccattccagatatcccagtaagtgtggacaatctacagactcatactgtccaaactgcatctgtggcagaaatgggtaggaggaaatggtatgcatacgaacagtacggcatgtatcgatgcttgttttgtagttatacttgtggccagcagagaatgttgaaaacacacgcttggaaacatgctggggaggttgattgctcctatccaatctttgaaaatgaaaatgaacccctaggcctgctggattcttcagcagctgctgcgcctggtggggtcgatgcagtcgtcattgctattggagagagtgaactgagtatccacaatgggccatcagtgcaagtgcagatttgcagctcagaacagttatcatcttcatctcctttagaacagagtgcagaaagaggagtacacctaagtcagtcagttaccctggaccccaatgaggaagaaatgctagaagtgatttctgatgcagaggagaatctgattcctgatagcctgcttacatcagcacagaaaatcatcagcagcagccccaataaaaaagggcatgttaacgtgatagtggagcgattgccaagtgctgaagaaaccctttcacagaagcgcttcctcatgaacactgaaatggaagaagggaaggacctgagcctgacagaagctcagattgggcgcgaaggaatggatgatgtttatcgtgctgataaatgtactgttgatattgggggattgatcataggctggagcagttcagagaaaaaagacgagttaatgaataaaggcctggctactgatgagaatgccccaccaggccggagaaggacaaattctgagtctcttcgattacactcattagctgcagaagcccttgtcacaatgcctataagagctgcagagttgacaagagccaacctggggcactatggagatataaaccttttagatccagatactagtcaaaggcaagtagatagtacattggcagcgtactcaaaaatgatgtcgccacttaaaaactcttcagatggattaactagtcttaaccaaagcaactccaccttggtagcactcccagagggtaggcaggaattgtcagatgggcaggttaagacaggcatcagcatgtccttactcaccgtcattgaaaaattgagagaaaggacagaccaaaacgcttcagacgatgacattttgaaagagttgcaggacaacgcccagtgccaacccaacagcgatacaagtttgtccggaaacaatgtggtggaatacatcccgaatgctgaacgaccctaccgttgccgcctgtgtcactacacaagtggcaacaagggctacatcaagcagcacttacgagtccatcgacagagacagccttatcagtgtcctatctgcgagcacatagcggacaacagcaaagatttggagagtcacatgatccaccactgtaagacaagaatataccagtgcaagcagtgtgaagaatccttccattataagagtcaattgaggaaccatgagagagaacagcacagtcttccagataccttgtcaatagcaacttctaatgagccaagaatttccagtgatacagctgatggaaaatgtgtccaggaagggaataagtcttcagtccagaaacaatatagatgtgatgtgtgtgattatacaagtacaacatatgttggtgtcagaaaccacaggcgaatccataactctgataagccgtacagatgctctctgtgtgggtatgtgtgtagccatcctccttctttgaagtctcatatgtggaaacatgcaagtgaccaaaattacaactacgaacaagtaaacaaggctattaacgacgcgatttcacaaagtggcagagttctggggaaatcccctggaaagactcaattaaagagcagtgaagagagtgcagatcccgtcactggaagttcagaaaatgcagtgtcatcttcagaactgatgtcccagactcccagtgaagttctgggtaccaacgagaatgagaaactgagccctacaagtaatacctcatatagtttagaaaaaatctccagtctggcccctcctagcatggagtactgcgttttactcttctgctgttgtatttgtggttttgaatcaaccagcaaagaaaacctcttggatcatatgaaagagcacgagggtgaaattgtaaacatcatcctgaataaggaccacaatacagctctaaacacaaat

SEQ ID NO: 5420 - DNA, 1332 bp, Homo sapiens
  source 1..1332: mol_type = genomic DNA
atgggaccattgcaatttagagatgtggccatagaattctctctggaggagtggcattgcctggacgctgcacagcggaatctatatagggatgtgatgttagagaactacagaaacctgatcttccttggtattgttgtctctaaaccaaacctgatcacctgtctggagcaaggaaaaaaacctttaactatgaagaggcatgagatgattgccaaacccccagttatgtattctcattttgcccaagacctttggtcagagcagagcataaaagattctttccaaaaagtgatactaagaagatatgaaaaatgtagacatgacaatttacagttaaaaaaaggctgtgaaagtgtagatgagtgtccagtgcacaaaagaggttataatggacttaaacaatgtttggcaactacccagagaaaaatatttcaatgtgatgaatatgtgaaattcttgcataaattttcaaattcaaacaaacataagataagagatactggaaaaaaatcttttaaatgtatagaatatgggaaaacttttaaccagtcttcaacccgtactacatataagaaaattgatgctggagagaaacgctataaatgtgaagaatgtggtaaagcctataagcagtcctcacaccttactacacataagaaaattcatactggagagaaaccctacaaatgtgaagaatgtggcaaagcctataagcagtcctgtaaccttactacacataagataattcatactggagagaaaccctacagatgtagagaatgtggcaaagcttttaaccaccctgcaacccttttttcacataagaaaattcatactggagagaaaccatacaagtgtgataaatgtggcaaagcctttatttcatcctcaacccttactaaacatgagataattcatactggagagaaaccctacaaatgtgaggaatgtggcaaagcttttaaccgttcctcaaaccttactaaacataagagaattcatactggagatgtaccctacaaatgtgacgaatgtggcaaaacctttacctggtactcaagcctctctaaacataagagagctcatactggagagaaaccctacaagtgtgaagaatgtggcaaagcctttactgcattctcaactctaactgaacataagataattcatactggagagaaaccgtacaaatgtgaagaatgtggcaaagcttttaactggtcctcagcccttaataaacataagaaaattcatattagacagaaaccctgcatagtgaagaatgtggaaaatcttttaaatgttcctcaacccttaataagcataaga

SEQ ID NO: 5421 - DNA, 1236 bp, Homo sapiens
  source 1..1236: mol_type = genomic DNA
atgggaccattgcaatttagagatgtggccatagaattctctctggaggagtggcattgcctggacgctgcacagcggaatctatatagggatgtgatgttagagaactacagaaacctgatcttccttgttatgtattctcattttgcccaagacctttggtcagagcagagcataaaagattctttccaaaaagtgatactaagaagatatgaaaaatgtagacatgacaatttacagttaaaaaaaggctgtgaaagtgtagatgagtgtccagtgcacaaaagaggttataatggacttaaacaatgtttggcaactacccagagaaaaatatttcaatgtgatgaatatgtgaaattcttgcataaattttcaaattcaaacaaacataagataagagatactggaaaaaaatcttttaaatgtatagaatatgggaaaacttttaaccagtcttcaacccgtactacatataagaaaattgatgctggagagaaacgctataaatgtgaagaatgtggtaaagcctataagcagtcctcacaccttactacacataagaaaattcatactggagagaaaccctacaaatgtgaagaatgtggcaaagcctataagcagtcctgtaaccttactacacataagataattcatactggagagaaaccctacagatgtagagaatgtggcaaagcttttaaccaccctgcaacccttttttcacataagaaaattcatactggagagaaaccatacaagtgtgataaatgtggcaaagcctttatttcatcctcaacccttactaaacatgagataattcatactggagagaaaccctacaaatgtgaggaatgtggcaaagcttttaaccgttcctcaaaccttactaaacataagagaattcatactggagatgtaccctacaaatgtgacgaatgtggcaaaacctttacctggtactcaagcctctctaaacataagagagctcatactggagagaaaccctacaagtgtgaagaatgtggcaaagcctttactgcattctcaactctaactgaacataagataattcatactggagagaaaccgtacaaatgtgaagaatgtggcaaagcttttaactggtcctcagcccttaataaacataagaaaattcatattagacagaaaccctgcatagtgaagaatgtggaaaatcttttaaatgttcctcaacccttaataagcataaga

SEQ ID NO: 5422 - DNA, 1374 bp, Homo sapiens
  source 1..1374: mol_type = genomic DNA
atggccagtacaattactggaagtcaggattgtattgtgaatcatcgaggggaagtggatggggagcctgaactagatatttccccttgtcaacagtggggagaagcatcttctcctatttccagaaacagggacagtgtgatgactcttcaaagtggttgtttcgaaaacattgaaagtgaaacatatttgcctttgaaagtctcaagccaaatagacacacaagactcttcagtgaagttctgtaagaatgagcctcaggatcatcaggaaagcagacgtctctttgtaatggaagaaagcactgagagaaaagtgataaagggggaaagttgttcagagaaccttcaagttaaactggtgtctgatggacaagaactggcctcgccattgttaaatggtgaggcaacttgccagaatggccagttaaaagaatctttggatcccattgactgtaactgcaaagacattcatggatggaaatcacaggtggtcagttgtagtcagcagagagctcatacagaggagaaaccctgtgaccataataactgtgggaaaatacttaacaccagcccagatggtcatccatatgagaaaatccacactgcagagaaacaatacgaatgtagtcagtgtggtaagaacttcagtcaaagctcagagctactacttcatcagagagaccacacagaagaaaaaccctacaaatgtgagcaatgtgggaagggcttcacaaggagctcgagtctgcttatccatcaggcagtccacacagatgagaagccttataagtgtgacaagtgtgggaagggcttcaccaggagctcaagtctgctcatccatcatgccgtccatacaggcgaaaaaccttataaatgtgacaagtgtgggaagggctttagtcagagctccaaactgcacatccaccagcgagtccacactggagagaagccctatgagtgtgaggagtgtggtatgagcttcagtcagcgctcaaacctgcacatccaccagcgagtacacacaggagagaggccctacaagtgtggtgagtgtgggaagggcttcagtcagagctcgaaccttcacattcaccggtgcatccacacaggagagaagccttaccaatgctatgagtgtgggaagggtttcagccagagctcggatcttcgcatccatctcagagtccacactggagagaagccctatcactgtggcaagtgtgggaagggatttagccagagttccaaactcctcatccaccagagagtacatactggagagaagccctatgagtgcagcaagtgtgggaagggcttcagccagagctccaaccttcacatccaccagcgggttcacaagaaagatcctcgc

SEQ ID NO: 5423 - DNA, 5541 bp, Homo sapiens
  source 1..5541: mol_type = genomic DNA
atgccgcggggccgccccccgaagcccagggagagcaaggcgcgcggcgactccgatggagttttaacattgaatgcggagaacactaattatgcctatcaagttccaaacttccataaatgtgaaatctgtctactatcttttccaaaagaatcccagtttcaacgccacatgagggatcacgagcgaaatgacaagccacatcgatgtgaccagtgcccccaaacatttaatgttgaattcaacctgacacttcataaatgcacccacagcggggaagatcctacctgccctgtgtgtaacaagaaattctccagagtggctagtctcaaagcgcatattatgctacatgaaaaggaagagaatctcatctgttctgagtgtggggatgagtttactctgcagagtcagctggccgtgcacatggaggagcaccgccaggagctggctggaacccggcagcatgcctgcaaggcctgcaagaaagagttcgagacctcctcggagctgaaggaacacatgaagactcattacaaaattagggtatcaagtacaaggtcttataaccggaatatcgacagaagtggattcacgtattcgtgtccgcactgtggaaagacgtttcaaaagccaagccagttaacgcgacacattaggatacacacaggtgaaaggccgttcaaatgtagtgaatgtggaaaggcttttaaccagaagggggcactgcagacccacatgatcaagcacacaggtgaaaaaccccatgcctgtgccttctgtcctgccgccttctctcagaaagggaatcttcagtcgcacgtgcagcgagtccactcagaggtcaagaatggtcctacctataactgtacagaatgtagttgtgtatttaaaagtttaggcagcttaaacacgcatatcagcaagatgcatatgggtgggccacagaattcaacaagttctacagagactgctcatgttttaacggccacactttttcagacgttacctcttcaacagacggaagcccaagccacgtcggcctcaagccagccgagctcccaggcggtgagcgacgtcatccagcagctcctggagctctcagagccggcgccggtggagtcggggcagtccccgcagcctgggcagcagctgagcatcacagtgggcatcaaccaggacattttacagcaagccttagaaaacagtgggctgtcttcaattccagctgcagcacatcctaatgactcctgccatgccaagacctctgcaccacacgctcaaaacccagatgtttccagcgtttcaaatgagcagacggaccccacagacgcagagcaagaaaaagaacaggaaagcccggagaaactggataaaaaagaaaaaaaaatgataaagaagaagtcaccgtttctacctggctccatccgcgaggagaacggcgtgcgctggcatgtgtgtccctactgcgccaaggagttccgcaagcccagcgacctggtccgccacatccgcatccacacccacgagaagcccttcaagtgcccgcagtgcttccgcgccttcgccgtgaagagcacgctgacagcgcacatcaagacgcacaccggcatcaaggcgttcaagtgccagtactgcatgaagagcttctccacctctggcagcctcaaggtgcacattcgcctgcacacaggagttagaccttttgcttgtcctcactgtgacaaaaaatttcgaacctcaggccataggaagactcacattgcttcccactttaaacatacggaattaaggaaaatgaggcaccagcgtaaacctgcaaaggtccgtgttggcaagacgaatattccagtccctgatattcctttgcaggaaccaatcctcataactgacttaggtctcatccagcccattccaaaaaaccagtttttccaaagctatttcaataataattttgtcaatgaagcagatagaccatacaagtgtttttactgtcatcgtgcatataaaaaatcttgccaccttaaacaacacatcagatcccatacaggtgaaaaaccttttaaatgttctcagtgtggaagaggctttgtttctgcaggcgtgctcaaagcacacatcagaacacacacaggactgaaatctttcaagtgtctgatatgtaatggggctttcactactggtggcagcttacggcgacacatgggtatccacaacgaccttcgtccctatatgtgtccctattgccaaaaaacatttaagacttcactaaattgcaaaaagcacatgaaaacccacagatatgagcttgcccagcagctccaacagcatcagcaggcagcctcgatagatgacagcactgtagaccagcagagcatgcaggcctccactcaaatgcaggtggagatcgagagcgacgagctgccgcagacggcagaggtggtcgcagcgaaccccgaggccatgctggacctggagcctcagcatgtggtgggcacggaggaagcagggctgggccagcagttggcagatcagcccctggaagcagatgaagatgggtttgtggctccacaggaccctctgcgagggcacgtagaccagtttgaagagcagagccctgcgcaacagtccttcgaaccagcagggctaccccaaggttttacagtgactgatacgtaccatcagcagcctcagtttccacctgtccaacagctacaggattccagcacacttgagtctcaggccctctccacaagcttccaccagcagagcttgctgcaggctcccagctctgatgggatgaatgtaacaactcgcttgattcaggagtcatcccaagaggaactggacctgcaggcacaaggttcccagtttctggaggacaacgaggaccagagcaggcgctcttacaggtgtgactattgcaacaaaggctttaagaagtccagccacctgaagcagcatgtgcggtcgcacaccggggaaaagccctacaagtgcaagctctgtggacgcggctttgtttcctctggggtcctcaagtcccacgagaagacacacacaggagtgaaggcgttcagctgcagtgtgtgcaatgcttccttcaccaccaatggcagcctcacccggcacatggccacacatatgagcatgaagccttataagtgtccgttttgtgaggagggtttccgaactacagtgcattgtaaaaagcacatgaagagacaccaaacagtcccctctgctgtgtcagccactggagagacagaaggaggagacatttgtatggaggaagaggaagaacattctgacagaaatgcatcacggaagtctcgtcctgaggtcatcactttcacggaggaggagacagcccagttagccaagatccggccgcaggagagcgccacggtgtcagagaaggtcctggtgcagtccgcggcagaaaaggaccgcatcagtgagctgagggacaagcaggcggagctgcaggacgagcccaagcacgccaactgctgcacatactgccccaagagcttcaagaaacctagcgacctggtgaggcatgttcgaatccatactggagaaaagccatacaaatgtgatgaatgtggaaagagttttactgtgaaatccactctcgattgtcatgtgaagactcacacaggtcagaagctcttcagctgtcacgtctgcagcaacgccttctccacgaagggaagtctgaaggtccacatgcgcctgcacacgggagccaagcccttcaaatgcccgcattgcgagctgcgtttccgtacctcgggtagaagaaagacacacatgcagtttcattataaaccagacccaaagaaggccagaaagcctatgactcgaagctcatcggaaggactgcagcctgtaaacctcctcaactcctcctctactgacccaaacgtgtttatcatgaacaactctgttctaacaggacagtttgatcagaatctgctgcaaccaggactggtgggccaagctattctccctgcctctgtgtcagctgggggtgacctgaccgtgtctctgacagatgggagcctggctaccctagaaggcatccagttacagttggctgctaacttggttggaccaaatgtacagatttctggaatcgatgctgccagcattaataacattacgttgcagattgatccaagcattctgcagcagacgctacagcagggcaacctattggctcagcagctcacgggggagcctggcctggccccacagaacagctctctccagacatcggacagcacggtccctgccagtgttgtcatccagcccatctcaggcctgtccttacagcccacagtgacctctgcgaacctgaccataggcccgctgtctgagcaggattcagtgctgaccactaacagcagtgggacccaagacctcactcaagtgatgacttcgcaaggtctagtgtccccctccggcggtccccacgagatcaccctgaccattaacaactccagcctgagccaggtcctggcacaggccgctgggcccactgccacgtcttcctcggggtctccacaggaaattaccctgactatctccgaacttaacactacaagcggaagccttccttcaacaacaccgatgtctccatcggccatctcgactcagaacctggtcatgtcctcgtcgggcgtgggaggtgacgctagtgtcacgctgacgctggccgatactcagggtatgctatctggaggcctggacactgtcacactcaacatcacctctcagggtcagcagttcccagcgctcctcacggatccctctctctcgggccagggtggagcaggctcgccgcaagtcatactagtgagccacacgccacagtcagcgtctgctgcttgtgaagaaatagcctaccaggtagctggcgtctctgggaacctggccccgggcaaccagccagagaaggagggccgggcgcaccagtgcctggagtgtgaccgcgccttctcatcggcggcggtgctcatgcaccacagcaaggaggtgcatggccgggagcgcatccacggctgccccgtgtgcaggaaggccttcaagcgcgccacgcacctcaaggagcacatgcagacacaccaggccggcccctctttgagctcccagaagccaagagtgtttaaatgtgacacttgtgagaaggcatttgccaaaccaagccagctggagcgccacagccgcatacatacaggggagcggccgttccattgcacgctttgtgagaaagccttcaaccagaagagtgcgctgcaggtgcacatgaagaagcacacgggggagcggccctacaagtgtgcctactgcgtcatgggcttcacgcagaagagcaacatgaagctgcacatgaagcgggcgcacagctatgctggagctctgcaggagtctgcaggtcacccggagcaggacggggaggagctgagccggaccctccacctggaggaggtggtgcaggaggccgccggcgagtggcaggccctcacccacgtcttc

SEQ ID NO: 5424 - DNA, 5535 bp, Homo sapiens
  source 1..5535: mol_type = genomic DNA
atgggcctttgtgggctgctggagagatgttggctgcaccatgacccagatggagttttaacattgaatgcggagaacactaattatgcctatcaagttccaaacttccataaatgtgaaatctgtctactatcttttccaaaagaatcccagtttcaacgccacatgagggatcacgagcgaaatgacaagccacatcgatgtgaccagtgcccccaaacatttaatgttgaattcaacctgacacttcataaatgcacccacagcggggaagatcctacctgccctgtgtgtaacaagaaattctccagagtggctagtctcaaagcgcatattatgctacatgaaaaggaagagaatctcatctgttctgagtgtggggatgagtttactctgcagagtcagctggccgtgcacatggaggagcaccgccaggagctggctggaacccggcagcatgcctgcaaggcctgcaagaaagagttcgagacctcctcggagctgaaggaacacatgaagactcattacaaaattagggtatcaagtacaaggtcttataaccggaatatcgacagaagtggattcacgtattcgtgtccgcactgtggaaagacgtttcaaaagccaagccagttaacgcgacacattaggatacacacaggtgaaaggccgttcaaatgtagtgaatgtggaaaggcttttaaccagaagggggcactgcagacccacatgatcaagcacacaggtgaaaaaccccatgcctgtgccttctgtcctgccgccttctctcagaaagggaatcttcagtcgcacgtgcagcgagtccactcagaggtcaagaatggtcctacctataactgtacagaatgtagttgtgtatttaaaagtttaggcagcttaaacacgcatatcagcaagatgcatatgggtgggccacagaattcaacaagttctacagagactgctcatgttttaacggccacactttttcagacgttacctcttcaacagacggaagcccaagccacgtcggcctcaagccagccgagctcccaggcggtgagcgacgtcatccagcagctcctggagctctcagagccggcgccggtggagtcggggcagtccccgcagcctgggcagcagctgagcatcacagtgggcatcaaccaggacattttacagcaagccttagaaaacagtgggctgtcttcaattccagctgcagcacatcctaatgactcctgccatgccaagacctctgcaccacacgctcaaaacccagatgtttccagcgtttcaaatgagcagacggaccccacagacgcagagcaagaaaaagaacaggaaagcccggagaaactggataaaaaagaaaaaaaaatgataaagaagaagtcaccgtttctacctggctccatccgcgaggagaacggcgtgcgctggcatgtgtgtccctactgcgccaaggagttccgcaagcccagcgacctggtccgccacatccgcatccacacccacgagaagcccttcaagtgcccgcagtgcttccgcgccttcgccgtgaagagcacgctgacagcgcacatcaagacgcacaccggcatcaaggcgttcaagtgccagtactgcatgaagagcttctccacctctggcagcctcaaggtgcacattcgcctgcacacaggagttagaccttttgcttgtcctcactgtgacaaaaaatttcgaacctcaggccataggaagactcacattgcttcccactttaaacatacggaattaaggaaaatgaggcaccagcgtaaacctgcaaaggtccgtgttggcaagacgaatattccagtccctgatattcctttgcaggaaccaatcctcataactgacttaggtctcatccagcccattccaaaaaaccagtttttccaaagctatttcaataataattttgtcaatgaagcagatagaccatacaagtgtttttactgtcatcgtgcatataaaaaatcttgccaccttaaacaacacatcagatcccatacaggtgaaaaaccttttaaatgttctcagtgtggaagaggctttgtttctgcaggcgtgctcaaagcacacatcagaacacacacaggactgaaatctttcaagtgtctgatatgtaatggggctttcactactggtggcagcttacggcgacacatgggtatccacaacgaccttcgtccctatatgtgtccctattgccaaaaaacatttaagacttcactaaattgcaaaaagcacatgaaaacccacagatatgagcttgcccagcagctccaacagcatcagcaggcagcctcgatagatgacagcactgtagaccagcagagcatgcaggcctccactcaaatgcaggtggagatcgagagcgacgagctgccgcagacggcagaggtggtcgcagcgaaccccgaggccatgctggacctggagcctcagcatgtggtgggcacggaggaagcagggctgggccagcagttggcagatcagcccctggaagcagatgaagatgggtttgtggctccacaggaccctctgcgagggcacgtagaccagtttgaagagcagagccctgcgcaacagtccttcgaaccagcagggctaccccaaggttttacagtgactgatacgtaccatcagcagcctcagtttccacctgtccaacagctacaggattccagcacacttgagtctcaggccctctccacaagcttccaccagcagagcttgctgcaggctcccagctctgatgggatgaatgtaacaactcgcttgattcaggagtcatcccaagaggaactggacctgcaggcacaaggttcccagtttctggaggacaacgaggaccagagcaggcgctcttacaggtgtgactattgcaacaaaggctttaagaagtccagccacctgaagcagcatgtgcggtcgcacaccggggaaaagccctacaagtgcaagctctgtggacgcggctttgtttcctctggggtcctcaagtcccacgagaagacacacacaggagtgaaggcgttcagctgcagtgtgtgcaatgcttccttcaccaccaatggcagcctcacccggcacatggccacacatatgagcatgaagccttataagtgtccgttttgtgaggagggtttccgaactacagtgcattgtaaaaagcacatgaagagacaccaaacagtcccctctgctgtgtcagccactggagagacagaaggaggagacatttgtatggaggaagaggaagaacattctgacagaaatgcatcacggaagtctcgtcctgaggtcatcactttcacggaggaggagacagcccagttagccaagatccggccgcaggagagcgccacggtgtcagagaaggtcctggtgcagtccgcggcagaaaaggaccgcatcagtgagctgagggacaagcaggcggagctgcaggacgagcccaagcacgccaactgctgcacatactgccccaagagcttcaagaaacctagcgacctggtgaggcatgttcgaatccatactggagaaaagccatacaaatgtgatgaatgtggaaagagttttactgtgaaatccactctcgattgtcatgtgaagactcacacaggtcagaagctcttcagctgtcacgtctgcagcaacgccttctccacgaagggaagtctgaaggtccacatgcgcctgcacacgggagccaagcccttcaaatgcccgcattgcgagctgcgtttccgtacctcgggtagaagaaagacacacatgcagtttcattataaaccagacccaaagaaggccagaaagcctatgactcgaagctcatcggaaggactgcagcctgtaaacctcctcaactcctcctctactgacccaaacgtgtttatcatgaacaactctgttctaacaggacagtttgatcagaatctgctgcaaccaggactggtgggccaagctattctccctgcctctgtgtcagctgggggtgacctgaccgtgtctctgacagatgggagcctggctaccctagaaggcatccagttacagttggctgctaacttggttggaccaaatgtacagatttctggaatcgatgctgccagcattaataacattacgttgcagattgatccaagcattctgcagcagacgctacagcagggcaacctattggctcagcagctcacgggggagcctggcctggccccacagaacagctctctccagacatcggacagcacggtccctgccagtgttgtcatccagcccatctcaggcctgtccttacagcccacagtgacctctgcgaacctgaccataggcccgctgtctgagcaggattcagtgctgaccactaacagcagtgggacccaagacctcactcaagtgatgacttcgcaaggtctagtgtccccctccggcggtccccacgagatcaccctgaccattaacaactccagcctgagccaggtcctggcacaggccgctgggcccactgccacgtcttcctcggggtctccacaggaaattaccctgactatctccgaacttaacactacaagcggaagccttccttcaacaacaccgatgtctccatcggccatctcgactcagaacctggtcatgtcctcgtcgggcgtgggaggtgacgctagtgtcacgctgacgctggccgatactcagggtatgctatctggaggcctggacactgtcacactcaacatcacctctcagggtcagcagttcccagcgctcctcacggatccctctctctcgggccagggtggagcaggctcgccgcaagtcatactagtgagccacacgccacagtcagcgtctgctgcttgtgaagaaatagcctaccaggtagctggcgtctctgggaacctggccccgggcaaccagccagagaaggagggccgggcgcaccagtgcctggagtgtgaccgcgccttctcatcggcggcggtgctcatgcaccacagcaaggaggtgcatggccgggagcgcatccacggctgccccgtgtgcaggaaggccttcaagcgcgccacgcacctcaaggagcacatgcagacacaccaggccggcccctctttgagctcccagaagccaagagtgtttaaatgtgacacttgtgagaaggcatttgccaaaccaagccagctggagcgccacagccgcatacatacaggggagcggccgttccattgcacgctttgtgagaaagccttcaaccagaagagtgcgctgcaggtgcacatgaagaagcacacgggggagcggccctacaagtgtgcctactgcgtcatgggcttcacgcagaagagcaacatgaagctgcacatgaagcgggcgcacagctatgctggagctctgcaggagtctgcaggtcacccggagcaggacggggaggagctgagccggaccctccacctggaggaggtggtgcaggaggccgccggcgagtggcaggccctcacccacgtcttc

SEQ ID NO: 5425 - DNA, 2214 bp, Homo sapiens
  source 1..2214: mol_type = genomic DNA
atgaccaagttccaggaggcagtgacattcaaggatgtggctgtggccttcactgaggaggagctggggctgctggactctgcccagaggaagctgtaccgagatgtgatgctggagaactttaggaacctggtttcagtgggacatcagtccttcaaaccagatatgatatcccagttggagagggaagaaaagctttggatgaaggagcttcaaacccaaagaggtaagcattcaggagacaggaatcaaaatgagatggcaactcttcacaaagcaggattaaggtgcttttcactgggagagctttcatgctggcaaatcaagagacacattgcgagcaaattagccagaagtcaagactccatgataaatattgaaggaaagagctctcagttccccaagcaccatgattccccctgtcaagtgggagcaggagaatctattcaagcttctgtggatgacaactgtctagtgaatcacataggggatcattccagtatcattgaaaatcaagaatttccaactgggaaagttccgaattcttggagtaaaatatatctgaatgagacacagaattatcagagaagttgtaagcagactcagatgaaaaacaaactatgtatatttgctccatatgttgacattttcagttgtatttcacaccaccatgatgataatatagtgcacaaaagagataaagttcatagcaatagtgattgtggtaaagataccctaaaggtatcacctcttacccagcgtagtattcacacaggacagaaaacctaccagggtaatgaatgtgaagaagccttcaatgatagctccagtcttgaacttcataaacaggtacacttgggaaagaagtctccagcgtgtagtacacatgagaaggacaccagttatagctcaggtattcctgttcaacaaagtgttcgtactgggaaaaaacgctattggtgtcatgaatgtggtaaaggtttcagtcagagctcaaatctgcaaactcatcagagagtccacacaggggagaaaccctatacatgccacgagtgtggtaagagctttaatcagagctcacatctttatgctcatttgcctattcacacaggagagaagccctatagatgtgacagttgtgggaagggcttcagtcgtagcacagatcttaacattcattgcagagttcacactggagagaaaccttataaatgtgaggtgtgtgggaagggcttcactcagagatcacatcttcaggcccatgaaagaattcacactggagagaaaccatataaatgtggggattgtggtaaacgctttagttgtagctcaaatcttcatacccatcagagagtccacactgaagaaaaaccatacaaatgtgatgagtgtggtaagtgctttagtttgagctttaatcttcatagtcatcaacgagtccacacaggagaaaaaccatataaatgtgaagagtgtggtaagggttttagttcagcctcaagtttccagagccatcagagggtccatacaggagagaaaccatttcgatgcaacgtgtgtgggaaaggcttcagtcagagttcatactttcaagcacatcagagagtccacactggagaaaaaccatacaaatgtgaagtgtgtgggaagcgcttcaattggagcttgaatcttcacaatcatcagagagtccacaccggagagaaaccctacaaatgtgaagagtgtggtaagggtttcagtcaggcttcaaatcttcaagcccatcagagcgtccacactggggaaaaaccattcaagtgtgatgcatgtcagaagcgattcagtcaggcctcacaccttcaagcccatcagagagtccacaccggagagaaaccatataaatgtgacacttgtggtaaggccttcagccagaggtcaaatcttcaagtccatcagataattcacactggagagaaaccatttaaatgtgaggaatgtgggaaagaattcagttggagtgctggtctcagtgcccatcagagggtccacacaggagagaaaccctatacgtgtcagcagtgtgggaagggcttcagtcaggcctcacattttcacacacaccagagagtccacactggagagaggccttacatatgtgatgtctgttgtaagggcttcagtcagaggtcacatctcatctaccatcagagagtccacactggagggaatctg

SEQ ID NO: 5426 - DNA, 2100 bp, Homo sapiens
  source 1..2100: mol_type = genomic DNA
atgaccacattcaaggagggactgaccttcaaggatgtggctgtggtcttcactgaggaggagctggggctgctggaccctgtccagaggaatctgtaccaagatgtgatgctggagaacttcaggaacctgctgtcagtggggcatcaccccttcaaacatgatgtattccttttagaaaaggaaaaaaagcttgatataatgaagacagcaactcaaagaaaagggaaatcagcagacaagatccaaagtgaggtggagactgttccagaagcaggacgacatgaagagctttactgggggcaaatctggaaacagattgcaagtgatttaatcaagtatgaagactctatgataagtatttctcggttccccagacaaggtgatttgtcctgccaggttagggcaggactatatacaactcacacaggacagaaattttaccaatgtgatgagtacaaaaaatccttcactgatgtcttcaactttgatcttcatcaacagttacactcaggagagaagtctcatacatgtgatgagtgtggaaaaagcttctgttacatctcagcccttcatattcatcaaagagtccacatgggagagaaatgctataagtgtgacgtgtgtggtaaggaatttagtcagagctcacatcttcaaactcatcagagagtccacactgtagagaaaccattcaaatgtgtggaatgtgggaaaggcttcagtcgtagatcaacacttactgtacattgcaaattacactcaggagagaaaccttacaattgtgaggaatgtggaagggccttcatacatgcttcccatcttcaggaacatcagagaattcatactggggagaaaccattcaaatgtgatacatgtggtaagaacttccgtcgtagatcagcacttaataatcattgcatggtccacacaggagagaaaccatacaaatgtgaggactgtggtaagtgtttcacttgtagctcaaaccttcgtatccatcaaagggtccacacaggagagaaaccttacaagtgtgaagaatgtggtaagtgctttattcagccttcacaatttcaggcccatcggagaatccacactggagagaaaccatacgtatgtaaagtgtgtggtaagggtttcatttacagttcaagttttcaggcccatcagggagtccacactggagagaagccatacaaatgcaatgagtgtgggaagagcttcagaatgaaaattcattatcaagtgcatctggtagtccacacaggggaaaaaccctataaatgtgaagtatgtggtaaagccttccgtcagagttcatatcttaaaatccatctgaaagcacatagtgtacagaaaccttttaagtgtgaagagtgtgggcagggcttcaatcagagctcacgacttcagattcaccagctgatccataccggtgagaaaccatacaaatgtgaagagtgcggaaagggatttagtcgtagagcagatcttaaaattcattgtaggatccacacaggggagaaaccatataattgtgaggagtgtgggaaggtcttcagtcaggcctcgcatcttctaacccatcagagagttcacagtggggaaaaaccatttaaatgtgaagagtgtgggaagagcttcagtcggagtgcacaccttcaagcccatcaaaaagtccacactggagaaaagccatacaaatgtggggagtgtggaaagggcttcaagtggagcttgaaccttgacatgcatcagagggtgcacacaggagaaaaaccctatacatgtggggagtgtgggaagcacttcagtcaggcctcaagtctccaacttcatcagagtgtccacacaggagagaaaccatacaaatgtgatgtatgtggtaaagtcttcagtcggtcttcacaattacagtatcataggcgagttcacactggggaaaaaccttacaaatgtgagatatgtggtaagaggttcagctggcgatcaaatcttgtaagtcatcacaaaattcatgctgctggtacattttatgaaaatgatgagaatagtaagaacatcagagagttgtcagagggaggaagttctacaagg

SEQ ID NO: 5427 - DNA, 3294 bp, Homo sapiens
  source 1..3294: mol_type = genomic DNA
atggcggagcgtggcggggacgggggcgagagtgaacgattcaacccgggggagctcaggatggcccaacagcaggccttgaggttccgaggtccggctcccccaccaaatgcagtgatgcgaggcccaccacctctgatgcgacctcctccaccttttggtatgatgcgaggccctcctccaccaccacggccgccctttggacgtcctccttttgatcctaatatgccgccaatgcctcctccaggagggatacctccacctatgggccctccacacctccagagaccacctttcatgcctcctcccatgagttccatgcctcctcctccgggtatgatgtttccaccaggaatgcctcctgtgactgctcctggtactccagcactacctcctacggaggagatatgggttgaaaataaaactccagatgggaaggtttattattataatgctcggacacgtgaatctgcatggaccaagccagatggagttaaggttattcagcaatcagaactgacacctatgcttgcagcccaggcacaggttcaggctcaggcccaggcgcaggctcaggcccaggcgcaggctcaggcccaggcacaagctcaggcccaggctcaggctcaggcccaggcccaggcccaggcccaggcccaggcccaagcccaagcccaggcccaggctcaggctcaggcacaagctcaggcccaggcccaggctcaggtccaggcccaggtccaggcacaagtgcaagcacaagcagttggagcttccacccctacgaccagtagcccagcacctgcagtatccacttcaacatcatcatccaccccttcctctaccacttctaccacaacaactgctacttcagttgcgcagacagtatcaacacccacaacacaagatcagaccccaagttctgctgtttcagttgccacgcctacagttagtgtttcaactcctgctcctacagccacacctgtgcaaaccgttccccagccgcaccctcagacgttacctcctgctgttcctcattcagtacctcagccaacaacagcaatacctgcttttccaccagtaatggtacctccgtttcgtgttccccttcctggcatgccaattccacttccaggtgtagcaatgatgcaaatagtcagctgcccgtatgtaaagacagtcgctaccaccaagaccggtgtattgccaggaatggcccctcctatcgtacccatgatacatccccaggttgctattgcagcttcacctgctaccttagctggagcaacagcagtttctgaatggactgaatataaaacagcagatgggaagacatattattataataatagaacattagaatcaacctgggaaaaaccccaagaactaaaggaaaaagaaaagttagaagagaagattaaagagccaattaaagaaccctctgaagagcctctgccaatggagacggaggaggaggatcctaaagaagagcctataaaggagataaaggaggagcccaaagaagaggagatgactgaagaagaaaaggctgcccagaaggcaaagccagttgctactgctcctattcctggtactccatggtgtgtcgtttggactggtgatgagcgggtcttcttttataatcccaccactcgtctttctatgtgggaccgacctgatgatctgattggcagggcagatgttgacaaaattattcaggagccccctcataaaaaaggaatggaggaattgaagaaactaaggcacccaactccgacaatgctgtcgatccaaaagtggcaattctctatgagtgcaattaaagaggaacaagaattaatggaagaaattaatgaagatgagcctgttaaagcaaaaaaacggaagagagacgataataaagacattgactcagagaaagaagctgccatggaagctgaaattaaagctgcccgagaaagggccattgtccctctggaggctcgaatgaagcagttcaaggacatgctgctagagagaggggtgtctgctttttcaacgtgggagaaggagttgcacaagatagtttttgatccccggtacttacttctcaatcctaaagagagaaaacaggtgtttgatcagtatgtaaagaccagggcagaggaagaacgcagggaaaagaaaaataaaataatgcaagccaaggaagatttcaaaaaaatgatggaagaagcaaaatttaatccaagagcaacttttagtgaatttgcagccaagcatgctaaagattcaagattcaaagcaattgaaaagatgaaagaccgagaagccttgtttaatgagtttgtggccgctgctaggaagaaagagaaagaagattcgaagaccagaggtgagaagattaaatcggatttctttgaactattatctaatcatcacttggacagtcagtctcgatggagcaaagtaaaagacaaagtagaaagtgatccacgttacaaagcagtagatagttcatcaatgagagaagaccttttcaaacagtacattgaaaaaatagccaagaatttagactcagaaaaagaaaaggagcttgaaaggcaagcccgcattgaggcaagccttcgagaacgagaaagggaggttcaaaaggcccgttcagaacaaacaaaagaaatagatcgagagagagagcagcacaaacgagaagaagctatccagaatttcaaagctcttctgtctgacatggtacgttcttcagatgtgtcatggtctgatactcgtaggaccctccgaaaagatcaccgctgggaatctggatccttattggaaagagaggagaaagagaagctttttaatgaacacattgaagcacttaccaaaaaaaagagagagcactttaggcaacttctggatgaaacttctgcaattaccttaacatccacgtggaaagaagtaaaaaaaatcattaaggaagatcctcgatgtattaagttctcctccagtgacaggaaaaaacaaagagaatttgaagaatatatcagagacaaatatatcacagccaaagctgacttcaggacgcttttgaaagagaccaaatttataacatatagatccaaaaaattaatccaagaatcagatcagcacctgaaagatgtagaaaaaattttacagaatgacaaacggtatctagtactggactgtgtgccagaggagaggcgtaaactgattgtggcatatgttgatgacctggatcgccggggtccacccccacctcccacagcatcggagcccacgagacgatcaacaaaa

SEQ ID NO: 5428 - DNA, 3231 bp, Homo sapiens
  source 1..3231: mol_type = genomic DNA
atggcggagcgtggcggggacgggggcgagagtgaacgattcaacccgggggagctcaggatggcccaacagcaggccttgaggttccgaggtccggctcccccaccaaatgcagtgatgcgaggcccaccacctctgatgcgacctcctccaccttttggtatgatgcgaggccctcctccaccaccacggccgccctttggacgtcctccttttgatcctaatatgccgccaatgcctcctccaggagggatacctccacctatgggccctccacacctccagagaccacctttcatgcctcctcccatgagttccatgcctcctcctccgggtatgatgtttccaccaggaatgcctcctgtgactgctcctggtactccagcactacctcctacggaggagatatgggttgaaaataaaactccagatgggaaggtttattattataatgctcggacacgtgaatctgcatggaccaagccagatggagttaaggttattcagcaatcagaactgacacctatgcttgcagcccaggcacaggttcaggctcaggcccaggcgcaggctcaggcccaggcgcaggctcaggcccaggcacaagctcaggcccaggctcaggctcaggcccaggcccaggcccaggcccaggcccaggcccaagcccaagcccaggcccaggctcaggctcaggcacaagctcaggcccaggcccaggctcaggtccaggcccaggtccaggcacaagtgcaagcacaagcagttggagcttccacccctacgaccagtagcccagcacctgcagtatccacttcaacatcatcatccaccccttcctctaccacttctaccacaacaactgctacttcagttgcgcagacagtatcaacacccacaacacaagatcagaccccaagttctgctgtttcagttgccacgcctacagttagtgtttcaactcctgctcctacagccacacctgtgcaaaccgttccccagccgcaccctcagacgttacctcctgctgttcctcattcagtacctcagccaacaacagcaatacctgcttttccaccagtaatggtacctccgtttcgtgttccccttcctggcatgccaattccacttccaggtgtattgccaggaatggcccctcctatcgtacccatgatacatccccaggttgctattgcagcttcacctgctaccttagctggagcaacagcagtttctgaatggactgaatataaaacagcagatgggaagacatattattataataatagaacattagaatcaacctgggaaaaaccccaagaactaaaggaaaaagaaaagttagaagagaagattaaagagccaattaaagaaccctctgaagagcctctgccaatggagacggaggaggaggatcctaaagaagagcctataaaggagataaaggaggagcccaaagaagaggagatgactgaagaagaaaaggctgcccagaaggcaaagccagttgctactgctcctattcctggtactccatggtgtgtcgtttggactggtgatgagcgggtcttcttttataatcccaccactcgtctttctatgtgggaccgacctgatgatctgattggcagggcagatgttgacaaaattattcaggagccccctcataaaaaaggaatggaggaattgaagaaactaaggcacccaactccgacaatgctgtcgatccaaaagtggcaattctctatgagtgcaattaaagaggaacaagaattaatggaagaaattaatgaagatgagcctgttaaagcaaaaaaacggaagagagacgataataaagacattgactcagagaaagaagctgccatggaagctgaaattaaagctgcccgagaaagggccattgtccctctggaggctcgaatgaagcagttcaaggacatgctgctagagagaggggtgtctgctttttcaacgtgggagaaggagttgcacaagatagtttttgatccccggtacttacttctcaatcctaaagagagaaaacaggtgtttgatcagtatgtaaagaccagggcagaggaagaacgcagggaaaagaaaaataaaataatgcaagccaaggaagatttcaaaaaaatgatggaagaagcaaaatttaatccaagagcaacttttagtgaatttgcagccaagcatgctaaagattcaagattcaaagcaattgaaaagatgaaagaccgagaagccttgtttaatgagtttgtggccgctgctaggaagaaagagaaagaagattcgaagaccagaggtgagaagattaaatcggatttctttgaactattatctaatcatcacttggacagtcagtctcgatggagcaaagtaaaagacaaagtagaaagtgatccacgttacaaagcagtagatagttcatcaatgagagaagaccttttcaaacagtacattgaaaaaatagccaagaatttagactcagaaaaagaaaaggagcttgaaaggcaagcccgcattgaggcaagccttcgagaacgagaaagggaggttcaaaaggcccgttcagaacaaacaaaagaaatagatcgagagagagagcagcacaaacgagaagaagctatccagaatttcaaagctcttctgtctgacatggtacgttcttcagatgtgtcatggtctgatactcgtaggaccctccgaaaagatcaccgctgggaatctggatccttattggaaagagaggagaaagagaagctttttaatgaacacattgaagcacttaccaaaaaaaagagagagcactttaggcaacttctggatgaaacttctgcaattaccttaacatccacgtggaaagaagtaaaaaaaatcattaaggaagatcctcgatgtattaagttctcctccagtgacaggaaaaaacaaagagaatttgaagaatatatcagagacaaatatatcacagccaaagctgacttcaggacgcttttgaaagagaccaaatttataacatatagatccaaaaaattaatccaagaatcagatcagcacctgaaagatgtagaaaaaattttacagaatgacaaacggtatctagtactggactgtgtgccagaggagaggcgtaaactgattgtggcatatgttgatgacctggatcgccggggtccacccccacctcccacagcatcggagcccacgagacgatcaacaaaa

SEQ ID NO: 5429 - DNA, 1332 bp, Homo sapiens
  source 1..1332: mol_type = genomic DNA
atggaacctcctggtcctgtgagggggcccttgcaagattccagctggtatgagccttctgcagagctagtgcagactaggatggctgtatcactaacagcagctgaaactctggcccttcagggtacacagggacaagagaagatgatgatgatgggaccaaaggaagaggaacagtcttgtgagtatgagaccaggctacctgggaaccactctaccagtcaagagatcttccgccaacgcttcaggcatctccgctaccaggagactcctggtccccgggaggccttgagccaactacgagtactctgctgtgagtggctgaggccagagaaacacacgaaggagcagatcctggagttcctggtgctggaacaattcttgaccatcctgcctgaggagctccaatcctgggtgcggggacatcaccctaagagtggagaggaggctgtgactgtgctggaggatttagagaaaggacttgaaccagagccgcaggtcccaggccctgcacatggacctgcacaggaagagccatgggagaagaaggaatctctgggagcagcccaggaagcactgagcatccagctccagcctaaggagacccagcctttcccaaagagtgaacaggtatatttacattttctgtcagttgttacagaagatggcccagagcccaaggacaaaggatcattgccacaaccacccattactgaagtggaatcacaggtgttctcagaaaaacttgctactgacacctctacatttgaagctacctctgagggtaccttagaactgcagcagagaaatcccaaagcggagagactgaggtggtcccctgcccaggaggaaagtttcaggcagatggttgtcatccataaggaaattcccacagggaagaaagaccatgaatgtagtgaatgtggtaaaaccttcatttataactcacatcttgttgtccaccagagagttcattctggagagaaaccctataagtgtagtgactgtgggaaaactttcaaacagagctcaaacctcggtcagcatcagagaattcatacaggagagaaacccttcgaatgtaatgaatgtgggaaggccttcagatggggtgctcatcttgttcagcatcagaggattcactcaggagagaagccctatgagtgtaatgagtgtgggaaggcctttagtcaaagctcatatctaagtcagcatcggagaattcacagtggagagaaaccttttatatgtaaagaatgtgggaaagcttatggatggtgctcagagctcattagacatcggagagttcatgccagaaaagagccttcccat

SEQ ID NO: 5430 - DNA, 1305 bp, Homo sapiens
  source 1..1305: mol_type = genomic DNA
atggaacctcctggtcctgtgagggggcccttgcaagattccagctggtatgagccttctgcagagctagtgcagactaggatggctgtatcactaacagcagctgaaactctggcccttcagggtacacagggacaagagaagatgatgatgatgggaccaaaggaagaggaacagtcttgtgagtatgagaccaggctacctgggaaccactctaccagtcaagagatcttccgccaacgcttcaggcatctccgctaccaggagactcctggtccccgggaggccttgagccaactacgagtactctgctgtgagtggctgaggccagagaaacacacgaaggagcagatcctggagttcctggtgctggaacaattcttgaccatcctgcctgaggagctccaatcctgggtgcggggacatcaccctaagagtggagaggaggctgtgactgtgctggaggatttagagaaaggacttgaaccagagccgcaggtcccaggccctgcacatggacctgcacaggaagagccatgggagaagaaggaatctctgggagcagcccaggaagcactgagcatccagctccagcctaaggagacccagcctttcccaaagagtgttgttacagaagatggcccagagcccaaggacaaaggatcattgccacaaccacccattactgaagtggaatcacaggtgttctcagaaaaacttgctactgacacctctacatttgaagctacctctgagggtaccttagaactgcagcagagaaatcccaaagcggagagactgaggtggtcccctgcccaggaggaaagtttcaggcagatggttgtcatccataaggaaattcccacagggaagaaagaccatgaatgtagtgaatgtggtaaaaccttcatttataactcacatcttgttgtccaccagagagttcattctggagagaaaccctataagtgtagtgactgtgggaaaactttcaaacagagctcaaacctcggtcagcatcagagaattcatacaggagagaaacccttcgaatgtaatgaatgtgggaaggccttcagatggggtgctcatcttgttcagcatcagaggattcactcaggagagaagccctatgagtgtaatgagtgtgggaaggcctttagtcaaagctcatatctaagtcagcatcggagaattcacagtggagagaaaccttttatatgtaaagaatgtgggaaagcttatggatggtgctcagagctcattagacatcggagagttcatgccagaaaagagccttcccat

SEQ ID NO: 5431 - DNA, 957 bp, Homo sapiens
  source 1..957: mol_type = genomic DNA
atggcggggcgcagcgacatggatccgcccgccgcgttctctggcttccctgccctgccagcggtcgcgccgtcggggccgccgccgtcgccgctcgcaggagccgagccagggcgggagccagaggaggcggcggctggccgcggagaggcggcccccacgcccgcgcccggcccggggcggcggcggcggcggcccctgcagcgcgggaagccgccctactcgtacatcgcgctcatcgccatggctctggcgcacgccccgggccgccgcctcacgctggccgccatctaccgcttcatcaccgaacgctttgccttctaccgcgacagcccgcgcaagtggcagaacagcatccgccacaatctcacgctcaacgactgcttcgtcaaggtgccccgcgagccgggcaacccgggcaagggcaactactggacgctggaccccgcggccgcagacatgttcgacaacggcagcttcctgcggcgccgcaagcgcttcaagcgcgccgagctgcccgcgcacgcggccgcggcgccagggccgccgctccccttcccctacgcgccctacgcgcccgcgcccggccccgcgctgctggtgccgccgccttctgccggaccgggcccctcgccgcccgcgcgtctgttcagcgtcgacagcctggtgaacctgcagccggagctagcggggctgggcgcccccgagccgccctgctgcgccgcgcccgacgccgcagccgcagccttcccgccctgcgctgccgccgcctccccgccactctactcgcaggtccccgaccgcctggtactgcccgcgacgcgccccggccccggcccgctgcccgctgagcccctcctggccttggccgggccggcagccgctctcggcccgctcagccctggggaggcctacctgaggcagccgggcttcgcgtcggggctggagcgctacctg

SEQ ID NO: 5432 - DNA, 516 bp, Homo sapiens
  source 1..516: mol_type = genomic DNA
atgagcagcaatgagtgcttcaagtgtggacgatctggccactgggcccgggaatgtcctactggtggaggccgtggtcgtggaatgagaagccgtggcagaggtttccagtttgtttcctcgtctcttccagacatttgttatcgctgtggtgagtctggtcatcttgccaaggattgtgatcttcaggaggatgttgaagcctgctataactgcggtagaggtggccacattgccaaggactgcaaggagcccaagagagagcgagagcaatgctgctacaactgtggcaaaccaggccatctggctcgtgactgcgaccatgcagatgagcagaaatgctattcttgtggagaattcggacacattcaaaaagactgcaccaaagtgaagtgctataggtgtggtgaaactggtcatgtagccatcaactgcagcaagacaagtgaagtcaactgttaccgctgtggcgagtcagggcaccttgcacgggaatgcacaattgaggctacagcc

SEQ ID NO: 5433 - DNA, 534 bp, Homo sapiens
  source 1..534: mol_type = genomic DNA
atgagcagcaatgagtgcttcaagtgtggacgatctggccactgggcccgggaatgtcctactggtggaggccgtggtcgtggaatgagaagccgtggcagaggtggttttacctcggatagaggtttccagtttgtttcctcgtctcttccagacatttgttatcgctgtggtgagtctggtcatcttgccaaggattgtgatcttcaggaggatgaagcctgctataactgcggtagaggtggccacattgccaaggactgcaaggagcccaagagagagcgagagcaatgctgctacaactgtggcaaaccaggccatctggctcgtgactgcgaccatgcagatgagcagaaatgctattcttgtggagaattcggacacattcaaaaagactgcaccaaagtgaagtgctataggtgtggtgaaactggtcatgtagccatcaactgcagcaagacaagtgaagtcaactgttaccgctgtggcgagtcagggcaccttgcacgggaatgcacaattgaggctacagcc

SEQ ID NO: 5434 - DNA, 537 bp, Homo sapiens
  source 1..537: mol_type = genomic DNA
atgagcagcaatgagtgcttcaagtgtggacgatctggccactgggcccgggaatgtcctactggtggaggccgtggtcgtggaatgagaagccgtggcagaggtggttttacctcggatagaggtttccagtttgtttcctcgtctcttccagacatttgttatcgctgtggtgagtctggtcatcttgccaaggattgtgatcttcaggaggatgttgaagcctgctataactgcggtagaggtggccacattgccaaggactgcaaggagcccaagagagagcgagagcaatgctgctacaactgtggcaaaccaggccatctggctcgtgactgcgaccatgcagatgagcagaaatgctattcttgtggagaattcggacacattcaaaaagactgcaccaaagtgaagtgctataggtgtggtgaaactggtcatgtagccatcaactgcagcaagacaagtgaagtcaactgttaccgctgtggcgagtcagggcaccttgcacgggaatgcacaattgaggctacagcc

SEQ ID NO: 5435 - DNA, 531 bp, Homo sapiens
  source 1..531: mol_type = genomic DNA
atgagcagcaatgagtgcttcaagtgtggacgatctggccactgggcccgggaatgtcctactggtggaggccgtggtcgtggaatgagaagccgtggcagaggtggttttacctcggatagaggtttccagtttgtttcctcgtctcttccagacatttgttatcgctgtggtgagtctggtcatcttgccaaggattgtgatcttcaggaggatgcctgctataactgcggtagaggtggccacattgccaaggactgcaaggagcccaagagagagcgagagcaatgctgctacaactgtggcaaaccaggccatctggctcgtgactgcgaccatgcagatgagcagaaatgctattcttgtggagaattcggacacattcaaaaagactgcaccaaagtgaagtgctataggtgtggtgaaactggtcatgtagccatcaactgcagcaagacaagtgaagtcaactgttaccgctgtggcgagtcagggcaccttgcacgggaatgcacaattgaggctacagcc

SEQ ID NO: 5436 - DNA, 3018 bp, Homo sapiens
  source 1..3018: mol_type = genomic DNA
atggatagcagccaacagaaaacatttcgaggacatgatgcccctgttttaagtctttcctttgatcctaaggacatctttctggcatcagctagttgtgatggatctgtcagagtgtggcaaatttcagatcagacatgtgctattagttggccactgctacaaaaatgcaacgatgtgataaatgcaaaatcaatctgcagacttgcttggcagccaaaaagtgggaagttactggcaattcctgtggaaaaatctgttaagctatatagaagagaatcttggagtcatcaatttgatctttcagataatttcatctctcagaccctcaatatagtaacctggtctccctgtgggcaatatttagctgcaggtagtattaatggtctaatcatagtttggaatgtggaaaccaaagactgcatggaaagggtgaaacatgagaaaggttatgcaatttgtggtctggcatggcatcctacttgtggtcgaatatcgtatactgatgcggaaggaaatctagggcttctagagaatgtttgtgaccccagtggaaagacatcaagcagtaaggtatctagcagagtggaaaaggattataatgatctttttgatggagatgatatgagtaatgctggtgattttctaaatgacaatgcagttgagatcccttctttttcaaaagggattataaatgatgatgaggatgatgaagacctcatgatggcttcaggtcgtcctagacagcgaagtcacatcctagaagatgatgaaaactcagttgatatttcaatgctaaaaactggttctagtcttctcaaagaggaggaggaagatggtcaagaaggcagcattcacaatctaccacttgtaacatcccaaaggccattttatgatggacccatgccaactccccggcaaaagccatttcagtcaggttctacaccgttgcatctcactcacagattcatggtgtggaactctattggaattattcgctgctataatgatgagcaagacaatgccatagatgtggagttccatgatacctccatacaccatgcaacacacttatcaaacactttgaattatacaatagcagatctttcccacgaagctattttgttggcatgtgaaagcactgatgaactagcaagcaagcttcactgcctgcactttagttcttgggattcaagcaaagagtggataatagacttgcctcagaatgaggatattgaagccatatgtctcggtcaaggatgggctgctgccgctactagtgccctgcttcttcgattgtttactattggaggggttcaaaaagaggtattcagccttgctggacctgtggtgtcaatggcaggacatggagaacagcttttcattgtttatcacagaggtacaggatttgatggggatcagtgccttggagttcaactgctagagctggggaaaaagaaaaaacaaattttgcatggtgaccctcttcctcttacaaggaaatcctaccttgcatggattgggttttcagctgaaggtaccccttgttacgtggattcagaaggaattgttcgaatgcttaacagaggacttggtaatacgtggactcctatatgtaatacaagagagcactgcaaaggaaaatctgatcactactgggtggttggtatccatgaaaatccccagcaactaaggtgcattccttgtaaaggttctcggtttcccccaacccttccacgccctgctgttgctatattatcctttaagcttccttactgtcagattgcaacagagaaaggacaaatggaggagcaattttggcgttcagttatatttcacaaccaccttgattatttagctaaaaatggttatgaatatgaagagagcactaaaaatcaagcaacaaaagagcaacaggaacttttaatgaaaatgcttgcgctttcttgtaaactggagcgagaattccgttgtgtggaacttgctgatctaatgactcaaaatgctgtgaatttagccattaaatatgcttctcgctctcggaaattaatactggctcaaaaactaagtgaactggctgtagagaaggcagccgaattgacagcaacccaggtggaagaggaagaagaagaagaagatttcagaaaaaagctgaatgctggttacagcaatactgctacagagtggagccaaccaaggttcagaaatcaagttgaagaagatgctgaggacagtggagaagctgatgatgaagaaaaaccagaaatacataagcctggacagaactcgttttccaaaagtacaaattcctctgatgtttcagctaagtcaggtgcagttacctttagcagccaaggacgagtaaatccctttaaggtatcagccagttccaaagaaccagccatgtcaatgaattcagcacgttcaactaatattttagacaatatgggcaaatcatccaagaaatccactgcacttagtcgaactacaaataatgaaaagtctcccattataaagcctctgattccaaagccgaagcctaagcaggcatctgcagcatcctatttccagaaaagaaattctcaaactaataaaactgaggaagtgaaagaagaaaatcttaaaaatgtattatctgaaaccccagctatatgtcctcctcaaaacactgaaaaccaaaggccaaagaccgggttccagatgtggttagaagaaaatagaagtaatattttgtctgacaatcctgacttttcagatgaagcagacataataaaagaaggaatgattcgatttagagtattgtcaactgaagaaagaaaggtgtgggctaacaaagccaaaggagaaacggcaagtgaaggaactgaagcaaagaagcgaaaacgtgtggttgatgaaagtgatgaaacagaaaaccaggaagaaaaagcaaaagagaacctgaatttgtctaaaaagcagaaacctttagatttttctacaaatcagaaactatcagcttttgcatttaagcaggag

SEQ ID NO: 5437 - DNA, 3387 bp, Homo sapiens
  source 1..3387: mol_type = genomic DNA
atgcctgccacacggaagccaatgagatatgggcatacagagggacacacggaggtctgttttgatgattctgggagttttattgtgacttgtggaagtgatggtgatgtgaggatttgggaagacttggatgatgatgatcctaagttcattaatgttggagaaaaggcatattcatgtgctttgaagagtggaaaactggtcactgcagtttctaataatactattcaagtccacacatttcctgaaggagttccagatggtatattgactcgcttcactacaaatgcaaaccatgtggtctttaatggggatggtactaaaattgctgctggatctagtgattttctagtcaaaattgtggatgtgatggatagcagccaacagaaaacatttcgaggacatgatgcccctgttttaagtctttcctttgatcctaaggacatctttctggcatcagctagttgtgatggatctgtcagagtgtggcaaatttcagatcagacatgtgctattagttggccactgctacaaaaatgcaacgatgtgataaatgcaaaatcaatctgcagacttgcttggcagccaaaaagtgggaagttactggcaattcctgtggaaaaatctgttaagctatatagaagagaatcttggagtcatcaatttgatctttcagataatttcatctctcagaccctcaatatagtaacctggtctccctgtgggcaatatttagctgcaggtagtattaatggtctaatcatagtttggaatgtggaaaccaaagactgcatggaaagggtgaaacatgagaaaggttatgcaatttgtggtctggcatggcatcctacttgtggtcgaatatcgtatactgatgcggaaggaaatctagggcttctagagaatgtttgtgaccccagtggaaagacatcaagcagtaaggtatctagcagagtggaaaaggattataatgatctttttgatggagatgatatgagtaatgctggtgattttctaaatgacaatgcagttgagatcccttctttttcaaaagggattataaatgatgatgaggatgatgaagacctcatgatggcttcaggtcgtcctagacagcgaagtcacatcctagaagatgatgaaaactcagttgatatttcaatgctaaaaactggttctagtcttctcaaagaggaggaggaagatggtcaagaaggcagcattcacaatctaccacttgtaacatcccaaaggccattttatgatggacccatgccaactccccggcaaaagccatttcagtcaggttctacaccgttgcatctcactcacagattcatggtgtggaactctattggaattattcgctgctataatgatgagcaagacaatgccatagatgtggagttccatgatacctccatacaccatgcaacacacttatcaaacactttgaattatacaatagcagatctttcccacgaagctattttgttggcatgtgaaagcactgatgaactagcaagcaagcttcactgcctgcactttagttcttgggattcaagcaaagagtggataatagacttgcctcagaatgaggatattgaagccatatgtctcggtcaaggatgggctgctgccgctactagtgccctgcttcttcgattgtttactattggaggggttcaaaaagaggtattcagccttgctggacctgtggtgtcaatggcaggacatggagaacagcttttcattgtttatcacagaggtacaggatttgatggggatcagtgccttggagttcaactgctagagctggggaaaaagaaaaaacaaattttgcatggtgaccctcttcctcttacaaggaaatcctaccttgcatggattgggttttcagctgaaggtaccccttgttacgtggattcagaaggaattgttcgaatgcttaacagaggacttggtaatacgtggactcctatatgtaatacaagagagcactgcaaaggaaaatctgatcactactgggtggttggtatccatgaaaatccccagcaactaaggtgcattccttgtaaaggttctcggtttcccccaacccttccacgccctgctgttgctatattatcctttaagcttccttactgtcagattgcaacagagaaaggacaaatggaggagcaattttggcgttcagttatatttcacaaccaccttgattatttagctaaaaatggttatgaatatgaagagagcactaaaaatcaagcaacaaaagagcaacaggaacttttaatgaaaatgcttgcgctttcttgtaaactggagcgagaattccgttgtgtggaacttgctgatctaatgactcaaaatgctgtgaatttagccattaaatatgcttctcgctctcggaaattaatactggctcaaaaactaagtgaactggctgtagagaaggcagccgaattgacagcaacccaggtggaagaggaagaagaagaagaagatttcagaaaaaagctgaatgctggttacagcaatactgctacagagtggagccaaccaaggttcagaaatcaagttgaagaagatgctgaggacagtggagaagctgatgatgaagaaaaaccagaaatacataagcctggacagaactcgttttccaaaagtacaaattcctctgatgtttcagctaagtcaggtgcagttacctttagcagccaaggacgagtaaatccctttaaggtatcagccagttccaaagaaccagccatgtcaatgaattcagcacgttcaactaatattttagacaatatgggcaaatcatccaagaaatccactgcacttagtcgaactacaaataatgaaaagtctcccattataaagcctctgattccaaagccgaagcctaagcaggcatctgcagcatcctatttccagaaaagaaattctcaaactaataaaactgaggaagtgaaagaagaaaatcttaaaaatgtattatctgaaaccccagctatatgtcctcctcaaaacactgaaaaccaaaggccaaagaccgggttccagatgtggttagaagaaaatagaagtaatattttgtctgacaatcctgacttttcagatgaagcagacataataaaagaaggaatgattcgatttagagtattgtcaactgaagaaagaaaggtgtgggctaacaaagccaaaggagaaacggcaagtgaaggaactgaagcaaagaagcgaaaacgtgtggttgatgaaagtgatgaaacagaaaaccaggaagaaaaagcaaaagagaacctgaatttgtctaaaaagcagaaacctttagatttttctacaaatcagaaactatcagcttttgcatttaagcaggag

SEQ ID NO: 5438 - DNA, 1038 bp, Homo sapiens
  source 1..1038: mol_type = genomic DNA
atggacatgctggacccgggtctggatcccgctgcctcggccaccgctgctgccgccgccagccacgacaagggacccgaggcggaggagggcgtcgagctgcaggaaggcggggacggcccaggagcggaggagcagacagcggtggccatcaccagcgtccagcaggcggcgttcggcgaccacaacatccagtaccagttccgcacagagacaaatggaggacaggtgacataccgcgtagtccaggtgactgatggtcagctggacggccagggcgacacagctggcgccgtcagcgtcgtgtccaccgctgccttcgcgggggggcagcaggctgtgacccaggtgggtgtggacggggcagcccagcgcccgggccccgccgctgcctctgtgcccccaggtcctgcagcgcccttcccgctggctgtgatccaaaatcccttcagcaatggtggcagtccggcggccgaggctgtcagcggggaggcacgatttgcctatttcccagcgtccagtgtgggagatactacggctgtgtccgtacagaccacagaccagagcttgcaggctggaggccagttctacgtcatgatgacgccccaggatgtgcttcagacaggaacacagaggacgatcgccccccggacacacccttactctccaaaaattgatggaaccagaacaccccgagatgagaggagaagagcccagcacaacgaagtggagcggaggcggagggacaagatcaacaactggatcgtccagctttcgaaaatcattccagactgtaacgcagacaacagcaagacgggagcgagtaaaggagggatcctgtccaaggcctgcgattacatccgggagttgcgccagaccaaccagcgcatgcaggagaccttcaaagaggccgagcggctgcagatggacaacgagctcctgaggcagcagatcgaggagctgaagaatgagaacgccctgcttcgagcccagctgcagcagcacaacctggagatggtgggcgagggcacccggcag

SEQ ID NO: 5439 - DNA, 837 bp, Homo sapiens
  source 1..837: mol_type = genomic DNA
atggacatgctggacccgggtctggatcccgctgcctcggccaccgctgctgccgccgccagccacgacaagggacccgaggcggaggagggcgtcgagctgcaggaaggcggggacggcccaggagcggaggagcagacagcggtggccatcaccagcgtccagcaggcggcgttcggcgaccacaacatccagtaccagttccgcacagagacaaatggaggacaggctgtgatccaaaatcccttcagcaatggtggcagtccggcggccgaggctgtcagcggggaggcacgatttgcctatttcccagcgtccagtgtgggagatactacggctgtgtccgtacagaccacagaccagagcttgcaggctggaggccagttctacgtcatgatgacgccccaggatgtgcttcagacaggaacacagaggacgatcgccccccggacacacccttactctccaaaaattgatggaaccagaacaccccgagatgagaggagaagagcccagcacaacgaagtggagcggaggcggagggacaagatcaacaactggatcgtccagctttcgaaaatcattccagactgtaacgcagacaacagcaagacgggagcgagtaaaggagggatcctgtccaaggcctgcgattacatccgggagttgcgccagaccaaccagcgcatgcaggagaccttcaaagaggccgagcggctgcagatggacaacgagctcctgaggcagcagatcgaggagctgaagaatgagaacgccctgcttcgagcccagctgcagcagcacaacctggagatggtgggcgagggcacccggcag

SEQ ID NO: 5440 - DNA, 645 bp, Homo sapiens
  source 1..645: mol_type = genomic DNA
atggacatgctggacccgggtctggatcccgctgcctcggccaccgctgctgccgccgccagccacgacaagggacccgaggcggaggagggcgtcgagctgcaggaaggcggggacggcccaggagcggaggagcagacagcggtggccatcaccagcgtccagcaggcggcgttcggcgaccacaacatccagtaccagttccgcacagagacaaatggaggacagacaggaacacagaggacgatcgccccccggacacacccttactctccaaaaattgatggaaccagaacaccccgagatgagaggagaagagcccagcacaacgaagtggagcggaggcggagggacaagatcaacaactggatcgtccagctttcgaaaatcattccagactgtaacgcagacaacagcaagacgggagcgagtaaaggagggatcctgtccaaggcctgcgattacatccgggagttgcgccagaccaaccagcgcatgcaggagaccttcaaagaggccgagcggctgcagatggacaacgagctcctgaggcagcagatcgaggagctgaagaatgagaacgccctgcttcgagcccagctgcagcagcacaacctggagatggtgggcgagggcacccggcag

SEQ ID NO: 5441 - DNA, 1155 bp, Homo sapiens
  source 1..1155: mol_type = genomic DNA
atggcagccttcctatctgctggcctcggcatacttgcaccctcagagacctaccccctacctacaaccagctctggctgggagccccggctggggtcaccattcccatcaggcccttgcaccagctctactggggcccaagctgtggccgagcccactgggcagggccccaagaacccacgtgtgtccagagtgacagttcagctggagatgaagcctctgtgggaggaattcaaccagctgggcactgagatgatcgtcaccaaggcaggcaggaggatgttcccccccttccaggtgaagatcctgggcatggactccctggccgactacgccctgctcatggacttcatccccctggacgacaagagatacaggtatgccttccacagctcggcctggctggtggcgggcaaggcagacccagccacacctggccgcgtgcacttccaccccgactcgccagccaagggtgcccagtggatgcgccagattgtgtcctttgacaagctcaagctgaccaacaacctgctggatgacaatggccacatcattctcaactctatgcaccgctaccagccccgtttccacgtggtcttcgtggacccacgcaaggacagtgagcgctatgcccaggagaacttcaagtccttcatcttcacagagacccagttcacagcagtgacagcctatcagaaccacaggatcacccagctgaaaatcgccagcaacccttttgccaaaggctttagagagagtgacctggactcctggcctgtggccccacggcccctgctcagtgtcccagcccggagtcacagcagcctcagtccctgtgtgctgaagggtgccacagacagggagaaagaccccaacaaagcttcagcttccacctccaagacccctgcttggctccatcatcagctgctgcccccacctgaggtcctgctggccccggccacctacaggcctgtcacgtatcagagcctgtactctggagccccgagccacctagggatcccaaggacccgaccagcaccataccccctccccaacatccgggctgatagggatcaaggaggcctgcctctcccagctgggctggggctcctgtcccccactgtggtgtgcctggggcctggccaggactcccag

SEQ ID NO: 5442 - DNA, 6735 bp, Homo sapiens
  source 1..6735: mol_type = genomic DNA
atgccagaaatgacagagaatgagacgcctacaaaaaagcagcacagaaagaaaaaccgggagacacacaatgcagtggagaggcatagaaagaagaaaattaatgctgggataaacagaataggagagctgatcccatgttctcctgccctgaagcagagcaagaatatgatcctggaccaagcctttaaatatataacagaattgaaaaggcaaaatgatgaactcctgcttaatggaggaaacaatgaacaagctgaagaaataaaaaagctacggaaacaactggaagaaatccaaaaagaaaatggccgatatattgaattactgaaagctaatgacatatgcttatatgatgacccgacaattcactggaaaggaaatcttaaaaactcaaaggtctctgttgttattcctagtgaccaggttcaaaaaaaaattattgtttattccaacgggaatcagcctggtggaaacagccagggaacagctgttcaggggataacttttaatgttagtcataatttacaaaagcagaccgccaatgtggtgccagtacagaggacttgcaatcttgtgactcctgtatctatttctggagtttacccttctgaaaacaagccatggcatcagaccacagttcctgcattggctaccaaccagcctgttcctctttgtcttcctgctgccatttctgctcagagtattctcgagcttcccacctctgaaagcgaatcaaatgtgcttggtgccactagtggctcactgattgctgtttcaattgaatctgagcctcaccaacatcattctttgcacacatgcctaaatgatcaaaattcttctgaaaataagaatggacaagagaaccccaaagtattgaagaaaatgaccccttgtgttacaaacatcccccacagctcctcagcaactgccactaaagtgcaccatggaaacaagtcctgcctgagcatacaggacttcagaggtgattttcaaaacacttttgttgtttcagttaccaccacagtctgctcgcagcctcccagaactgcaggtgattcttctccaatgagcattagtaagagtgcagacttgacaagtacagctacagtggtggcatcatctgcccctggagtagggaaggccaccattcctataagcactctttcgggaaaccctttggacaatggttggactctttcttgttctttgccttcttcaagtgttagtacttcagatttgaaaaacattaatagccttacacgaatctcttcagctggaaacacacagacaacgtggactactttgcaactggcaggaaacactattcagcccttaagccagacaccatcttctgctgtgactccagtattaaatgagtctggtactagccccaccacaagcaaccacagtagatatgtggctacagacatcaacttgaataattcctttccagcagatgggcagccagttgagcaagtagttgtaacattgccttcttgtccatctttacctatgcagccactaattgcccagccacaagttaaatctcagcctcccaaaaatatccttccactgaattcagcaatgcaagtgattcagatggctcagccagttgggtcagctgttaattcagctccaactaatcaaaatgttataattcttcagccacctagcaccaccccatgcccaacagtgatgagggcagaagtttccaaccaaacagtaggtcaacagatagtaatcatacaggctgctaatcagaatcctttgccactcctccctgctccacctcctggttctgttcgactccccatcaatggagccaatactgtaatagggtctaataattcagtgcaaaatgttccaacaccacagacttttggaggaaagcatcttgtccacatattaccaagaccttcatctttatcagcgtctaactcaacacaaactttttctgttaccatgtcaaaccaacagcctcaaaccatttctttaaatggacagctctttgctttgcagcctgtgatgtcttcatcaggaactacaaatcaaacccctatgcaaattattcaacccaccaccagcgaagatccaaataccaatgttgccctgaatacatttggtgctttggccagcctcaatcaaagcatatcacagatggctgggcaaagctgtgtacaattgtctattagccagcctgccaattctcaaactgctgcaaatagtcaaaccactacagctaactgtgtttcattaacaacaactgcagcacctcctgtgacaacagatagttcagccacactagctagtacttataatctagtgagtacttcctcaatgaacactgttgcttgtttgcctaacatgaaatctaaaaggttgaataagaagccaggtggcaggaaacacttagcagcaaacaagtcagcgtgtcccctgaattcagtcagagatgtgagcaagttagactgccccaacactgaaggctcagcagagccaccctgtaatgatggactgctagaaagcttccctgctgtgttaccatctgtctctgtgtctcaggcaaatagtgtgagtgtttctgcttcacattctttgggtgttctaagctctgaatcattaatacctgagtctgtatcgaaatctaagtcagcagaaaagtccagcccaccctcccaagaatctgtaacaagtgaacattttgcaatggccgcagcaaaatccaaagattctacccctaatctacaacaagagacatctcaggataaaccaccaagtagtttagcattatcagatgctgccaaaccctgcgcttcagccaatgtattgattccatctccaagtgatcctcacattttggtttctcaggttcctggtttgtcatctacaacaagcactacaagtactgactgtgtttctgaggtagaaatcattgctgaaccttgcagagttgagcaagattcatcagatacaatgcaaaccacaggtctcttaaaggggcaaggtttaactacattgctatctgatcttgctaaaaaaaaaaaccctcagaaatcatctctttctgatcagatggatcatcctgacttttcttcagaaaatcctaaaatagttgattcaagtgtgaatttacatcccaaacaggaactattactgatgaacaatgatgatagagatcctccacagcatcattcctgcctccctgatcaagaggttattaatggttctttgatcaacggtagacaggccgactctcccatgtcaaccagctctggcagtagtcgtagtttctcagttgcatccatgcttcctgaaacaacaagagaagatgtgaccagcaatgcaacaactaatacatgtgacagctgtacctttgtagagcaaactgatatagtagctcttgcagcaagagctatttttgaccaggagaaccttgagaaggggagagttggcctccaggctgatataagggaagttgcttcaaagccttctgaagcatcattgttagagggagacccacccttcaaatcacagatacctaaagagagtggcacaggacaggcagaagcaacaccaaatgaatttaattctcagggttcaattgaagcaactatggagaggccccttgagaaaccaagttgttctctaggaattaaaacatcaaatgcatctttacaggattcaacttctcagccaccaagcatcaccagtttaagtgtgaataatcttatccatcagagcagcatcagccatcctctggccagctgtgcgggtttatccccaacttcagagcaaacaactgtgcctgcaacggttaatctgaccgtttcatctagctcctatggcagtcaacctcctggaccatctctgatgactgaatattcccaagaacagctaaatactatgactagtaccataccaaattcacagattcaagagccactcttaaagccaagccatgaaagccgtaaggattctgctaagcgtgctgtccaagatgaccttttactgtcttcagctaaacgtcaaaagcactgtcagccagcccccctcaggcttgaaagtatgtccctgatgagcagaactccagacaccatttctgaccaaactcaaatgatggtcagtcagatccctcctaattcttcaaactcagttgtgcctgttagcaacccagctcatggagatggccttacacgattatttccacctagtaacaactttgtgactcctgcattgaggcaaactgaagttcagtgtggttctcagccttcagttgctgaacagcagcaaacccaggcaagtcagcatctacaggccctgcagcagcatgttccagctcaaggtgtatctcaccttcatagtaaccatctctacataaagcagcagcagcagcagcagcagcagcagcagcagcaacagcaacaacaacaagcagggcagttaagagagaggcatcacttatatcaaatgcagcatcatgtacctcatgcagagagctctgtccactctcagccccataatgtccaccaacagaggactctgcaacaggaagttcagatgcagaaaaagaggaatcttgttcagggcacccagacctctcagctttccttacaaccaaagcaccatggaactgaccaatcccgatccaagactggccagccacatccccaccatcagcagatgcagcaacaaatgcagcaacactttggaagctcccagacagagaagagctgtgaaaacccttcaactagtcggaaccatcataaccatccccagaaccatctcaatcaagatattatgcaccaacagcaggatgttggaagcagacagcaaggttcaggggtttcatctgaacatgtatctggccataatccaatgcagaggcttttgacatcaagaggcttagagcagcaaatggtgtcccaaccaagtattgtgactagatcttcagacatgacctgtactccacacaggccagagagaaatagagtttcaagttattctgctgaggcactcattggaaagacatcttctaattcagagcagagaatggggatatcaattcagggttccagagtttcagatcagcttgaaatgagaagctatcttgatgttcccagaaataagagtttggctattcataatatgcagggtcgtgtggaccatactgtggcctcagatatccgcctttctgattgtcagacgtttaaaccaagtggagctagtcaacagccccagagtaattttgaagtacaatcttcaagaaacaatgaaataggtaaccctgtatcatcattgcggagtatgcagtcccaggcttttcgaattagtcaaaacactggccccccaccaattgaccgtcaaaagagattatcttacccaccagttcagagcatcccaacaggaaatggtattccatcaagggacagtgaaaatacttgtcaccaaagtttcatgcagagcttacttgcccctcacctcagtgatcaggtcattgggagccagaggtcactctcagaacatcagaggaatacacagtgtggtccatcctctgcaattgaatataattgtcccccaactcatgaaaatgtccatattagaagagagagtgagagtcagaatagggaaagttgtgacatgtcgttaggtgcaattaacaccaggaacagcaccttgaatattcctttttcaagttcctcttcctcaggagatattcaaggtcgaaacacaagccccaatgtttctgtacagaaatccaatcccatgaggattactgagagtcatgccaccaagggccacatgaaccctccagtcacaaccaacatgcatggggttgcaaggccagcgttgccacatccatctgtgtctcatggaaatggcgatcaaggccctgctgtacgtcaagctaattcttcagttccccagagatcaaggcatcccctgcaagacagcagtggttccaaaattcgtcagcctgaaaggaatcgttctggaaaccaaaggcaaagtactgtctttgatccaagtcttccccatcttcctctctctactggtggcagtatgattcttggacgtcaacaacctgccacagagaagagaggaagtattgttcgtttcatgcctgatagcccacaagtacctaatgataattcaggtcctgaccagcatacactatcacaaaattttggtttttcttttattcctgagggtggcatgaatccaccaataaatgctaatgcttctttcattccacaggttactcagcctagtgccactcgaactccagccctcatcccggtagatccgcaaaatactctgccctccttctatcctccatactctcctgctcatcctacactgtccaatgatatttcaatcccctattttcctaatcagatgttctcaaatcctagcacagagaaggtaaacagtggaagtttaaataaccgatttggatcaattttatctcctcccagacctgttgggtttgctcaaccaagttttcctcttctcccagatatgccaccaatgcacatgaccaactctcacttatccaattttaatatgacatctttgtttccagaaatagccacagcgcttcctgatggctcagcaatgtcacctttgcttacaatagcaaattcctctgcctctgactcttccaagcagtcctcaaacagacctgcccataacataagccatattctaggtcatgattgcagttcagctgtt

SEQ ID NO: 5443 - DNA, 930 bp, Homo sapiens
  source 1..930: mol_type = genomic DNA
atgaaggggcagcagaaaacagctgaaacggaagaggggacagtgcagattcaggaaggtgcagtggctactggggaagacccaaccagtgtggctattgccagcatccagtcagctgccaccttccctgaccccaacgtcaagtacgtcttccgaactgagaatgggggccaggtgatgtacagggtgatccaggtgtctgaggggcagctggatggccaaactgagggaactggcgccatcagtggctaccctgccactcaatccatgacccaggcggtgatccagggtgctttcaccagtgatgatgcagttgacacggaggggacagctgctgagacgcactatacttacttccccagcacggcagtgggagatggggcagggggtaccacatcggggagtacagctgctgttgttactacccagggctcagaggcactgctggggcaggcgacccctcctggcactggtcaattctttgtgatgatgtcaccacaagaagtactgcagggaggaagccagcgctcaattgcccctaggactcacccttattccccgaagtcagaagctccccggacgactcgggatgagaaacgcagggctcagcataatgaagtggagcgtcgccgccgagacaagatcaacaactggatcgtgcagctctccaagataatcccagactgctctatggagagcaccaagtctggccagagtaaaggtgggattctatccaaagcttgtgattatatccaggagcttcggcagagtaaccaccgcttgtctgaagaactgcagggacttgaccaactgcagctggacaatgacgtgcttcgacaacaggtggaagatcttaaaaacaagaatctgctgcttcgagctcagttgcggcaccacggattagaggtcgtcatcaagaatgacagcaac

SEQ ID NO: 5444 - DNA, 2517 bp, Homo sapiens
  source 1..2517: mol_type = genomic DNA
atggctctcacccagggacaggtgacattcagggatgtggctatagaattctctcaggaggagtggacatgcctggaccccgctcagaggactttgtacagggacgtgatgttggagaattataggaacctggcctccctgggaatctcttgttttgacctcagtattatctctatgttggagcaagggaaggagcctttcactttggagagccaagtacaaatagcaggaaacccagatggatgggaatggatcaaagctgtgatcacagctctctcttccgaatttgtaatgaaagatttactacacaaagggaagagtaatacaggagaagtattccaaacagtgatgttggaaagacaggaaagccaagacattgaaggatgttccttcagggaagtccagaaaaatacacatggccttgagtatcaatgcagagatgctgaaggaaattacaaaggagtgcttttgacccaagaaggcaatctcactcatggaagagatgaacatgataaaagagatgcaagaaacaagcttattaaaaatcagcttggattaagccttcagtcacatctgcctgaactgcagctttttcaatatgaagggaaaatttatgaatgtaatcaggttgagaagtctttcaacaataattcctcagtttcaccacctcaacaaatgccttataatgtcaaaacccacatttctaagaaatatctcaaagattttatctcttctttattactcacacaggggcaaaaagcaaataattggggaagcccttacaaatctaatggatgtggcatggtctttcctcaaaattcacaccttgcaagtcatcagagaagtcatactaaagagaaaccttacaaatgttatgagtgtggcaaagcctttagaacacgttcaaacctaactacccatcaggtgatccatactggcgaaaaacgttacaaatgtaatgagtgtggtaaggtctttagtcgaaattcacaactctcacaacatcagaaaattcacactggagagaaaccttataaatgtaacgaatgtggcaaggtcttcactcagaattcacaccttgtaagacatcgaggaattcatactggagagaaaccttacaagtgtaatgagtgtgggaaagcctttagagctcgttcaagcttagctatccatcaggcaacccacagtggagaaaaaccttacaaatgtaatgaatgtggcaaggtcttcactcaaaattcacaccttacaaatcactggagaattcacactggagagaaaccttacaagtgtaatgagtgcggcaaagcctttggtgttcgttcaagcctagctattcatctggtaattcacaccggagaaaagccttacaaatgtcatgaatgcggcaaggtctttaggcgtaattcacaccttgcaaggcatcagctaattcatactggagagaaaccttataagtgtaatgagtgtggcaaagcctttagagcacattcaaacctaactacccatcaggtcatccatactggagaaaagccttacaaatgtaatgaatgtggcaaggtcttcactcaaaattcacaccttgcaaatcatcaaagaattcatactggagtgaagccttatatgtgtaatgagtgcggcaaagccttcagtgtgtattcaagcctaactacccatcaggtcatccatactggagaaaaaccttacaaatgtaatgagtgtggcaaggtcttcactcagaattcacaccttgcaagacatcggggaattcatactggagagaaaccttataaatgtaatgaatgtggcaaggtctttaggcataattcatacctttcaaggcatcagcgaattcatactggagagaaaccttacaagtataatgagtatggcaaagcctttagtgaacattcaaacctaactacccatcaggtcatccatactggtgaaaaaccttacaaatgtaatgagtgtggcaaggtcttcactcagaattcacaccttgcaagacatcggagagttcatactggaggtaaaccttaccagtgtaatgaatgtggcaaagcctttagtcaaacatcaaagcttgcaaggcatcagagagttcatactggagagaaaccatatgagtgtaatcagtgtgggaaagcctttagtgtccgttcaagcctaactacccatcaggcaatccatactggaaaaaaaccttacaaatgcaatgagtgtgggaaggtcttcactcagaattcacaccttgcaagacatcggggaattcatactggagagaaaccttacaagtgtaatgagtgtggcaaagcctttagtcaaacttcaaaacttgcaaggcatcagagaattcataccggagagaaaccatatgagtgtgggaaaccctttagtatctgttcaagcctaactacccatcagacaatccatactggtgggaaaccttacaaatgtaacgtgtggaaagttctaaagtcagagttcaaaccttgcaagccatcacagaattca

SEQ ID NO: 5445 - DNA, 2520 bp, Homo sapiens
  source 1..2520: mol_type = genomic DNA
atggctctcacccagggacaggtgacattcagggatgtggctatagaattctctcaggaggagtggacatgcctggaccccgctcagaggactttgtacagggacgtgatgttggagaattataggaacctggcctccctggcaggaatctcttgttttgacctcagtattatctctatgttggagcaagggaaggagcctttcactttggagagccaagtacaaatagcaggaaacccagatggatgggaatggatcaaagctgtgatcacagctctctcttccgaatttgtaatgaaagatttactacacaaagggaagagtaatacaggagaagtattccaaacagtgatgttggaaagacaggaaagccaagacattgaaggatgttccttcagggaagtccagaaaaatacacatggccttgagtatcaatgcagagatgctgaaggaaattacaaaggagtgcttttgacccaagaaggcaatctcactcatggaagagatgaacatgataaaagagatgcaagaaacaagcttattaaaaatcagcttggattaagccttcagtcacatctgcctgaactgcagctttttcaatatgaagggaaaatttatgaatgtaatcaggttgagaagtctttcaacaataattcctcagtttcaccacctcaacaaatgccttataatgtcaaaacccacatttctaagaaatatctcaaagattttatctcttctttattactcacacaggggcaaaaagcaaataattggggaagcccttacaaatctaatggatgtggcatggtctttcctcaaaattcacaccttgcaagtcatcagagaagtcatactaaagagaaaccttacaaatgttatgagtgtggcaaagcctttagaacacgttcaaacctaactacccatcaggtgatccatactggcgaaaaacgttacaaatgtaatgagtgtggtaaggtctttagtcgaaattcacaactctcacaacatcagaaaattcacactggagagaaaccttataaatgtaacgaatgtggcaaggtcttcactcagaattcacaccttgtaagacatcgaggaattcatactggagagaaaccttacaagtgtaatgagtgtgggaaagcctttagagctcgttcaagcttagctatccatcaggcaacccacagtggagaaaaaccttacaaatgtaatgaatgtggcaaggtcttcactcaaaattcacaccttacaaatcactggagaattcacactggagagaaaccttacaagtgtaatgagtgcggcaaagcctttggtgttcgttcaagcctagctattcatctggtaattcacaccggagaaaagccttacaaatgtcatgaatgcggcaaggtctttaggcgtaattcacaccttgcaaggcatcagctaattcatactggagagaaaccttataagtgtaatgagtgtggcaaagcctttagagcacattcaaacctaactacccatcaggtcatccatactggagaaaagccttacaaatgtaatgaatgtggcaaggtcttcactcaaaattcacaccttgcaaatcatcaaagaattcatactggagtgaagccttatatgtgtaatgagtgcggcaaagccttcagtgtgtattcaagcctaactacccatcaggtcatccatactggagaaaaaccttacaaatgtaatgagtgtggcaaggtcttcactcagaattcacaccttgcaagacatcggggaattcatactggagagaaaccttataaatgtaatgaatgtggcaaggtctttaggcataattcatacctttcaaggcatcagcgaattcatactggagagaaaccttacaagtataatgagtatggcaaagcctttagtgaacattcaaacctaactacccatcaggtcatccatactggtgaaaaaccttacaaatgtaatgagtgtggcaaggtcttcactcagaattcacaccttgcaagacatcggagagttcatactggaggtaaaccttaccagtgtaatgaatgtggcaaagcctttagtcaaacatcaaagcttgcaaggcatcagagagttcatactggagagaaaccatatgagtgtaatcagtgtgggaaagcctttagtgtccgttcaagcctaactacccatcaggcaatccatactggaaaaaaaccttacaaatgcaatgagtgtgggaaggtcttcactcagaattcacaccttgcaagacatcggggaattcatactggagagaaaccttacaagtgtaatgagtgtggcaaagcctttagtcaaacttcaaaacttgcaaggcatcagagaattcataccggagagaaaccatatgagtgtgggaaaccctttagtatctgttcaagcctaactacccatcagacaatccatactggtgggaaaccttacaaatgtaacgtgtggaaagttctaaagtcagagttcaaaccttgcaagccatcacagaattca

SEQ ID NO: 5446 - DNA, 1806 bp, Homo sapiens
  source 1..1806: mol_type = genomic DNA
atgagtgaaaggagaagatctgcagtcgccctgagctcgcgagcacatgccttctccgttgaagccttgatcggctcaaataaaaaacggaaactgcgagactgggaggagaaggggctggacctgtctatggaggcgctgagccccgcgggcccactcggagacacggaggacgcggcggcacacggcctggagcctcacccggattctgagcagagcactggttcagattctgaggtcctcactgagcggacttcctgctccttcagtactcacactgacctggcctctggtgctgcaggccctgtgcctgctgccatgtcttccatggaggagattcaggtggagctgcaatgtgctgacctctggaagcggttccatgatattggaactgaaatgatcatcaccaaagcaggcaggaggatgtttcctgccatgagagtgaaaatcactggcctagatccacatcagcagtactacatagcaatggacattgtgcctgtggacaataaaagatacagatatgtgtatcatagctccaagtggatggtggctggcaatgctgattcccctgtgcccccaagagtttatatacaccctgattctctagcttctggagacacctggatgagacaggtggtcagttttgacaaactcaagcttaccaacaatgagttggatgatcaaggacatatcattctgcactctatgcacaaataccagcctcgagttcatgtgattcgcaaagacttcagcagtgacctttcacccactaagcctgttcctgttggggatggggtgaaaacgttcaactttcctgagactgtgttcaccacagttacggcctatcagaatcagcagattaccagattaaaaattgaccgaaacccttttgctaaaggattcagagattctgggagaaacagaactggacttgaagccatcatggagacatatgcattctggagacctcctgtgcgcacactcaccttcgaagacttcaccaccatgcagaagcagcaaggaggcagcacaggcacttccccaaccacctccagcactgggacaccatccccttcggcttcttctcatcttttatctccatcctgttctcctccaacttttcatctggcccccaacactttcaatgtgggctgccgagaaagccagctgtgtaatctaaacctctctgattatccaccatgtgcccgaagcaacatggctgccttgcagagctacccagggctgagtgacagtggctacaacaggcttcagagtggcaccacttcagccactcagccctctgaaaccttcatgcctcagaggactccatccctgatctcaggaataccaactcctccctcgttgcctggcaacagcaagatggaagcctacggtggccagctggggtcctttcccacttcccagtttcagtatgtcatgcaggcaggcaatgctgcctccagctcctcatcaccacacatgttcgggggcagccacatgcagcagagctcctacaatgccttctcccttcacaacccttacaacctgtatggatacaatttccccacttcccctaggctagctgcaagcccggaaaaactgagcgcctctcaaagcactttactctgttcttctccttccaacggggcctttggagagaggcagtacctgccgtcagggatggagcacagcatgcacatgattagcccttcacccaataaccaacaggcaaccaacacttgtgatggccggcagtatggggcagttccaggctcctcctcccagatgtccgtgcacatggtt

SEQ ID NO: 5447 - DNA, 1956 bp, Homo sapiens
  source 1..1956: mol_type = genomic DNA
atgatcaatgcccaggaattgctgacactggaggatgttactgtggagttcacctgggaggagtggcagctcctgggcccttttcagaaggatttgtaccgggatgtgatgttggagatctacagcaacctgctatcaatgggttatcaagtcagcaaaccagatgcactctccaagttggaacgaggagaagaaccatggacaatggaagatgaaaggcacagtcgaatctgtccagaaaacaacgaagttgatgatcatctgcaggatcacttggaaaatcaaaggatgctgaagagtgtggaacaataccatgaacataatgcatttggaaatactgcctctcaaaccaaaagcctttgtcttttcagggaaaatcatgatacatttgagttatatataaaaactttgaaatcaaatttaagtttagtcaaccagaacaaaagctgtgaaattaacaactctactaaatttagtggagatgggaaatcatttcttcatggtaactatgaagaactttattctgcagctaaattctctgtaagtacaaaagccaatagcactaaatcccaagtcagtaagcatcagagaactcatgaaatagaaaaaaaccacgtatgcagtgaatgtgggaaagcgtttgtcaagaagtctcagctcactgatcatgagagagttcatacaggagaaaaaccttatggatgtactttgtgtgcaaaagtgttctccagaaagtccaggctaaatgaacatcaaagaattcataaaagagagaaatcttttatatgcagtgaatgtggaaaagtcttcactatgaagagccgtctgattgaacatcagcgaactcatactggagagaaaccctacatatgcaatgaatgtggaaaaggcttcccaggcaagcgtaatctcattgtacatcagcgaaatcatactggagagaaatcctatatatgtagtgaatgtggaaaaggcttcactgggaagagcatgcttattatacatcagcgaactcatacaggagagaagccctacatctgtagtgaatgtgggaaaggcttcaccacaaaacactatgtcatcatacatcaacgaaatcatacaggagagaaaccatatatatgcaatgaatgtgggaaaggcttcaccatgaagagccgtatgatcgaacatcaacgaactcatacaggagagaaaccctacatatgcagtgaatgtggaaaaggctttcccaggaagagtaatcttattgtacatcagagaaatcatacagtagagaagtcatatctatgtagtgaatgtggaaaaggttttactgtgaaaagcatgctcatcatacatcagcgaactcatacaggagagaagccctacacatgcagtgaatgtgggaaaggcttccccttgaagagtcggctgattgtacatcagcgaactcatactggagagaaaccttacaggtgcagtgaatgtgggaaaggtttcattgtgaatagcggactgatgttacatcagcgaactcatactggagagaaaccgtacatatgcaatgaatgtggaaaaggttttgcctttaagagcaatcttgttgtacaccagcgaactcatactggagagaaaccctttatgtgcagtgaatgtggaaaaggcttcaccatgaaacgctatctcattgtacatcagcaaattcatacagaagagaaatcttgtatatgtagtgaatgtggaagaggctttgccaaggaaacagagcttgctttacataagcaagttcatactggagaaaaaccttatggatgtaatgaatgtggtaaaggcttcactatgaagagccgtctaattgttcatcaacgaactcatacaggagagaaaccctttgtatgcagtgaatgtagaaaagccttctcctcaaagagaaatctcattgtacatcagcgaactcataatggaaacaaaccc

SEQ ID NO: 5448 - DNA, 1821 bp, Homo sapiens
  source 1..1821: mol_type = genomic DNA
atggccgagaagcgaaggggctcgccgtgcagcatgctaagcctcaaggcgcacgctttctcggtggaggcgctgatcggcgccgagaagcagcaacagcttcagaagaagcggcgaaaactgggcgccgaagaggcggcgggggccgtggacgacggaggctgcagccgcggcggcggcgcgggcgaaaagggttcttctgagggagacgaaggcgctgcgctcccgccgccggctggggcgacgtctgggccggctcggagtggcgcagacctggagcgcggagccgcgggcggctgtgaggacggcttccagcagggagcttcccctctggcgtcaccgggaggctcccccaaggggtctccggcgcgctccctggcccggcccgggacccctctgccctcgccgcaggccccgcgggtggatctgcagggagccgagctctggaagcgctttcatgagataggcactgagatgatcatcaccaaggccggcaggcgcatgtttccagcaatgagagtgaagatctctggattagatcctcaccagcaatattacattgccatggatattgtaccagtggacaacaaaagatacaggtatgtttaccacagttcgaaatggatggtggcaggtaatgctgactcgcctgtgccaccccgtgtgtacattcatccagactcgcctgcctcgggggagacttggatgagacaagttatcagcttcgacaagctgaagctcaccaacaatgaactggatgaccaaggccatattattcttcattctatgcacaaataccaaccgcgagtgcacgtcatccgtaaagactgtggagacgatctttctcccatcaagcctgttccatccggggagggagtaaaggcattctcctttccagaaactgtcttcacaaccgtcactgcctatcagaatcagcagattactcgcctgaagatagataggaatccatttgctaaaggcttccgagactccgggcgcaacagaatgggtttggaagccttggtggaatcatatgcattctggcgaccatcactacggactctgacctttgaagatatccctggaattcccaagcaaggcaatgcaagttcctccaccttgctccaaggtactgggaatggcgttcctgccactcaccctcaccttttgtctggctcctcttgctcctctcctgccttccatctggggcccaacaccagccagctgtgtagtctggcccctgctgactattctgcctgtgcccgctcaggcctcaccctcaaccgatacagcacatctttggcagagacctacaacaggctcaccaaccaggctggtgagacctttgccccgcccaggactccctcctatgtgggcgtgagcagcagcacctccgtgaacatgtccatgggtggcactgatggggacaccttcagctgcccacagaccagcttatccatgcagatttcgggaatgtccccccagctccagtatatcatgccatcaccctccagcaatgccttcgccactaaccagacccatcagggttcctataatacttttagattacacagcccctgtgcactatatggatataacttctccacatcccccaaactggctgccagtcctgagaaaattgtttcttcccaaggaagtttcttggggtcctcaccgagtgggaccatgacggatcggcagatgttgccccctgtggaaggagtgcacctgcttagcagtgggggtcagcagagtttctttgactctaggaccctaggaagcttaactctgtcatcatctcaagtatctgcacatatggtc

SEQ ID NO: 5449 - DNA, 1344 bp, Homo sapiens
  source 1..1344: mol_type = genomic DNA
atggccatgagtgagctgggcactcggaagcccagcgatggcactgtttctcatctgctcaatgtggtggagagtgagcttcaggcagggagggaaaaaggcgaccctacggagaagcaacttcagatcatcctggaggatgcacctctctggcagagattcaaggaagtcactaatgagatgattgtgaccaagaatggcagacggatgtttccagtcctaaagattagtgtcacagggttggaccccaatgccatgtactccctcctgctggactttgtccctacggacagtcaccgctggaagtacgtcaacggggaatgggtgcccgctggcaagccagaggtctccagccacagctgcgtctacattcacccggactcccccaactttggggcccactggatgaaagctcccatctccttcagcaaagtgaagctgaccaacaagctcaatggaggcgggcagataatgttgaattctctgcataaatatgaaccccaggttcacatagtgcgtgttggaagtgcccatcgaatggtaacaaactgctccttccctgaaacccagttcatagccgtgactgcctatcagaatgaggagataacggctctcaaaatcaagtacaatccttttgccaaagccttcttggatgccaaggaaagaaatcacctaagagacgtaccggaggctatctctgagagccagcatgtgacctattctcacttgggaggctggatcttttccaatccagatggagtgtgcacagcaggaaactccaattaccagtatgccgctcctctgcctctgcctgctccccacacccaccatggctgtgagcactattcgggtctccgaggacaccggcaggctccctacccttctgcgtacatgcacagaaaccattctccctcagtgaatttgatagaaagctcaagcaataatctgcaagttttctcgggacctgacagctggacttccttatcctccacaccccatgccagcatcctgtctgtaccccacaccaacggaccaatcaatccagggcccagcccctacccgtgcctgtggaccatcagcaatggtgccggaggccccagtgggccaggcccggaggtgcacgccagcaccccaggagcatttctcctcggaaacccagctgtgacttcacccccttctgtgctctccacccaagcacccacttcggctggtgtggaggttctgggggagccctcgctaaccagcattgctgtgtccacctggacagcagtggcctcgcatcccttcgcgggctggggtggcccaggagcgggtgggcaccattctccttcctcactggatggt

SEQ ID NO: 5450 - DNA, 1497 bp, Homo sapiens
  source 1..1497: mol_type = genomic DNA
atgctgtcactctcacccatcctcctctacacatgtgagatgtttcaggacccagtggcttttaaggatgtggctgtgaacttcacccaggaggagtgggctttgctggatatttcccagaagaatctctacagggaagtgatgctggaaactttctggaacctgacctctataggaaaaaagtggaaagaccagaacattgaatatgagtaccaaaaccccaggagaaacttcaggagtgtcacagaagagaaagtcaatgaaattaaagaagacagtcattgtggagaaacttttaccccagttccagatgacaggctgaacttccagaagaagaaagcttctcctgaagtaaaatcatgtgacagctttgtgtgtgaagttggcctaggtaactcatcttctaatatgaacatcagaggtgacactggacacaaggcatgtgaatgtcaggaatatggaccaaagccatggaagagtcaacaacctaaaaaagccttcagatatcacccctccttgagaacacaagaaagggatcacactggaaagaaaccctatgcttgtaaagaatgtggaaaaaacattatttaccattcaagcattcaaagacacatggtagtgcacagtggggatggaccttataaatgtaagttttgtgggaaagcattccattgtctcagtttatatcttatccatgaaagaactcacactggagagaaaccgtatgaatgtaaacaatgtggtaaatcttttagttattctgctacccatcgaatacatgaaagaactcacattggagaaaagccttatgaatgtcaggaatgtgggaaagcattccatagtcccagatcctgtcacagacatgaaaggagtcacatgggagagaaggcttatcaatgtaaggaatgtggaaaagcattcatgtgtccccgttatgttcgtagacatgaaaggacccactctaggaaaaaactttatgaatgtaagcagtgtgggaaagcattatcctctcttacaagttttcaaacacacataagaatgcactctggagaaagaccttatgaatgtaagacatgtgggaaaggcttttattctgccaagtcatttcaaagacatgaaaaaactcacagtggagagaaaccgtataaatgcaagcaatgtggtaaagccttcactcgttccggttcctttcgatatcatgaaaggactcacactggagagaaaccctatgagtgtaagcaatgtgggaaagccttcagatctgccccaaatcttcaattgcatggtaggactcacactggagagaaaccgtatcaatgtaaggaatgtgggaaagctttcagatctgcctcacaacttcgaatccatcgtaggattcacactggagagaaaccctatgaatgtaagaaatgtgggaaagccttcagatatgtccagaactttcgatttcatgaaaggacacaaacacataagaatgcactctggagaaagacctta

SEQ ID NO: 5451 - DNA, 1176 bp, Homo sapiens
  source 1..1176: mol_type = genomic DNA
atgcccaaacctatcatggtcatacccactttggcctccctggcttctccaactacactacagtcccagatgcttgggggcctaggacaggatgttttgttaaataattcactcactcctaaatatcttggctgtaagcaagacaacagctcttcccctaagcccagctccgtgttcagaaatggattctctggcattaagaagccttggcacagatgtcacgtctgcaaccaccacttccagttcaaacagcaccttcgagaccacatgaatacacacaccaacagacgcccttacagttgtcggatttgtcgcaagtcctatgtacgtcctggcagcctgagcacacacatgaaacttcatcatggtgagaaccgtctgaagaaactcatgtgttgtgagttttgtgcaaaagtgtttggccacatccgagtctattttggccatctgaaagaagtgcatagggttgtgatcagcactgagcctgcgcccagtgaactgcagccaggagacataccaaagaacagagacatgagtgtgcgaggcatggagggatcattggagagggaaaacaagtccaacctggaagaagacttccttctaaaccaggcagacgaagtcaaattacaaatcaaatgtggtcgttgtcagattactgctcagtcttttgcggaaataaaatttcatttacttgatgttcatggagaggaaattgagggcaggctacaagaagggaccttcccaggaagcaaggggactcaggaagagttggtgcagcacgctagccccgactggaaaaggcatcctgagagagggaagccggagaaggttcattcctcctccgaggaatcacatgcatgtccaagactgaaaaggcagctccaccttcatcagaatggcgtggaaatgctcatggaaaatgaaggaccccagtcaggaaccaacaagccaagggaaacctgccagggccctgagtgtcctggcctccacacgtttctcttgtggtcccattcaggctttaactgcctgctttgtgcagagatgctgggacggaaagaggacctcctccaccactggaagcaccagcataactgtgaggacccttccaaactgtgggctattttaaatacggtctccaaccagggagtgatcgaactttccagtgaagctgagaaa

SEQ ID NO: 5452 - DNA, 2454 bp, Homo sapiens
  source 1..2454: mol_type = genomic DNA
atggatagtgaatcaaacatcccttctggaacaatacagagtaggaaaggtttgcagaataagagtcagtttaggaccattgcaccaaaaattgtgcccaaagtcctaacgtccagaatgctgccatgtcattcaccatcacgctctgatcaggtgaatctgggaccctccatcaactccaagctgctggggatgtccacccagaactatgccctgatgcaggttgctggccaggaggggacattttctcttgttgctctgccacatgttgcctcagctcagccaattcagaaacccagaatgtccctacctgaaaacctgaaacttcctattcctagatatcaaccccctagaaatagcaaagcatcaagaaagaaacccatcctgatctttcctaagagtggctgtagcaaagctcctgcccaaacccaaatgtgtcctcagatgtccccttccccacctcaccaccctgaactcctgtacaaacccagtccatttgaggaagtaccatcactagagcaagccccagccagcattagcacagctgcgctgaccaatggaagtgaccatggggacttgagaccaccagtgaccaacacccatggcagtctgaaccctcctgctaccccagcatcatccacaccagaggagcctgccaagcaggacctcacagctctttcagggaaagcacactttgtaagcaagataacatctagtaaaccttctgctgttgccagtgaaaaatttaaagaacaagttgatcttgcaaaaaccatgaccaatttatcaccaaccattcttggcaatgcagttcagttgatctcttcagtccccaaagggaaactgccaatcccaccctactcaagaatgaagacaatggaggtttacaaaatcaaatcagatgctaacattgcaggtttttctttaccaggacctaaggccgactgtgataagataccctccaccacagaaggctttaatgcagccaccaaggtggcaagcaggctacctgttccacaagtgtcacagcagagtgcctgtgaaagtgccttttgtccacccaccaaacttgatcttaaccacaaaacaaaactgaacagtggagcagcaaagagaaaaggaagaaaacggaaggtaccagatgaaattttggcatttcagggaaaaaggaggaaatatatcattaataagtgtagagatggtaaagaaagagtaaaaaatgatccccaagaattcagagaccaaaagctggggaccctgaaaaaataccgtagcattatgcccaaacctatcatggtcatacccactttggcctccctggcttctccaactacactacagtcccagatgcttgggggcctaggacaggatgttttgttaaataattcactcactcctaaatatcttggctgtaagcaagacaacagctcttcccctaagcccagctccgtgttcagaaatggattctctggcattaagaagccttggcacagatgtcacgtctgcaaccaccacttccagttcaaacagcaccttcgagaccacatgaatacacacaccaacagacgcccttacagttgtcggatttgtcgcaagtcctatgtacgtcctggcagcctgagcacacacatgaaacttcatcatggtgagaaccgtctgaagaaactcatgtgttgtgagttttgtgcaaaagtgtttggccacatccgagtctattttggccatctgaaagaagtgcatagggttgtgatcagcactgagcctgcgcccagtgaactgcagccaggagacataccaaagaacagagacatgagtgtgcgaggcatggagggatcattggagagggaaaacaagtccaacctggaagaagacttccttctaaaccaggcagacgaagtcaaattacaaatcaaatgtggtcgttgtcagattactgctcagtcttttgcggaaataaaatttcatttacttgatgttcatggagaggaaattgagggcaggctacaagaagggaccttcccaggaagcaaggggactcaggaagagttggtgcagcacgctagccccgactggaaaaggcatcctgagagagggaagccggagaaggttcattcctcctccgaggaatcacatgcatgtccaagactgaaaaggcagctccaccttcatcagaatggcgtggaaatgctcatggaaaatgaaggaccccagtcaggaaccaacaagccaagggaaacctgccagggccctgagtgtcctggcctccacacgtttctcttgtggtcccattcaggctttaactgcctgctttgtgcagagatgctgggacggaaagaggacctcctccaccactggaagcaccagcataactgtgaggacccttccaaactgtgggctattttaaatacggtctccaaccagggagtgatcgaactttccagtgaagctgagaaa

SEQ ID NO: 5453 - DNA, 2337 bp, Homo sapiens
  source 1..2337: mol_type = genomic DNA
atgctgccatgtcattcaccatcacgctctgatcaggtgaatctgggaccctccatcaactccaagctgctggggatgtccacccagaactatgccctgatgcaggttgctggccaggaggggacattttctcttgttgctctgccacatgttgcctcagctcagccaattcagaaacccagaatgtccctacctgaaaacctgaaacttcctattcctagatatcaaccccctagaaatagcaaagcatcaagaaagaaacccatcctgatctttcctaagagtggctgtagcaaagctcctgcccaaacccaaatgtgtcctcagatgtccccttccccacctcaccaccctgaactcctgtacaaacccagtccatttgaggaagtaccatcactagagcaagccccagccagcattagcacagctgcgctgaccaatggaagtgaccatggggacttgagaccaccagtgaccaacacccatggcagtctgaaccctcctgctaccccagcatcatccacaccagaggagcctgccaagcaggacctcacagctctttcagggaaagcacactttgtaagcaagataacatctagtaaaccttctgctgttgccagtgaaaaatttaaagaacaagttgatcttgcaaaaaccatgaccaatttatcaccaaccattcttggcaatgcagttcagttgatctcttcagtccccaaagggaaactgccaatcccaccctactcaagaatgaagacaatggaggtttacaaaatcaaatcagatgctaacattgcaggtttttctttaccaggacctaaggccgactgtgataagataccctccaccacagaaggctttaatgcagccaccaaggtggcaagcaggctacctgttccacaagtgtcacagcagagtgcctgtgaaagtgccttttgtccacccaccaaacttgatcttaaccacaaaacaaaactgaacagtggagcagcaaagagaaaaggaagaaaacggaaggtaccagatgaaattttggcatttcagggaaaaaggaggaaatatatcattaataagtgtagagatggtaaagaaagagtaaaaaatgatccccaagaattcagagaccaaaagctggggaccctgaaaaaataccgtagcattatgcccaaacctatcatggtcatacccactttggcctccctggcttctccaactacactacagtcccagatgcttgggggcctaggacaggatgttttgttaaataattcactcactcctaaatatcttggctgtaagcaagacaacagctcttcccctaagcccagctccgtgttcagaaatggattctctggcattaagaagccttggcacagatgtcacgtctgcaaccaccacttccagttcaaacagcaccttcgagaccacatgaatacacacaccaacagacgcccttacagttgtcggatttgtcgcaagtcctatgtacgtcctggcagcctgagcacacacatgaaacttcatcatggtgagaaccgtctgaagaaactcatgtgttgtgagttttgtgcaaaagtgtttggccacatccgagtctattttggccatctgaaagaagtgcatagggttgtgatcagcactgagcctgcgcccagtgaactgcagccaggagacataccaaagaacagagacatgagtgtgcgaggcatggagggatcattggagagggaaaacaagtccaacctggaagaagacttccttctaaaccaggcagacgaagtcaaattacaaatcaaatgtggtcgttgtcagattactgctcagtcttttgcggaaataaaatttcatttacttgatgttcatggagaggaaattgagggcaggctacaagaagggaccttcccaggaagcaaggggactcaggaagagttggtgcagcacgctagccccgactggaaaaggcatcctgagagagggaagccggagaaggttcattcctcctccgaggaatcacatgcatgtccaagactgaaaaggcagctccaccttcatcagaatggcgtggaaatgctcatggaaaatgaaggaccccagtcaggaaccaacaagccaagggaaacctgccagggccctgagtgtcctggcctccacacgtttctcttgtggtcccattcaggctttaactgcctgctttgtgcagagatgctgggacggaaagaggacctcctccaccactggaagcaccagcataactgtgaggacccttccaaactgtgggctattttaaatacggtctccaaccagggagtgatcgaactttccagtgaagctgagaaa

SEQ ID NO: 5454 - DNA, 1710 bp, Homo sapiens
  source 1..1710: mol_type = genomic DNA
atggagaacctgaagtctggagtgtatcctctcaaggaagcaagtggatgccctggggctgacaggaatcttctggtgtactctttttatgaaaaggggccattgacatttagggatgtggccatagaattttctctggaggagtggcaatgcctggacactgctcagcaggatttgtatagaaaagtgatgttagagaactacagaaacctggtcttcttggcaggtattgctgtttctaagccagacctgatcacctgtctagagcaaggaaaagagccctggaatatgaagagacatgcgatggtagatcaacccccagttacatattctcattttgcccaagacctttggccagagcagggcataaaagattctttccaagaagtcatattgagaagatatggaaaatgtggacatgaagatttacagttaagaacaggctgtaaaagtgtggatgagtgtaatctgcacaaagaatgttatgatgaactaaaccagtgtttgacaactacccagagtgaaatatttcaatatgataaatatgtgaatgtcttttataaattttcaaatccaaatatacaaaagataagacatactggaaagaagcctttcaaatgtaaaaaatgtgacaaatcgttttgcatgcttttacacctaactcaacataaaagaattcatattagggaaaattcttaccaatgtgaagaatgtggtaaagtctttaactggttctcaacccttactagacacagaagaattcatactggagagaaaccctacaaatgtgaacaatgtggcaaagcttttaagcagtcctcaacccttactacacataagataattcatactggagagaaaccctacagatgtgaagaatgtggcaaaacctttaaccggtcctcacaccttactacacataaaagaattcatactggagagaaaccctacagatgtgaagaatgtggcagagcttttaaccggtcctcacaccttactacacataagattattcatactggagagaaaccctacaaatgtgaagaatgtggcaaagcttttaaccaatcctcaacccttactacacataagataattcatgctggagagaaaccttacaaatgtgaagaatgtggcaaagctttttaccgattctcataccttactaaacataagataattcatactggagagaaattctacaaatgtgaagaatgtggcaaaggctttaattggtcctcgacccttactaaacataaaagaattcatactggagagaaaccctacaaatgtgaacaatgtggcaaagcttttaatgagtcctcaaaccttactgcacataagataattcatactggagagaaaccctacaaatgtgaagaatgtggcaaagcctttaaccggtccccaaaacttactgcacataaggtaattcattctggagagaaaccctacaaatgtgaagaatgtggcaaagcttttaaccaattctcaaaccttactaaacataagataactcatattggagatacatcttacaaatacctagaatgtgataaagcctttagccagtcttcaactcttactaaacataaggtaattcatactggagagaaaccctacaactgtgaagaatacggcaaagctttcaaccagtcctcaaaccttattgaacaaagtaattcatactggagagaaaccctacaaatg

SEQ ID NO: 5455 - DNA, 2019 bp, Homo sapiens
  source 1..2019: mol_type = genomic DNA
atgatgtttcaggattcagtggcctttgaggatgtggctgtgaccttcacccaagaggagtgggctttgctggatccttcccagaaaaatctctgtagagatgtgatgcaagaaaccttcaggaacctggcctctatagggaaaaaatggaaaccccagaacatatatgtagagtacgaaaatctaaggagaaacctaagaattgtgggagagagactctttgaaagtaaagaaggtcatcagcatggagaaattttgacccaggttccagatgacatgctgaagaaaacaactactggagtaaaatcatgcgaaagcagtgtgtatggagaagtaggcagtgctcattcatctcttaataggcacatcagagatgacactggacacaaggcatatgagtatcaagaatatggacagaaaccatataaatgtaaatactgtaaaaaacctttcaactgtctctcctctgttcagacacatgaaagggctcatagtggaaggaaactctatgtttgtgaggaatgcggaaaaacatttatttcccattcaaaccttcaaagacacaggataatgcaccgtggagatggaccttataagtgtaaattttgtgggaaagccttgatgtttctcagtttgtatcttatccacaaacgaactcacactggagagaaaccatatcaatgtaaacagtgtggtaaagcctttagtcattctagtagccttcgaatacatgaaagaactcacactggggagaagccttataaatgtaatgaatgtgggaaagcattccatagttccacatgccttcatgctcataaaagaactcacactggggagaagccatatgaatgtaaacagtgtgggaaagccttcagctcttcccattcctttcaaatacatgaaagaactcacacgggggagaagccatatgaatgtaaggaatgtggaaaagcattcaagtgtcccagttctgttcgcagacatgaaagaacccactctaggaaaaaaccctatgaatgtaaacattgtgggaaagtattatcttatcttaccagctttcaaaaccacttgggaatgcacactggagagatatctcataaatgtaagatatgtgggaaagccttttattctcccagttcacttcaaacacatgaaaaaactcacactggagagaaaccctataaatgcaaccaatgtggtaaagcctttaattcttccagttccttccgatatcatgaaagaactcacactggagagaaaccttacgagtgtaagcaatgtgggaaagccttcagatctgcctcactccttcaaacacatggtaggactcacacgggagagaaaccctatgcatgtaaggaatgtggaaaaccatttagtaatttctctttctttcaaatacatgaaaggatgcacagagaagagaagccgtatgaatgtaagggttatgggaaaacattcagtttgcccagtttatttcatagacatgaaaggactcacactggaggaaaaacctatgaatgcaagcagtgtggcagatccttcaactgttcgagctcctttcgatatcatggaaggactcacactggagagaaaccctatgaatgcaagcaatgtggaaaagccttcagatctgcctcacagcttcaaattcatggaaggactcacactggagagaaaccttatgaatgtaagcagtgtgggaaagcctttggatctgcctcacaccttcaaatgcatggaaggactcacactggagagaaaccctatgaatgtaagcagtgtgggaagtcttttggatgtgcctcgcgacttcaaatgcatggaaggactcacactggagagaaaccgtataaatgtaagcaatgtgggaaagcttttggatgtccctcaaaccttcgaaggcatggaaggactcacactggagagaaaccctataaatgtaaccaatgtggtaaagtctttagatgttcttcacaacttcaagtgcatggaagggctcactgcatagacacccca

SEQ ID NO: 5456 - DNA, 2385 bp, Homo sapiens
  source 1..2385: mol_type = genomic DNA
atggatcatttgaacgaggcaactcaggggaaagaacattcagaaatgtctaacaatgtgagtgatccgaagggtccaccagccaagattgcccgcctggagcagaacgggagcccgctaggaagaggaaggcttgggagtacaggtgcaaaaatgcagggagtgcctttaaaacactcgggccatctgatgaaaaccaaccttaggaaaggaaccatgctgccagttttctgtgtggtggaacattatgaaaacgccattgaatatgattgcaaggaggagcatgcagaatttgtgctggtgagaaaggatatgcttttcaaccagctgatcgaaatggcattgctgtctctaggttattcacatagctctgctgcccaggccaaagggctaatccaggttggaaagtggaatccagttccactgtcttacgtgacagatgcccctgatgctacagtagcagatatgcttcaagatgtgtatcatgtggtcacattgaaaattcagttacacagttgccccaaactagaagacttgcctcccgaacaatggtcgcacaccacagtgaggaatgctctgaaggacttactgaaagatatgaatcagagttcattggccaaggagtgccccctttcacagagtatgatttcttccattgtgaacagtacttactatgcaaatgtctcagcagcaaaatgtcaagaatttggaaggtggtacaaacatttcaagaagacaaaagatatgatggttgaaatggatagtctttctgagctatcccagcaaggcgccaatcatgtcaattttggccagcaaccagttccagggaacacagccgagcagcctccatcccctgcgcagctctcccatggcagccagccctctgtccggacacctcttccaaacctgcaccctgggctcgtatcaacacctatcagtcctcaattggtcaaccagcagctggtgatggctcagctgctgaaccagcagtatgcagtgaatagacttttagcccagcagtccttaaaccaacaatacttgaaccaccctccccctgtcagtagatctatgaataagcctttggagcaacaggtttcgaccaacacagaggtgtcttccgaaatctaccagtgggtacgcgatgaactgaaacgagcaggaatctcccaggcggtatttgcacgtgtggcttttaacagaactcagggcttgctttcagaaatcctccgaaaggaagaggaccccaagactgcatcccagtctttgctggtaaaccttcgggctatgcagaatttcttgcagttaccggaagctgaaagagaccgaatataccaggacgaaagggaaaggagcttgaatgctgcctcggccatgggtcctgcccccctcatcagcacaccacccagccgtcctccccaggtgaaaacagctactattgccactgaaaggaatgggaaaccagagaacaataccatgaacattaatgcttccatttatgatgagattcagcaggaaatgaagcgtgctaaagtgtctcaagcactgtttgcaaaggttgcagcaaccaaaagccagggatggttgtgcgagctgttacgctggaaagaagatccttctccagaaaacagaaccctgtgggagaacctctccatgatccgaaggttcctcagtcttcctcagccagaacgtgatgccatttatgaacaggagagcaacgcggtgcatcaccatggcgacaggccgccccacattatccatgttccagcagagcagattcagagcccctctcccaccacccttgggaaaggagagtctagaggcgttttcttaccaggcctgccgacccctgcaccatggctcggtgctgctcctcagcaacagcagcagcaacagcaacagcagcagcagcagcagcaggcaccgccgcctccacagccacagcagcagccacagacaggccctcggctccccccacggcaacccacggtggcctctccagcagagtcagatgaggaaaaccgacagaagacccggccacgaacaaaaatttcagtggaagccttgggaatcctccagagtttcatacaagacgtgggcctgtaccctgacgaagaggccatccagactctgtctgcccagctcgaccttcccaagtacaccatcatcaagttctttcagaaccagcggtactatctcaagcaccacggcaaactgaaggacaattccggtttagaggtcgatgtggcagaatataaagaagaggagctgctgaaggatttggaagagagtgtccaagataaaaatactaacacccttttttcagtgaaactagaagaagagctgtcagtggaaggaaacacagacattaatactgatttgaaagac

SEQ ID NO: 5457 - DNA, 2418 bp, Homo sapiens
  source 1..2418: mol_type = genomic DNA
atgggggtttttgctgtccctcccctcagcgccgacaccatgtggatccaggttcggaccatggacgggaggcagacccacacggtggactcgctgtccaggctgaccaaggtggaggagctgaggcggaagatccaggagctgttccacgtggagccaggcctgcagaggctgttctacaggggcaaacagatggaggacggccataccctcttcgactacgaggtccgcctgaatgacaccatccagctcctggtccgccagagcctcgtgctcccccacagcaccaaggagcgggactccgagctctccgacaccgactccggctgctgcctgggccagagtgagtcagacaagtcctccacccacggtgaggcggccgccgagactgacagcaggccagccgatgaggacatgtgggatgagacggaattggggctgtacaaggtcaatgagtacgtcgatgctcgggacacgaacatgggggcgtggtttgaggcgcaggtggtcagggtgacgcggaaggccccctcccgggacgagccctgcagctccacgtccaggccggcgctggaggaggacgtcatttaccacgtgaaatacgacgactacccggagaacggcgtggtccagatgaactccagggacgtccgagcgcgcgcccgcaccatcatcaagtggcaggacctggaggtgggccaggtggtcatgctcaactacaaccccgacaaccccaaggagcggggcttctggtacgacgcggagatctccaggaagcgcgagaccaggacggcgcgggaactctacgccaacgtggtgctgggggatgattctctgaacgactgtcggatcatcttcgtggacgaagtcttcaagattgagcggccgggtgaagggagccccatggttgacaaccccatgagacggaagagcgggccgtcctgcaagcactgcaaggacgacgtgaacagactctgccgggtctgcgcctgccacctgtgcgggggccggcaggaccccgacaagcagctcatgtgcgatgagtgcgacatggccttccacatctactgcctggacccgcccctcagcagtgttcccagcgaggacgagtggtactgccctgagtgccggaatgatgccagcgaggtggtactggcgggagagcggctgagagagagcaagaagaaggcgaagatggcctcggccacatcgtcctcacagcgggactggggcaagggcatggcctgtgtgggccgcaccaaggaatgtaccatcgtcccgtccaaccactacggacccatcccggggatccccgtgggcaccatgtggcggttccgagtccaggtcagcgagtcgggtgtccatcggccccacgtggctggcatacacggccggagcaacgacggagcgtactccctagtcctggcggggggctatgaggatgatgtggaccatgggaattttttcacatacacgggtagtggtggtcgagatctttccggcaacaagaggaccgcggaacagtcttgtgatcagaaactcaccaacaccaacagggcgctggctctcaactgctttgctcccatcaatgaccaagaaggggccgaggccaaggactggcggtcggggaagccggtcagggtggtgcgcaatgtcaagggtggcaagaatagcaagtacgcccccgctgagggcaaccgctacgatggcatctacaaggttgtgaaatactggcccgagaaggggaagtccgggtttctcgtgtggcgctaccttctgcggagggacgatgatgagcctggcccttggacgaaggaggggaaggaccggatcaagaagctggggctgaccatgcagtatccagaaggctacctggaagccctggccaaccgagagcgagagaaggagaacagcaagagggaggaggaggagcagcaggaggggggcttcgcgtcccccaggacgggcaagggcaagtggaagcggaagtcggcaggaggtggcccgagcagggccgggtccccgcgccggacatccaagaaaaccaaggtggagccctacagtctcacggcccagcagagcagcctcatcagagaggacaagagcaacgccaagctgtggaatgaggtcctggcgtcactcaaggaccggccggcgagcggcagcccgttccagttgttcctgagtaaagtggaggagacgttccagtgtatctgctgtcaggagctggtgttccggcccatcacgaccgtgtgccagcacaacgtgtgcaaggactgcctggacagatcctttcgggcacaggtgttcagctgccctgcctgccgctacgacctgggccgcagctatgccatgcaggtgaaccagcctctgcagaccgtcctcaaccagctcttccccggctacggcaatggccgg

SEQ ID NO: 5458 - DNA, 2379 bp, Homo sapiens
  source 1..2379: mol_type = genomic DNA
atgtggatccaggttcggaccatggacgggaggcagacccacacggtggactcgctgtccaggctgaccaaggtggaggagctgaggcggaagatccaggagctgttccacgtggagccaggcctgcagaggctgttctacaggggcaaacagatggaggacggccataccctcttcgactacgaggtccgcctgaatgacaccatccagctcctggtccgccagagcctcgtgctcccccacagcaccaaggagcgggactccgagctctccgacaccgactccggctgctgcctgggccagagtgagtcagacaagtcctccacccacggtgaggcggccgccgagactgacagcaggccagccgatgaggacatgtgggatgagacggaattggggctgtacaaggtcaatgagtacgtcgatgctcgggacacgaacatgggggcgtggtttgaggcgcaggtggtcagggtgacgcggaaggccccctcccgggacgagccctgcagctccacgtccaggccggcgctggaggaggacgtcatttaccacgtgaaatacgacgactacccggagaacggcgtggtccagatgaactccagggacgtccgagcgcgcgcccgcaccatcatcaagtggcaggacctggaggtgggccaggtggtcatgctcaactacaaccccgacaaccccaaggagcggggcttctggtacgacgcggagatctccaggaagcgcgagaccaggacggcgcgggaactctacgccaacgtggtgctgggggatgattctctgaacgactgtcggatcatcttcgtggacgaagtcttcaagattgagcggccgggtgaagggagccccatggttgacaaccccatgagacggaagagcgggccgtcctgcaagcactgcaaggacgacgtgaacagactctgccgggtctgcgcctgccacctgtgcgggggccggcaggaccccgacaagcagctcatgtgcgatgagtgcgacatggccttccacatctactgcctggacccgcccctcagcagtgttcccagcgaggacgagtggtactgccctgagtgccggaatgatgccagcgaggtggtactggcgggagagcggctgagagagagcaagaagaaggcgaagatggcctcggccacatcgtcctcacagcgggactggggcaagggcatggcctgtgtgggccgcaccaaggaatgtaccatcgtcccgtccaaccactacggacccatcccggggatccccgtgggcaccatgtggcggttccgagtccaggtcagcgagtcgggtgtccatcggccccacgtggctggcatacacggccggagcaacgacggagcgtactccctagtcctggcggggggctatgaggatgatgtggaccatgggaattttttcacatacacgggtagtggtggtcgagatctttccggcaacaagaggaccgcggaacagtcttgtgatcagaaactcaccaacaccaacagggcgctggctctcaactgctttgctcccatcaatgaccaagaaggggccgaggccaaggactggcggtcggggaagccggtcagggtggtgcgcaatgtcaagggtggcaagaatagcaagtacgcccccgctgagggcaaccgctacgatggcatctacaaggttgtgaaatactggcccgagaaggggaagtccgggtttctcgtgtggcgctaccttctgcggagggacgatgatgagcctggcccttggacgaaggaggggaaggaccggatcaagaagctggggctgaccatgcagtatccagaaggctacctggaagccctggccaaccgagagcgagagaaggagaacagcaagagggaggaggaggagcagcaggaggggggcttcgcgtcccccaggacgggcaagggcaagtggaagcggaagtcggcaggaggtggcccgagcagggccgggtccccgcgccggacatccaagaaaaccaaggtggagccctacagtctcacggcccagcagagcagcctcatcagagaggacaagagcaacgccaagctgtggaatgaggtcctggcgtcactcaaggaccggccggcgagcggcagcccgttccagttgttcctgagtaaagtggaggagacgttccagtgtatctgctgtcaggagctggtgttccggcccatcacgaccgtgtgccagcacaacgtgtgcaaggactgcctggacagatcctttcgggcacaggtgttcagctgccctgcctgccgctacgacctgggccgcagctatgccatgcaggtgaaccagcctctgcagaccgtcctcaaccagctcttccccggctacggcaatggccgg

SEQ ID NO: 5459 - DNA, 879 bp, Homo sapiens
  source 1..879: mol_type = genomic DNA
atgggaccactgacatttatggatgtggccatagagttctctttggaggagtggcagtgcctggacactgcacagcggaatgtatataggcatgtgatgttagagaactacagaaacctggttttcttggctctgtgttctcgttttgcccaagacctttggctagagcagaacataaaagattctttccaaaaagtgacactgagcagatatggaaaatatggacataagaatttacagttaagaaaaggctgtaaaagtgtggatgagtgtaagggacaccaaggaggttttaatggacttaaccaatgtttgaaaattaccacaagcaaaatatttcaatgtaataaatatgtaaaagtcatgcataaattttcaaattcaaatagacacaagataagacatactgaaaataaacatttcagatgtaaagaatgtgacaaatcactttgcatgctttcacgcctaactcaacataaaaaaattcatactagagagaatttctacaaatgtgaagagtgtggaaaaacctttaactggtccacaaacctttctaaacctaagaaaattcatactggagaaaaaccctacaaatgtgaagtatgtggaaaagcctttcaccaatcctcaatccttactaaacataagataattcgtactggagaaaaaccctataaatgtgcacactgtggcaaagcctttaaacagtcctcacaccttactagacataagataattcatactgaagagaaaccctacaaatgtgaacaatgtggcaaggtctttaagcagtccccaacccttactaaacatcagataatttatactggagaggaaccatacaaatgtgaggaatgtggcaaagcttttaacctatct

SEQ ID NO: 5460 - DNA, 186 bp, Homo sapiens
  source 1..186: mol_type = genomic DNA
atgggaccactgacatttatggatgtggccatagagttctctttggaggagtggcagtgcctggacactgcacagcggaatgtatataggcatgtgatgttagagaactacagaaacctggttttcttggccagacctgattacctgtctggaacaaggaaaagagccctggaatatgaagagaca

SEQ ID NO: 5461 - DNA, 300 bp, Homo sapiens
  source 1..300: mol_type = genomic DNA
atgggaccactgacatttatggatgtggccatagagttctctttggaggagtggcagtgcctggacactgcacagcggaatgtatataggcatgtgatgttagagaactacagaaacctggttttcttggctgtagcatttacctttgatctcagtggactcaacattttgtcattccaaagtatcctgccatttgtttcagcactttatgtcatgggaaacagaaaccagtgtctgcaaaagcacctagaagccagaaataaagatctctgtgttctcgttttgcccaagacctttggc

SEQ ID NO: 5462 - DNA, 378 bp, Homo sapiens
  source 1..378: mol_type = genomic DNA
atgggaccactgacatttatggatgtggccatagagttctctttggaggagtggcagtgcctggacactgcacagcggaatgtatataggcatgtgatgttagagaactacagaaacctggttttcttggacctgattacctgtctggaacaaggaaaagagccctggaatatgaagagacatgagatggtggtagccaaacattcagctgtagcatttacctttgatctcagtggactcaacattttgtcattccaaagtatcctgccatttgtttcagcactttatgtcatgggaaacagaaaccagtgtctgcaaaagcacctagaagccagaaataaagatctctgtgttctcgttttgcccaagacctttggc

SEQ ID NO: 5463 - DNA, 861 bp, Homo sapiens
  source 1..861: mol_type = genomic DNA
atggatgtggccatagagttctctttggaggagtggcagtgcctggacactgcacagcggaatgtatataggcatgtgatgttagagaactacagaaacctggttttcttggctctgtgttctcgttttgcccaagacctttggctagagcagaacataaaagattctttccaaaaagtgacactgagcagatatggaaaatatggacataagaatttacagttaagaaaaggctgtaaaagtgtggatgagtgtaagggacaccaaggaggttttaatggacttaaccaatgtttgaaaattaccacaagcaaaatatttcaatgtaataaatatgtaaaagtcatgcataaattttcaaattcaaatagacacaagataagacatactgaaaataaacatttcagatgtaaagaatgtgacaaatcactttgcatgctttcacgcctaactcaacataaaaaaattcatactagagagaatttctacaaatgtgaagagtgtggaaaaacctttaactggtccacaaacctttctaaacctaagaaaattcatactggagaaaaaccctacaaatgtgaagtatgtggaaaagcctttcaccaatcctcaatccttactaaacataagataattcgtactggagaaaaaccctataaatgtgcacactgtggcaaagcctttaaacagtcctcacaccttactagacataagataattcatactgaagagaaaccctacaaatgtgaacaatgtggcaaggtctttaagcagtccccaacccttactaaacatcagataatttatactggagaggaaccatacaaatgtgaggaatgtggcaaagcttttaacctatct

SEQ ID NO: 5464 - DNA, 957 bp, Homo sapiens
  source 1..957: mol_type = genomic DNA
atgggaccactgacatttatggatgtggccatagagttctctttggaggagtggcagtgcctggacactgcacagcggaatgtatataggcatgtgatgttagagaactacagaaacctggttttcttggacctgattacctgtctggaacaaggaaaagagccctggaatatgaagagacatgagatggtggtagccaaacattcagctctgtgttctcgttttgcccaagacctttggctagagcagaacataaaagattctttccaaaaagtgacactgagcagatatggaaaatatggacataagaatttacagttaagaaaaggctgtaaaagtgtggatgagtgtaagggacaccaaggaggttttaatggacttaaccaatgtttgaaaattaccacaagcaaaatatttcaatgtaataaatatgtaaaagtcatgcataaattttcaaattcaaatagacacaagataagacatactgaaaataaacatttcagatgtaaagaatgtgacaaatcactttgcatgctttcacgcctaactcaacataaaaaaattcatactagagagaatttctacaaatgtgaagagtgtggaaaaacctttaactggtccacaaacctttctaaacctaagaaaattcatactggagaaaaaccctacaaatgtgaagtatgtggaaaagcctttcaccaatcctcaatccttactaaacataagataattcgtactggagaaaaaccctataaatgtgcacactgtggcaaagcctttaaacagtcctcacaccttactagacataagataattcatactgaagagaaaccctacaaatgtgaacaatgtggcaaggtctttaagcagtccccaacccttactaaacatcagataatttatactggagaggaaccatacaaatgtgaggaatgtggcaaagcttttaacctatct

SEQ ID NO: 5465 - DNA, 2322 bp, Homo sapiens
  source 1..2322: mol_type = genomic DNA
atggcggcgactactgccaaccccgaaatgacatcagatgtaccatcactgggtccagccattgcctctggaaactctggacctggaattcaaggtggaggagccattgtccagagggctattaagcggcgaccagggctggattttgatgatgatggagaagggaacagtaaatttttgaggtgtgatgatgatcagatgtctaacgataaggagcggtttgccagggaaaatcacagtgaaattgaacggcggcgacggaacaagatgacagcctacatcacagaactgtcagatatggtacccacctgtagtgccctggctcgaaaaccagacaagctaaccatcttacgcatggcagtttctcacatgaagtccttgcggggaactggcaacacatccactgatggctcctataagccgtctttcctcactgatcaggaactgaaacatttgatcttggaggcagcagatggctttctgtttattgtctcatgtgagacaggcagggtggtgtatgtgtctgactccgtgactcctgttttgaaccagccacagtctgaatggtttggcagcacactctatgatcaggtgcacccagatgatgtggataaacttcgtgagcagctttccacttcagaaaatgccctgacagggcgtatcctggatctaaagactggaacagtgaaaaaggaaggtcagcagtcttccatgagaatgtgtatgggctcaaggagatcgtttatttgccgaatgaggtgtggcagtagctctgtggacccagtttctgtgaataggctgagctttgtgaggaacagatgcaggaatggacttggctctgtaaaggatggggaacctcacttcgtggtggtccactgcacaggctacatcaaggcctggcccccagcaggtgtttccctcccagatgatgacccagaggctggccagggaagcaagttttgcctagtggccattggcagattgcaggtaactagttctcccaactgtacagacatgagtaatgtttgtcaaccaacagagttcatctcccgacacaacattgagggtatcttcacttttgtggatcaccgctgtgtggctactgttggctaccagccacaggaactcttaggaaagaatattgtagaattctgtcatcctgaagaccagcagcttctaagagacagcttccaacaggtagtgaaattaaaaggccaagtgctgtctgtcatgttccggttccggtctaagaaccaagaatggctctggatgagaaccagctcctttactttccagaacccttactcagatgaaattgagtacatcatctgtaccaacaccaatgtgaagaactctagccaagaaccacggcctacactctccaacacaatccagaggccacaactaggtcccacagctaatttacccctggagatgggctcaggacagctggcacccaggcagcagcaacagcaaacagaattggacatggtaccaggaagagatggactggccagctacaatcattcccaggtggttcagcctgtgacaaccacaggaccagaacacagcaagccccttgagaagtcagatggtttatttgcccaggatagagatccaagattttcagaaatctatcacaacatcaatgcggatcagagtaaaggcatctcctccagcactgtccctgccacccaacagctattctcccagggcaacacattccctcctaccccccggccggcagagaatttcaggaatagtggcctagcccctcctgtaaccattgtccagccatcagcttctgcaggacagatgttggcccagatttcccgccactccaaccccacccaaggagcaaccccaacttggacccctactacccgctcaggcttttctgcccagcaggtggctacccaggctactgctaagactcgtacttcccagtttggtgtgggcagctttcagactccatcctccttcagctccatgtccctccctggtgccccaactgcatcgcctggtgctgctgcctaccctagtctcaccaatcgtggatctaactttgctcctgagactggacagactgcaggacaattccagacacggacagcagagggtgtgggtgtctggccacagtggcagggccagcagcctcatcatcgttcaagttctagtgagcaacatgttcaacaaccgccagcacagcaacctggccagcctgaggtcttccaggagatgctgtccatgctgggagatcagagcaacagctacaacaatgaagaattccctgatctaactatgtttccccccttttcagaa

SEQ ID NO: 5466 - DNA, 2361 bp, Homo sapiens
  source 1..2361: mol_type = genomic DNA
atggcggcgactactgccaaccccgaaatgacatcagatgtaccatcactgggtccagccattgcctctggaaactctggacctggaattcaaggtggaggagccattgtccagagggctattaagcggcgaccagggctggattttgatgatgatggagaagggaacagtaaatttttgaggtgtgatgatgatcagatgtctaacgataaggagcggtttgccaggtcggatgatgagcagagctctgcggataaagagagacttgccagggaaaatcacagtgaaattgaacggcggcgacggaacaagatgacagcctacatcacagaactgtcagatatggtacccacctgtagtgccctggctcgaaaaccagacaagctaaccatcttacgcatggcagtttctcacatgaagtccttgcggggaactggcaacacatccactgatggctcctataagccgtctttcctcactgatcaggaactgaaacatttgatcttggaggcagcagatggctttctgtttattgtctcatgtgagacaggcagggtggtgtatgtgtctgactccgtgactcctgttttgaaccagccacagtctgaatggtttggcagcacactctatgatcaggtgcacccagatgatgtggataaacttcgtgagcagctttccacttcagaaaatgccctgacagggcgtatcctggatctaaagactggaacagtgaaaaaggaaggtcagcagtcttccatgagaatgtgtatgggctcaaggagatcgtttatttgccgaatgaggtgtggcagtagctctgtggacccagtttctgtgaataggctgagctttgtgaggaacagatgcaggaatggacttggctctgtaaaggatggggaacctcacttcgtggtggtccactgcacaggctacatcaaggcctggcccccagcaggtgtttccctcccagatgatgacccagaggctggccagggaagcaagttttgcctagtggccattggcagattgcaggtaactagttctcccaactgtacagacatgagtaatgtttgtcaaccaacagagttcatctcccgacacaacattgagggtatcttcacttttgtggatcaccgctgtgtggctactgttggctaccagccacaggaactcttaggaaagaatattgtagaattctgtcatcctgaagaccagcagcttctaagagacagcttccaacaggtagtgaaattaaaaggccaagtgctgtctgtcatgttccggttccggtctaagaaccaagaatggctctggatgagaaccagctcctttactttccagaacccttactcagatgaaattgagtacatcatctgtaccaacaccaatgtgaagaactctagccaagaaccacggcctacactctccaacacaatccagaggccacaactaggtcccacagctaatttacccctggagatgggctcaggacagctggcacccaggcagcagcaacagcaaacagaattggacatggtaccaggaagagatggactggccagctacaatcattcccaggtggttcagcctgtgacaaccacaggaccagaacacagcaagccccttgagaagtcagatggtttatttgcccaggatagagatccaagattttcagaaatctatcacaacatcaatgcggatcagagtaaaggcatctcctccagcactgtccctgccacccaacagctattctcccagggcaacacattccctcctaccccccggccggcagagaatttcagtggcctagcccctcctgtaaccattgtccagccatcagcttctgcaggacagatgttggcccagatttcccgccactccaaccccacccaaggagcaaccccaacttggacccctactacccgctcaggcttttctgcccagcaggtggctacccaggctactgctaagactcgtacttcccagtttggtgtgggcagctttcagactccatcctccttcagctccatgtccctccctggtgccccaactgcatcgcctggtgctgctgcctaccctagtctcaccaatcgtggatctaactttgctcctgagactggacagactgcaggacaattccagacacggacagcagagggtgtgggtgtctggccacagtggcagggccagcagcctcatcatcgttcaagttctagtgagcaacatgttcaacaaccgccagcacagcaacctggccagcctgaggtcttccaggagatgctgtccatgctgggagatcagagcaacagctacaacaatgaagaattccctgatctaactatgtttccccccttttcagaa

SEQ ID NO: 5467 - DNA, 2367 bp, Homo sapiens
  source 1..2367: mol_type = genomic DNA
atggcggcgactactgccaaccccgaaatgacatcagatgtaccatcactgggtccagccattgcctctggaaactctggacctggaattcaaggtggaggagccattgtccagagggctattaagcggcgaccagggctggattttgatgatgatggagaagggaacagtaaatttttgaggtgtgatgatgatcagatgtctaacgataaggagcggtttgccaggtcggatgatgagcagagctctgcggataaagagagacttgccagggaaaatcacagtgaaattgaacggcggcgacggaacaagatgacagcctacatcacagaactgtcagatatggtacccacctgtagtgccctggctcgaaaaccagacaagctaaccatcttacgcatggcagtttctcacatgaagtccttgcggggaactggcaacacatccactgatggctcctataagccgtctttcctcactgatcaggaactgaaacatttgatcttggaggcagcagatggctttctgtttattgtctcatgtgagacaggcagggtggtgtatgtgtctgactccgtgactcctgttttgaaccagccacagtctgaatggtttggcagcacactctatgatcaggtgcacccagatgatgtggataaacttcgtgagcagctttccacttcagaaaatgccctgacagggcgtatcctggatctaaagactggaacagtgaaaaaggaaggtcagcagtcttccatgagaatgtgtatgggctcaaggagatcgtttatttgccgaatgaggtgtggcagtagctctgtggacccagtttctgtgaataggctgagctttgtgaggaacagatgcaggaatggacttggctctgtaaaggatggggaacctcacttcgtggtggtccactgcacaggctacatcaaggcctggcccccagcaggtgtttccctcccagatgatgacccagaggctggccagggaagcaagttttgcctagtggccattggcagattgcaggtaactagttctcccaactgtacagacatgagtaatgtttgtcaaccaacagagttcatctcccgacacaacattgagggtatcttcacttttgtggatcaccgctgtgtggctactgttggctaccagccacaggaactcttaggaaagaatattgtagaattctgtcatcctgaagaccagcagcttctaagagacagcttccaacaggtagtgaaattaaaaggccaagtgctgtctgtcatgttccggttccggtctaagaaccaagaatggctctggatgagaaccagctcctttactttccagaacccttactcagatgaaattgagtacatcatctgtaccaacaccaatgtgaagaactctagccaagaaccacggcctacactctccaacacaatccagaggccacaactaggtcccacagctaatttacccctggagatgggctcaggacagctggcacccaggcagcagcaacagcaaacagaattggacatggtaccaggaagagatggactggccagctacaatcattcccaggtggttcagcctgtgacaaccacaggaccagaacacagcaagccccttgagaagtcagatggtttatttgcccaggatagagatccaagattttcagaaatctatcacaacatcaatgcggatcagagtaaaggcatctcctccagcactgtccctgccacccaacagctattctcccagggcaacacattccctcctaccccccggccggcagagaatttcaggaatagtggcctagcccctcctgtaaccattgtccagccatcagcttctgcaggacagatgttggcccagatttcccgccactccaaccccacccaaggagcaaccccaacttggacccctactacccgctcaggcttttctgcccagcaggtggctacccaggctactgctaagactcgtacttcccagtttggtgtgggcagctttcagactccatcctccttcagctccatgtccctccctggtgccccaactgcatcgcctggtgctgctgcctaccctagtctcaccaatcgtggatctaactttgctcctgagactggacagactgcaggacaattccagacacggacagcagagggtgtgggtgtctggccacagtggcagggccagcagcctcatcatcgttcaagttctagtgagcaacatgttcaacaaccgccagcacagcaacctggccagcctgaggtcttccaggagatgctgtccatgctgggagatcagagcaacagctacaacaatgaagaattccctgatctaactatgtttccccccttttcagaa

SEQ ID NO: 5468 - DNA, 2325 bp, Homo sapiens
  source 1..2325: mol_type = genomic DNA
atgacatcagatgtaccatcactgggtccagccattgcctctggaaactctggacctggaattcaaggtggaggagccattgtccagagggctattaagcggcgaccagggctggattttgatgatgatggagaagggaacagtaaatttttgaggtgtgatgatgatcagatgtctaacgataaggagcggtttgccaggtcggatgatgagcagagctctgcggataaagagagacttgccagggaaaatcacagtgaaattgaacggcggcgacggaacaagatgacagcctacatcacagaactgtcagatatggtacccacctgtagtgccctggctcgaaaaccagacaagctaaccatcttacgcatggcagtttctcacatgaagtccttgcggggaactggcaacacatccactgatggctcctataagccgtctttcctcactgatcaggaactgaaacatttgatcttggaggcagcagatggctttctgtttattgtctcatgtgagacaggcagggtggtgtatgtgtctgactccgtgactcctgttttgaaccagccacagtctgaatggtttggcagcacactctatgatcaggtgcacccagatgatgtggataaacttcgtgagcagctttccacttcagaaaatgccctgacagggcgtatcctggatctaaagactggaacagtgaaaaaggaaggtcagcagtcttccatgagaatgtgtatgggctcaaggagatcgtttatttgccgaatgaggtgtggcagtagctctgtggacccagtttctgtgaataggctgagctttgtgaggaacagatgcaggaatggacttggctctgtaaaggatggggaacctcacttcgtggtggtccactgcacaggctacatcaaggcctggcccccagcagatgatgacccagaggctggccagggaagcaagttttgcctagtggccattggcagattgcaggtaactagttctcccaactgtacagacatgagtaatgtttgtcaaccaacagagttcatctcccgacacaacattgagggtatcttcacttttgtggatcaccgctgtgtggctactgttggctaccagccacaggaactcttaggaaagaatattgtagaattctgtcatcctgaagaccagcagcttctaagagacagcttccaacaggtagtgaaattaaaaggccaagtgctgtctgtcatgttccggttccggtctaagaaccaagaatggctctggatgagaaccagctcctttactttccagaacccttactcagatgaaattgagtacatcatctgtaccaacaccaatgtgaagaactctagccaagaaccacggcctacactctccaacacaatccagaggccacaactaggtcccacagctaatttacccctggagatgggctcaggacagctggcacccaggcagcagcaacagcaaacagaattggacatggtaccaggaagagatggactggccagctacaatcattcccaggtggttcagcctgtgacaaccacaggaccagaacacagcaagccccttgagaagtcagatggtttatttgcccaggatagagatccaagattttcagaaatctatcacaacatcaatgcggatcagagtaaaggcatctcctccagcactgtccctgccacccaacagctattctcccagggcaacacattccctcctaccccccggccggcagagaatttcaggaatagtggcctagcccctcctgtaaccattgtccagccatcagcttctgcaggacagatgttggcccagatttcccgccactccaaccccacccaaggagcaaccccaacttggacccctactacccgctcaggcttttctgcccagcaggtggctacccaggctactgctaagactcgtacttcccagtttggtgtgggcagctttcagactccatcctccttcagctccatgtccctccctggtgccccaactgcatcgcctggtgctgctgcctaccctagtctcaccaatcgtggatctaactttgctcctgagactggacagactgcaggacaattccagacacggacagcagagggtgtgggtgtctggccacagtggcagggccagcagcctcatcatcgttcaagttctagtgagcaacatgttcaacaaccgccagcacagcaacctggccagcctgaggtcttccaggagatgctgtccatgctgggagatcagagcaacagctacaacaatgaagaattccctgatctaactatgtttccccccttttcagaa

SEQ ID NO: 5469 - DNA, 1626 bp, Homo sapiens
  source 1..1626: mol_type = genomic DNA
atggagctgcgctcggagctgcccagcgtgcccggcgcggcgacggcggcggcggcaacagcgacggggccgcctgtggcgtcggtggcgtcggtggcggcagccgcggcggccgctgcatcgctaccggtgagcgtggcaggcggcttgctgcgggggccgccactgttgctgcgggcagccgagaagtacccgcggacccccaagtgcgcgcgctgtcgcaaccatggcgtggtgtcggccctcaagggccacaaacgctactgtcgctggaaggactgcctgtgcgccaagtgcacgctcatcgcggagcgccagcgtgtcatggcggcgcaggtggcgctgcgcaggcagcaggcgcaggaggagaacgaggcgcgcgagctgcagctgctctacggcactgccgaggggctggcgctggccgccgccaacggcatcatccccccgaggcccgcctacgaggtcttcggttcagtgtgcgccgccgacggcgggggacctggagcgggagcgcccgcggggaccggaggcggagcagctggcgcagggggctcagaggccaagttgcagaagtttgacctgtttcctaagacgctgctgcaggcaggccgcccgggcagcccgctgccgccgccggtgaagcccttatcacccgacggcgcagactcggggcccgggacgtcgtccccagaggtgcggcccggctcaggctcggagaacggcgatggcgagtccttttctggttcgcccctagctcgggcctccaaagaggcaggtggcagctgcccaggcagcgctggccctggcggcggcggcgaggaggacagcccgggctccgctagccctctgggctctgaatccggttcagaggctgacaaagaagagggtgaggccgcgccggcgccagggctgggcggaggctcgggtccacggcagcggacgccgctggatatcttgacacgcgtgttcccaggccaccggcgaggcgtcctggagctggtgttgcagggctgcggcggcgacgtggtgcaggccatcgagcaggtgctgaaccaccaccgtgggggcctggcggccggcctgggccctgcggcgcccccagataaggccgccgtgggtgctgcagcagctgcagacgacgcgtggcccagccgcgtcgacgccgccgccgccgccgccgccgccgccggggggcctgggctgcctgcgccgctgcaggcggggcccgccgcacctccgcaccacagacccttgctggccggcgccatggcgcctggggcgctgggctcgctgagcagccgctcggccttctcgccgctgcagcccaacgccagtcacttcggtgccgacgcgggcgcctacccgctgggcgcgccgctcggcctcagccccctgcgcctggcctactccgcggcggcggcgcacagccgcggtctggccttcatggcgccctactccactgccggcttggtgcccacgctcggcttccgcccacccatggactacgcctttagcgatctcatgcgtgaccgctcggccgccgctgctgcggcggtgcacaaggagccgacctacggcggcggcctgtacgggcctatggtcaacggcgctccggagaagcag

SEQ ID NO: 5470 - DNA, 342 bp, Homo sapiens
  source 1..342: mol_type = genomic DNA
atgtttccagtgttctctggctgtttccaagagctacaagaaaagaataaatctctggagttggtgtcctttgaggaggtagctgtgcacttcacctgggaggagtggcaggacctggatgatgctcagaggaccctgtacagggacgtgatgctggagacctacagcagcctggtatcattggggcattacattaccaaacctgagatgatcttcaagctagagcaaggagcagagccatggatagtagaagaaaccccaaacctgagactttcaggtggaagcaagaagcaagttttctcaggtatttgccacaggagcctggtggagctccaggaggtt

SEQ ID NO: 5471 - DNA, 2592 bp, Homo sapiens
  source 1..2592: mol_type = genomic DNA
atgctggagacctacagcagcctggtatcattggggcattacattaccaaacctgagatgatcttcaagctagagcaaggagcagagccatggatagtagaagaaaccccaaacctgagactttcagctgtccagatcattgatgaccttattgaaaggagccatgaaagtcatgatagatttttctggcaaattgtaatcaccaacagcaacacatcaactcaggagagagttgaattaggaaaaacatttaatttgaactcaaaccatgttttaaatctgattataaataatggaaacagttcaggaatgaagcctgggcagtttaatgattgccagaacatgcttttccctattaagcctggggagacacagtctggagagaaacctcatgtctgtgatataaccaggagatcccacagacatcatgaacatcttactcagcatcacaagattcaaactctgctgcagacttttcaatgtaatgaacaagggaaaaccttcaacacggaggcaatgttctttatacataagagggttcatatagtacagacctttggtaaatataatgaatatgagaaagcctgtaataactcagctgttattgtccaagtgataactcaggtaggacagccaacttgctgtagaaagtctgacttcactaaacatcagcagacacacacaggagagaaaccctatgaatgtgttgaatgtgagaaaccctccattagcaaatcagaccttatgctacagtgcaagatgcctactgaggaaaaaccttatgcctgtaactggtgtgaaaaattgttcagctataagtccagcctcattatccatcagagaattcacacaggggaaaagccctatggatgcaatgaatgtggtaaaacctttcgccgtaagtcattcctcactttacatgagagaactcacacaggggataaaccctacaaatgtattgaatgtggaaaaacttttcactgtaagtcacttctcactttacatcacagaactcactcaggggaaaagccctatcagtgtagtgaatgtggaaaaacctttagccagaagtcatacctcacaatacatcatagaactcacacaggggaaaagccctatgcatgtgaccattgtgaagaagcatttagccataagtcaaggcttactgtccatcagagaacacacacaggggaaaaaccgtatgaatgtaatgagtgtggaaaaccctttatcaataagtcaaacctcaggttacatcagagaactcacacaggggaaaaaccctatgaatgcaatgaatgtgggaaaacgtttcaccgtaagtcattcctcactatccatcaatggactcacacaggggaaaaaccctacgaatgcaatgaatgtgggaaaacctttcgctgtaagtcattcctcactgtccatcagagaactcatgctggggaaaaaccatacgcatgtaacgaatgtggaaaaacatatagccacaagtcataccttacagtacatcacagaactcacacaggggaaaaaccctatgaatgtaatgaatgtggaaaatcctttcactgtaagtcattcctaactatacatcagagaactcatgctggcaaaaaaccctatgaatgtaatgaatgtgagaaaacctttatcaataagttaaaccttgggatacacaagagaactcacacaggggaaagaccctatgaatgtaatgaatgtggaaaaacctttcgtcagaagtcaaatctcagcacccatcagggaactcacacaggagagaaaccttacgtatgtaatgaatgtggaaaaacctttcatcgcaagtcattcctcaccatacaccagagaactcacacggggaaaaaccgtatggatgtaatgaatgtggaaaaactttttgtcagaaatcataccttattatacatcagagaactcacaccggggaaaagccctatgaatgtaatgaatgtggaaaatcctttcatcagaaggcaaatcttcagaagcatcaaggtattcacacgggggagaaaccctatgaatgtagcaaatgtggaaaaaccttgtcagaagtcagtcctcactgtacatcatagaacccataccggagaaaaaccttatgaatgtaatgagtgtgggaaaaccttttgtcacaagtcaaacctcagtacgcatcaggggactcactcaggagagaaaccctatgaatgtgatgaatgtaggaaaactttttacgataagacagttctcaccatacatcagagaactcacacaggtgagaagccatttgaatgtaaagaatgtaggaaaaccttctcccagaagtcaaaactctttgtacatcacagaactcacacaggggaaaaaccctttagatgtaatgaatgtaggaaaactttctcccagaagtcaggcctcagtatacatcagagaacacacacaggagaaaaaccttatgaatgtaaggaatgtgggaaaaccttttgccagaagtcacacctcagcaggcatcaacaaacccatataggagagaaatctgacgtagctgaggcaggctatgtgttccctcaaaatcactcttttttccct

SEQ ID NO: 5472 - DNA, 1197 bp, Homo sapiens
  source 1..1197: mol_type = genomic DNA
atgcagagcctttccttaggacaaacaagcatttcaaaaggtttgaactacctaaccattatggcaccaggaaacctctggcatatgagaaataactttctctttggttcaagatgttggatgactcgattttcagcagaaaacatcttcaaatcagtttcatttaggctttttggtgtgaagtgtcataatacagacagtgagcctttgaaaaatgaggacctactgaaaaacttacttactatgggagtagatattgacatggcaaggaaacgacagcctggagtttttcataggatgattaccaatgagcaggacctgaagatgttccttctttccaaaggagctagcaaagaagtgatcgctagcatcatatcaagatatccacgagcaataacacgtactcccgagaatctttcaaaacggtgggatctgtggagaaagattgtgacatcagaccttgaaattgtaaatattttggaacgttctcctgaatccttttttcggtccaataacaacctaaacttagagaataatataaagttcctctactcagttggattgacccgtaaatgcctttgtcgattgttgaccaatgcccctcgtaccttctccaatagtcttgatctgaataaacagatggttgaatttttgcaggcagccggtttgtcattgggtcacaatgatcccgcagattttgtcagaaagataatttttaaaaacccttttatcttaattcagagcaccaagcgggtgaaagctaacattgaattcttacggtcaactttcaatttgaacagtgaggaactgctggttctgatatgtggtccaggagctgaaatcctagacctttccaatgactatgccagaagaagctacgcaaacatcaaagagaagctgttttctcttggatgtactgaagaagaggtacagaagtttgtcttaagctatccagatgtgatcttcttggcagagaaaaagtttaatgataaaatagactgcctcatggaagaaaacattagcatttcacaaataatcgaaaatcctcgggttctggattcaagcataagtactttaaaaagtcgaatcaaagaattggtaaatgctggctgtaacttgagtactttaaacatcactcttctatcttggagtaaaaaaagatatgaagctaaattgaaaaagttaagcagatttgcc

SEQ ID NO: 5473 - DNA, 1137 bp, Homo sapiens
  source 1..1137: mol_type = genomic DNA
atggcaccaggaaacctctggcatatgagaaataactttctctttggttcaagatgttggatgactcgattttcagcagaaaacatcttcaaatcagtttcatttaggctttttggtgtgaagtgtcataatacagacagtgagcctttgaaaaatgaggacctactgaaaaacttacttactatgggagtagatattgacatggcaaggaaacgacagcctggagtttttcataggatgattaccaatgagcaggacctgaagatgttccttctttccaaaggagctagcaaagaagtgatcgctagcatcatatcaagatatccacgagcaataacacgtactcccgagaatctttcaaaacggtgggatctgtggagaaagattgtgacatcagaccttgaaattgtaaatattttggaacgttctcctgaatccttttttcggtccaataacaacctaaacttagagaataatataaagttcctctactcagttggattgacccgtaaatgcctttgtcgattgttgaccaatgcccctcgtaccttctccaatagtcttgatctgaataaacagatggttgaatttttgcaggcagccggtttgtcattgggtcacaatgatcccgcagattttgtcagaaagataatttttaaaaacccttttatcttaattcagagcaccaagcgggtgaaagctaacattgaattcttacggtcaactttcaatttgaacagtgaggaactgctggttctgatatgtggtccaggagctgaaatcctagacctttccaatgactatgccagaagaagctacgcaaacatcaaagagaagctgttttctcttggatgtactgaagaagaggtacagaagtttgtcttaagctatccagatgtgatcttcttggcagagaaaaagtttaatgataaaatagactgcctcatggaagaaaacattagcatttcacaaataatcgaaaatcctcgggttctggattcaagcataagtactttaaaaagtcgaatcaaagaattggtaaatgctggctgtaacttgagtactttaaacatcactcttctatcttggagtaaaaaaagatatgaagctaaattgaaaaagttaagcagatttgcc

SEQ ID NO: 5474 - DNA, 2214 bp, Homo sapiens
  source 1..2214: mol_type = genomic DNA
atggaaataccaaatccccctacctccaaatgtatcacttactggaaaagaaaagtgaaatctgaatacatgcgacttcgacaacttaaacggcttcaggcaaatatgggtgcaaaggctttgtatgtggcaaattttgcaaaggttcaagaaaaaacccagatcctcaatgaagaatggaagaagcttcgtgtccaacctgttcagtcaatgaagccttgtaccatagagagcattttcccgggatttgcaagccaacatatgttaatgaggtcactgaacacagttgcattggttcccatcatgtattcctggtcccctctccaacagaactttatggtagaagatgagacggttttgtgcaatattccctacatgggagatgaagtgaaagaagaagatgagacttttattgaggagctgatcaataactatgatgggaaagtccatggtgaagaagagatgatccctggatccgttctgattagtgatgctgtttttctggagttggtcgatgccctgaatcagtactcagatgaggaggaggaagggcacaatgacacctcagatggaaagcaggatgacagcaaagaagatctgccagtaacaagaaagagaaagcgacatgctattgaaggcaacaaaaagagttccaagaaacagttcccaaatgacatgatcttcagtgcaattgcctcaatgttccctgagaatggtgtcccagatgacatgaaggagaggtatcgagaactaacagagatgtcagaccccaatgcacttccccctcagtgcacacccaacatcgatggccccaatgccaagtctgtgcagcgggagcaatctctgcactccttccacacacttttttgccggcgctgctttaaatacgactgcttccttcacccttttcatgccacccctaatgtatataaacgcaagaataaagaaatcaagattgaaccagaaccatgtggcacagactgcttccttttgctggaaggagcaaaggagtatgccatgctccacaacccccgctccaagtgctctggtcgtcgccggagaaggcaccacatagtcagtgcttcctgctccaatgcctcagcctctgctgtggctgagactaaagaaggagacagtgacagggacacaggcaatgactgggcctccagttcttcagaggctaactctcgctgtcagactcccacaaaacagaaggctagtccagccccacctcaactctgcgtagtggaagcaccctcggagcctgtggaatggactggggctgaagaatctctttttcgagtcttccatggcacctacttcaacaacttctgttcaatagccaggcttctggggaccaagacgtgcaagcaggtctttcagtttgcagtcaaagaatcacttatcctgaagctgccaacagatgagctcatgaacccctcacagaagaagaaaagaaagcacagattgtgggctgcacactgcaggaagattcagctgaagaaagataactcttccacacaagtgtacaactaccaaccctgcgaccacccagaccgcccctgtgacagcacctgcccctgcatcatgactcagaatttctgtgagaagttctgccagtgcaacccagactgtcagaatcgtttccctggctgtcgctgtaagacccagtgcaataccaagcaatgtccttgctatctggcagtgcgagaatgtgaccctgacctgtgtctcacctgtggggcctcagagcactgggactgcaaggtggtttcctgtaaaaactgcagcatccagcgtggacttaagaagcacctgctgctggccccctctgatgtggccggatggggcaccttcataaaggagtctgtgcagaagaacgaattcatttctgaatactgtggtgagctcatctctcaggatgaggctgatcgacgcggaaaggtctatgacaaatacatgtccagcttcctcttcaacctcaataatgattttgtagtggatgctactcggaaaggaaacaaaattcgatttgcaaatcattcagtgaatcccaactgttatgccaaagtggtcatggtgaatggagaccatcggattgggatctttgccaagagggcaattcaagctggcgaagagctcttctttgattacaggtacagccaagctgatgctctcaagtacgtggggatcgagagggagaccgacgtcctt

SEQ ID NO: 5475 - DNA, 2121 bp, Homo sapiens
  source 1..2121: mol_type = genomic DNA
atggaaataccaaatccccctacctccaaatgtatcacttactggaaaagaaaagtgaaatctgaatacatgcgacttcgacaacttaaacggcttcaggcaaatatgggtgcaaaggctttgtatgtggcaaattttgcaaaggttcaagaaaaaacccagatcctcaatgaagaatggaagaagcttcgtgtccaacctgttcagtcaatgaagcctgtgagtggacacccttttctcaaaaaggtagaagatgagacggttttgtgcaatattccctacatgggagatgaagtgaaagaagaagatgagacttttattgaggagctgatcaataactatgatgggaaagtccatggtgaagaagagatgatccctggatccgttctgattagtgatgctgtttttctggagttggtcgatgccctgaatcagtactcagatgaggaggaggaagggcacaatgacacctcagatggaaagcaggatgacagcaaagaagatctgccagtaacaagaaagagaaagcgacatgctattgaaggcaacaaaaagagttccaagaaacagttcccaaatgacatgatcttcagtgcaattgcctcaatgttccctgagaatggtgtcccagatgacatgaaggagaggtatcgagaactaacagagatgtcagaccccaatgcacttccccctcagtgcacacccaacatcgatggccccaatgccaagtctgtgcagcgggagcaatctctgcactccttccacacacttttttgccggcgctgctttaaatacgactgcttccttcacccttttcatgccacccctaatgtatataaacgcaagaataaagaaatcaagattgaaccagaaccatgtggcacagactgcttccttttgctggaaggagcaaaggagtatgccatgctccacaacccccgctccaagtgctctggtcgtcgccggagaaggcaccacatagtcagtgcttcctgctccaatgcctcagcctctgctgtggctgagactaaagaaggagacagtgacagggacacaggcaatgactgggcctccagttcttcagaggctaactctcgctgtcagactcccacaaaacagaaggctagtccagccccacctcaactctgcgtagtggaagcaccctcggagcctgtggaatggactggggctgaagaatctctttttcgagtcttccatggcacctacttcaacaacttctgttcaatagccaggcttctggggaccaagacgtgcaagcaggtctttcagtttgcagtcaaagaatcacttatcctgaagctgccaacagatgagctcatgaacccctcacagaagaagaaaagaaagcacagattgtgggctgcacactgcaggaagattcagctgaagaaagataactcttccacacaagtgtacaactaccaaccctgcgaccacccagaccgcccctgtgacagcacctgcccctgcatcatgactcagaatttctgtgagaagttctgccagtgcaacccagactgtcagaatcgtttccctggctgtcgctgtaagacccagtgcaataccaagcaatgtccttgctatctggcagtgcgagaatgtgaccctgacctgtgtctcacctgtggggcctcagagcactgggactgcaaggtggtttcctgtaaaaactgcagcatccagcgtggacttaagaagcacctgctgctggccccctctgatgtggccggatggggcaccttcataaaggagtctgtgcagaagaacgaattcatttctgaatactgtggtgagctcatctctcaggatgaggctgatcgacgcggaaaggtctatgacaaatacatgtccagcttcctcttcaacctcaataatgattttgtagtggatgctactcggaaaggaaacaaaattcgatttgcaaatcattcagtgaatcccaactgttatgccaaagtggtcatggtgaatggagaccatcggattgggatctttgccaagagggcaattcaagctggcgaagagctcttctttgattacaggtacagccaagctgatgctctcaagtacgtggggatcgagagggagaccgacgtcctt

SEQ ID NO: 5476 - DNA, 2121 bp, Homo sapiens
  source 1..2121: mol_type = genomic DNA
atgggccagactgggaagaaatctgagaagggaccagtttgttggcggaagcgtgtaaaatcagagtacatgcgactgagacagctcaagaggttcagacgagctgatgaagtaaagagtatgtttagttccaatcgtcagaaaattttggaaagaacggaaatcttaaaccaagaatggaaacagcgaaggatacagcctgtgcacatcctgacttctgtgagctcattgcgcgggactagggaggtggaagatgaaactgttttacataacattccttatatgggagatgaagttttagatcaggatggtactttcattgaagaactaataaaaaattatgatgggaaagtacacggggatagagaatgtgggtttataaatgatgaaatttttgtggagttggtgaatgcccttggtcaatataatgatgatgacgatgatgatgatggagacgatcctgaagaaagagaagaaaagcagaaagatctggaggatcaccgagatgataaagaaagccgcccacctcggaaatttccttctgataaaatttttgaagccatttcctcaatgtttccagataagggcacagcagaagaactaaaggaaaaatataaagaactcaccgaacagcagctcccaggcgcacttcctcctgaatgtacccccaacatagatggaccaaatgctaaatctgttcagagagagcaaagcttacactcctttcatacgcttttctgtaggcgatgttttaaatatgactgcttcctacatccttttcatgcaacacccaacacttataagcggaagaacacagaaacagctctagacaacaaaccttgtggaccacagtgttaccagcatttggagggagcaaaggagtttgctgctgctctcaccgctgagcggataaagaccccaccaaaacgtccaggaggccgcagaagaggacggcttcccaataacagtagcaggcccagcacccccaccattaatgtgctggaatcaaaggatacagacagtgatagggaagcagggactgaaacggggggagagaacaatgataaagaagaagaagagaagaaagatgaaacttcgagctcctctgaagcaaattctcggtgtcaaacaccaataaagatgaagccaaatattgaacctcctgagaatgtggagtggagtggtgctgaagcctcaatgtttagagtcctcattggcacttactatgacaatttctgtgccattgctaggttaattgggaccaaaacatgtagacaggtgtatgagtttagagtcaaagaatctagcatcatagctccagctcccgctgaggatgtggatactcctccaaggaaaaagaagaggaaacaccggttgtgggctgcacactgcagaaagatacagctgaaaaaggacggctcctctaaccatgtttacaactatcaaccctgtgatcatccacggcagccttgtgacagttcgtgcccttgtgtgatagcacaaaatttttgtgaaaagttttgtcaatgtagttcagagtgtcaaaaccgctttccgggatgccgctgcaaagcacagtgcaacaccaagcagtgcccgtgctacctggctgtccgagagtgtgaccctgacctctgtcttacttgtggagccgctgaccattgggacagtaaaaatgtgtcctgcaagaactgcagtattcagcggggctccaaaaagcatctattgctggcaccatctgacgtggcaggctgggggatttttatcaaagatcctgtgcagaaaaatgaattcatctcagaatactgtggagagattatttctcaagatgaagctgacagaagagggaaagtgtatgataaatacatgtgcagctttctgttcaacttgaacaatgattttgtggtggatgcaacccgcaagggtaacaaaattcgttttgcaaatcattcggtaaatccaaactgctatgcaaaagttatgatggttaacggtgatcacaggataggtatttttgccaagagagccatccagactggcgaagagctgttttttgattacagatacagccaggctgatgccctgaagtatgtcggcatcgaaagagaaatggaaatccct

SEQ ID NO: 5477 - DNA, 2085 bp, Homo sapiens
  source 1..2085: mol_type = genomic DNA
atgggccagactgggaagaaatctgagaagggaccagtttgttggcggaagcgtgtaaaatcagagtacatgcgactgagacagctcaagaggttcagacgagctgatgaagtaaagagtatgtttagttccaatcgtcagaaaattttggaaagaacggaaatcttaaaccaagaatggaaacagcgaaggatacagcctgtgcacatcctgacttcttgttcggtgaccagtgacttggattttccaacacaagtcatcccattaaagactctgaatgcagttgcttcagtacccataatgtattcttggtctcccctacagcagaattttatggtggaagatgaaactgttttacataacattccttatatgggagatgaagttttagatcaggatggtactttcattgaagaactaataaaaaattatgatgggaaagtacacggggatagagaatgtgggtttataaatgatgaaatttttgtggagttggtgaatgcccttggtcaatataatgatgatgacgatgatgatgatggagacgatcctgaagaaagagaagaaaagcagaaagatctggaggatcaccgagatgataaagaaagccgcccacctcggaaatttccttctgataaaatttttgaagccatttcctcaatgtttccagataagggcacagcagaagaactaaaggaaaaatataaagaactcaccgaacagcagctcccaggcgcacttcctcctgaatgtacccccaacatagatggaccaaatgctaaatctgttcagagagagcaaagcttacactcctttcatacgcttttctgtaggcgatgttttaaatatgactgcttcctacatccttttcatgcaacacccaacacttataagcggaagaacacagaaacagctctagacaacaaaccttgtggaccacagtgttaccagcatttggagggagcaaaggagtttgctgctgctctcaccgctgagcggataaagaccccaccaaaacgtccaggaggccgcagaagaggacggcttcccaataacagtagcaggcccagcacccccaccattaatgtgctggaatcaaaggatacagacagtgatagggaagcagggactgaaacggggggagagaacaatgataaagaagaagaagagaagaaagatgaaacttcgagctcctctgaagcaaattctcggtgtcaaacaccaataaagatgaagccaaatattgaacctcctgagaatgtggagtggagtggtgctgaagcctcaatgtttagagtcctcattggcacttactatgacaatttctgtgccattgctaggttaattgggaccaaaacatgtagacaggtgtatgagtttagagtcaaagaatctagcatcatagctccagctcccgctgaggatgtggatactcctccaaggaaaaagaagaggaaacaccggttgtgggctgcacactgcagaaagatacagctgaaaaagggtcaaaaccgctttccgggatgccgctgcaaagcacagtgcaacaccaagcagtgcccgtgctacctggctgtccgagagtgtgaccctgacctctgtcttacttgtggagccgctgaccattgggacagtaaaaatgtgtcctgcaagaactgcagtattcagcggggctccaaaaagcatctattgctggcaccatctgacgtggcaggctgggggatttttatcaaagatcctgtgcagaaaaatgaattcatctcagaatactgtggagagattatttctcaagatgaagctgacagaagagggaaagtgtatgataaatacatgtgcagctttctgttcaacttgaacaatgattttgtggtggatgcaacccgcaagggtaacaaaattcgttttgcaaatcattcggtaaatccaaactgctatgcaaaagttatgatggttaacggtgatcacaggataggtatttttgccaagagagccatccagactggcgaagagctgttttttgattacagatacagccaggctgatgccctgaagtatgtcggcatcgaaagagaaatggaaatccct

SEQ ID NO: 5478 - DNA, 2238 bp, Homo sapiens
  source 1..2238: mol_type = genomic DNA
atgggccagactgggaagaaatctgagaagggaccagtttgttggcggaagcgtgtaaaatcagagtacatgcgactgagacagctcaagaggttcagacgagctgatgaagtaaagagtatgtttagttccaatcgtcagaaaattttggaaagaacggaaatcttaaaccaagaatggaaacagcgaaggatacagcctgtgcacatcctgacttctgtgagctcattgcgcgggactagggagtgttcggtgaccagtgacttggattttccaacacaagtcatcccattaaagactctgaatgcagttgcttcagtacccataatgtattcttggtctcccctacagcagaattttatggtggaagatgaaactgttttacataacattccttatatgggagatgaagttttagatcaggatggtactttcattgaagaactaataaaaaattatgatgggaaagtacacggggatagagaatgtgggtttataaatgatgaaatttttgtggagttggtgaatgcccttggtcaatataatgatgatgacgatgatgatgatggagacgatcctgaagaaagagaagaaaagcagaaagatctggaggatcaccgagatgataaagaaagccgcccacctcggaaatttccttctgataaaatttttgaagccatttcctcaatgtttccagataagggcacagcagaagaactaaaggaaaaatataaagaactcaccgaacagcagctcccaggcgcacttcctcctgaatgtacccccaacatagatggaccaaatgctaaatctgttcagagagagcaaagcttacactcctttcatacgcttttctgtaggcgatgttttaaatatgactgcttcctacatccttttcatgcaacacccaacacttataagcggaagaacacagaaacagctctagacaacaaaccttgtggaccacagtgttaccagcatttggagggagcaaaggagtttgctgctgctctcaccgctgagcggataaagaccccaccaaaacgtccaggaggccgcagaagaggacggcttcccaataacagtagcaggcccagcacccccaccattaatgtgctggaatcaaaggatacagacagtgatagggaagcagggactgaaacggggggagagaacaatgataaagaagaagaagagaagaaagatgaaacttcgagctcctctgaagcaaattctcggtgtcaaacaccaataaagatgaagccaaatattgaacctcctgagaatgtggagtggagtggtgctgaagcctcaatgtttagagtcctcattggcacttactatgacaatttctgtgccattgctaggttaattgggaccaaaacatgtagacaggtgtatgagtttagagtcaaagaatctagcatcatagctccagctcccgctgaggatgtggatactcctccaaggaaaaagaagaggaaacaccggttgtgggctgcacactgcagaaagatacagctgaaaaaggacggctcctctaaccatgtttacaactatcaaccctgtgatcatccacggcagccttgtgacagttcgtgcccttgtgtgatagcacaaaatttttgtgaaaagttttgtcaatgtagttcagagtgtcaaaaccgctttccgggatgccgctgcaaagcacagtgcaacaccaagcagtgcccgtgctacctggctgtccgagagtgtgaccctgacctctgtcttacttgtggagccgctgaccattgggacagtaaaaatgtgtcctgcaagaactgcagtattcagcggggctccaaaaagcatctattgctggcaccatctgacgtggcaggctgggggatttttatcaaagatcctgtgcagaaaaatgaattcatctcagaatactgtggagagattatttctcaagatgaagctgacagaagagggaaagtgtatgataaatacatgtgcagctttctgttcaacttgaacaatgattttgtggtggatgcaacccgcaagggtaacaaaattcgttttgcaaatcattcggtaaatccaaactgctatgcaaaagttatgatggttaacggtgatcacaggataggtatttttgccaagagagccatccagactggcgaagagctgttttttgattacagatacagccaggctgatgccctgaagtatgtcggcatcgaaagagaaatggaaatccct

SEQ ID NO: 5479 - DNA, 2211 bp, Homo sapiens
  source 1..2211: mol_type = genomic DNA
atgggccagactgggaagaaatctgagaagggaccagtttgttggcggaagcgtgtaaaatcagagtacatgcgactgagacagctcaagaggttcagacgagctgatgaagtaaagagtatgtttagttccaatcgtcagaaaattttggaaagaacggaaatcttaaaccaagaatggaaacagcgaaggatacagcctgtgcacatcctgacttcttgttcggtgaccagtgacttggattttccaacacaagtcatcccattaaagactctgaatgcagttgcttcagtacccataatgtattcttggtctcccctacagcagaattttatggtggaagatgaaactgttttacataacattccttatatgggagatgaagttttagatcaggatggtactttcattgaagaactaataaaaaattatgatgggaaagtacacggggatagagaatgtgggtttataaatgatgaaatttttgtggagttggtgaatgcccttggtcaatataatgatgatgacgatgatgatgatggagacgatcctgaagaaagagaagaaaagcagaaagatctggaggatcaccgagatgataaagaaagccgcccacctcggaaatttccttctgataaaatttttgaagccatttcctcaatgtttccagataagggcacagcagaagaactaaaggaaaaatataaagaactcaccgaacagcagctcccaggcgcacttcctcctgaatgtacccccaacatagatggaccaaatgctaaatctgttcagagagagcaaagcttacactcctttcatacgcttttctgtaggcgatgttttaaatatgactgcttcctacatccttttcatgcaacacccaacacttataagcggaagaacacagaaacagctctagacaacaaaccttgtggaccacagtgttaccagcatttggagggagcaaaggagtttgctgctgctctcaccgctgagcggataaagaccccaccaaaacgtccaggaggccgcagaagaggacggcttcccaataacagtagcaggcccagcacccccaccattaatgtgctggaatcaaaggatacagacagtgatagggaagcagggactgaaacggggggagagaacaatgataaagaagaagaagagaagaaagatgaaacttcgagctcctctgaagcaaattctcggtgtcaaacaccaataaagatgaagccaaatattgaacctcctgagaatgtggagtggagtggtgctgaagcctcaatgtttagagtcctcattggcacttactatgacaatttctgtgccattgctaggttaattgggaccaaaacatgtagacaggtgtatgagtttagagtcaaagaatctagcatcatagctccagctcccgctgaggatgtggatactcctccaaggaaaaagaagaggaaacaccggttgtgggctgcacactgcagaaagatacagctgaaaaaggacggctcctctaaccatgtttacaactatcaaccctgtgatcatccacggcagccttgtgacagttcgtgcccttgtgtgatagcacaaaatttttgtgaaaagttttgtcaatgtagttcagagtgtcaaaaccgctttccgggatgccgctgcaaagcacagtgcaacaccaagcagtgcccgtgctacctggctgtccgagagtgtgaccctgacctctgtcttacttgtggagccgctgaccattgggacagtaaaaatgtgtcctgcaagaactgcagtattcagcggggctccaaaaagcatctattgctggcaccatctgacgtggcaggctgggggatttttatcaaagatcctgtgcagaaaaatgaattcatctcagaatactgtggagagattatttctcaagatgaagctgacagaagagggaaagtgtatgataaatacatgtgcagctttctgttcaacttgaacaatgattttgtggtggatgcaacccgcaagggtaacaaaattcgttttgcaaatcattcggtaaatccaaactgctatgcaaaagttatgatggttaacggtgatcacaggataggtatttttgccaagagagccatccagactggcgaagagctgttttttgattacagatacagccaggctgatgccctgaagtatgtcggcatcgaaagagaaatggaaatccct

SEQ ID NO: 5480 - DNA, 1011 bp, Homo sapiens
  source 1..1011: mol_type = genomic DNA
atggaactaaaaactttatgggaaaacaaactaatgcagtccagggcagtagatggatttcattcagaagagcagcagcttctactgcaagttcaacagcagcatcaaccccagcagcagcagcatcaccaccatcaccatcatcagcaagctcagcctcagcagacagtacctcagcaagcgcagacccagcaggttcttattcctgcatcacagcaagccacagcaccacaagttattgttccagattctaagttgatacagcatatgaatgcatcaaacatgagtgctgctgctacagctgctaccttagcactccctgcaggtgtgactcctgttcagcagatattaacaaattcaggccagcttcttcaggtggtcagagcagccaatggtgcccaatatatctttcagcctcagcagtcagtggttctacaacaacaggttataccacaaatgcagcctggtggagtacaagctcctgttatacagcaggtgctggctcctcttcctggagggatttcaccacagacaggtgtcatcatccagcctcagcaaatcttatttacaggaaataagactcaagttatacctacgacagtggcagcacctacaccagcccaagcacagataactgcaactggccagcagcaaccgcaggcccagcctgctcaaacacaagctccattggtcttacaagttgatggaactggggatacatcatctgaagaagatgaagatgaagaagaagactatgatgatgatgaggaggaagacaaagagaaagatggagctgaagatgggcaggtggaagaagagcccctcaatagtgaagatgatgtgagtgatgaggaaggacaggaactctttgacacagaaaatgttgttgtatgccaatatgataagatacacagaagtaaaaacaaatggaaatttcatctcaaggatggcattatgaatcttaatggaagagattatatattttccaaagccattggagatgcagaatgg

SEQ ID NO: 5481 - DNA, 1542 bp, Homo sapiens
  source 1..1542: mol_type = genomic DNA
atggtgtgggaagtgaagacaaatcagatgcctaatgcagtacagaaactcctgttggtgatggacaagagagcctcaggaatgaatgactcattggagttgctgcagtgtaatgagaatttgccatcttcacctggatataactcctgtgatgaacacatggagcttgatgaccttcctgaacttcaggcagttcaaagtgatcctacccaatctggcatgtaccagctgagttcagatgtttcacatcaagaatacccaagatcatcttggaaccaaaatacctcagacataccagaaactacttaccgtgaaaatgaggtggactggctaacagaattggcaaatatcgcgaccagtccacaaagtccactgatgcagtgctcattttacaatagatcatctcctgtacacatcatagccactagcaaaagtttacattcctatgcacgccctccaccagtgtcctcttcttcgaagagtgaaccagccttccctcatcaccattggaaggaggaaacaccagtaagacacgaaagggcaaatagtgagtcagaatctggcattttctgcatgtcctccctgtcagatgatgatgatttgggatggtgcaattcctggccttcaactgtctggcactgttttttgaaaggcacacgactgtgctttcataagggaagcaataaggaatggcaagatgttgaagattttgctagagctgaaggctgtgataatgaggaagatcttcaaatgggcattcacaagggctatggttctgatggtctaaagttgttatcacatgaagaaagtgtatcatttggcgagtctgtactgaagttgacttttgatcctggtacagtagaagatggtttacttaccgtagagtgtaagctggaccaccctttctatgttaaaaataaaggttggtcatcattttatccaagcttgactgtggtacagcatggcattccatgttgtgaagttcatattggcgatgtatgtctacctcctggacaccccgatgccattaattttgatgattcaggtgtttttgatacatttaaaagctatgacttcacacctatggattcttctgcagtttatgtgttaagtagtatggctcgccagcgtcgtgcatctttgtcttgtggaggacctggtggtcaagactttgcaagatctggattcagtaaaaactgtggctcacctggatcatcacagctctcttccaattctttgtatgctaaagctgtcaaaaaccacagctcagggactgtgagtgccacttctcctaataagtgcaaaagaccaatgaatgccttcatgctttttgccaaaaaatacagagttgaatatactcagatgtatccagggaaagataacagagccataagtgtgatccttggtgacaggtggaagaaaatgaagaatgaagagagaagaatgtacacattagaagcaaaggctttggctgaagaacagaaacgtttaaatcctgactgttggaagaggaaaagaaccaattcaggctcacaacaacat

SEQ ID NO: 5482 - DNA, 735 bp, Homo sapiens
  source 1..735: mol_type = genomic DNA
atggataaaaatgagctggttcagaaggccaaactggccgagcaggctgagcgatatgatgacatggcagcctgcatgaagtctgtaactgagcaaggagctgaattatccaatgaggagaggaatcttctctcagttgcttataaaaatgttgtaggagcccgtaggtcatcttggagggtcgtctcaagtattgaacaaaagacggaaggtgctgagaaaaaacagcagatggctcgagaatacagagagaaaattgagacggagctaagagatatctgcaatgatgtactgtctcttttggaaaagttcttgatccccaatgcttcacaagcagagagcaaagtcttctatttgaaaatgaaaggagattactaccgttacttggctgaggttgccgctggtgatgacaagaaagggattgtcgatcagtcacaacaagcataccaagaagcttttgaaatcagcaaaaaggaaatgcaaccaacacatcctatcagactgggtctggcccttaacttctctgtgttctattatgagattctgaactccccagagaaagcctgctctcttgcaaagacagcttttgatgaagccattgctgaacttgatacattaagtgaagagtcatacaaagacagcacgctaataatgcaattactgagagacaacttgacattgtggacatcggatacccaaggagacgaagctgaagcaggagaaggaggggaaaat

SEQ ID NO: 5483 - DNA, 978 bp, Homo sapiens
  source 1..978: mol_type = genomic DNA
atggagtttctgagcgagaagtttgccctcaagagccctccgagtaaaaacagtgacttttacatgggcgcaggaggtcctctggagcacgttatggagacgctggacaatgagtccttttacagcaaagcgtctgcaggcaaatgcgtgcaggccttcggacccctgccccgcgccgagcatcacgtgcgcttggagaggacctcgccctgtcaggacagcagcgtgaactatgggatcactaaagtagaaggacagccccttcacaccgaactgaatagagctatggacaactgtaacagtctccgaatgtctcccgtgaaagggatgcaagagaagggagagctggatgaacttggggataaatgtgatagcaatgtatccagcagtaagaaacggaggcaccgaaccaccttcaccagtttgcagctagaggagctggagaaagtctttcagaaaactcattacccggatgtgtatgtcagagaacagcttgctctgaggacagagctcactgaggccagggtccaggtttggtttcaaaatcgaagggccaaatggagaaaaagggaacgttatggccaaatacaacaagcgaaaagccattttgctgccacctatgatatatcagttttgccaaggactgacagctacccacagattcagaacaatttgtgggcaggaaatgcaagtggtggttctgtggttacttcatgcatgttaccacgtgacacttcctcctgtatgacaccttattctcactcgcctcggacagattccagttacacggggttttcaaaccaccagaaccagttcagccacgtgcccctcaacaattttttcactgactctcttcttactggggcaaccaatggacatgcatttgaaacaaagccagagtttgaaaggaggtcttccagtatcgcagttcttcgaatgaaagccaaggagcacaccgccaatatttcatgggccatg

SEQ ID NO: 5484 - DNA, 2784 bp, Homo sapiens
  source 1..2784: mol_type = genomic DNA
atgccgcccaaaaccccccgaaaaacggccgccaccgccgccgctgccgccgcggaacccccggcaccgccgccgccgccccctcctgaggaggacccagagcaggacagcggcccggaggacctgcctctcgtcaggcttgagtttgaagaaacagaagaacctgattttactgcattatgtcagaaattaaagataccagatcatgtcagagagagagcttggttaacttgggagaaagtttcatctgtggatggagtattgggaggttatattcaaaagaaaaaggaactgtggggaatctgtatctttattgcagcagttgacctagatgagatgtcgttcacttttactgagctacagaaaaacatagaaatcagtgtccataaattctttaacttactaaaagaaattgataccagtaccaaagttgataatgctatgtcaagactgttgaagaagtatgatgtattgtttgcactcttcagcaaattggaaaggacatgtgaacttatatatttgacacaacccagcagttcgatatctactgaaataaattctgcattggtgctaaaagtttcttggatcacatttttattagctaaaggggaagtattacaaatggaagatgatctggtgatttcatttcagttaatgctatgtgtccttgactattttattaaactctcacctcccatgttgctcaaagaaccatataaaacagctgttatacccattaatggttcacctcgaacacccaggcgaggtcagaacaggagtgcacggatagcaaaacaactagaaaatgatacaagaattattgaagttctctgtaaagaacatgaatgtaatatagatgaggtgaaaaatgtttatttcaaaaattttataccttttatgaattctcttggacttgtaacatctaatggacttccagaggttgaaaatctttctaaacgatacgaagaaatttatcttaaaaataaagatctagatgcaagattatttttggatcatgataaaactcttcagactgattctatagacagttttgaaacacagagaacaccacgaaaaagtaaccttgatgaagaggtgaatgtaattcctccacacactccagttaggactgttatgaacactatccaacaattaatgatgattttaaattcagcaagtgatcaaccttcagaaaatctgatttcctattttaacaactgcacagtgaatccaaaagaaagtatactgaaaagagtgaaggatataggatacatctttaaagagaaatttgctaaagctgtgggacagggttgtgtcgaaattggatcacagcgatacaaacttggagttcgcttgtattaccgagtaatggaatccatgcttaaatcagaagaagaacgattatccattcaaaattttagcaaacttctgaatgacaacatttttcatatgtctttattggcgtgcgctcttgaggttgtaatggccacatatagcagaagtacatctcagaatcttgattctggaacagatttgtctttcccatggattctgaatgtgcttaatttaaaagcctttgatttttacaaagtgatcgaaagttttatcaaagcagaaggcaacttgacaagagaaatgataaaacatttagaacgatgtgaacatcgaatcatggaatcccttgcatggctctcagattcacctttatttgatcttattaaacaatcaaaggaccgagaaggaccaactgatcaccttgaatctgcttgtcctcttaatcttcctctccagaataatcacactgcagcagatatgtatctttctcctgtaagatctccaaagaaaaaaggttcaactacgcgtgtaaattctactgcaaatgcagagacacaagcaacctcagccttccagacccagaagccattgaaatctacctctctttcactgttttataaaaaagtgtatcggctagcctatctccggctaaatacactttgtgaacgccttctgtctgagcacccagaattagaacatatcatctggacccttttccagcacaccctgcagaatgagtatgaactcatgagagacaggcatttggaccaaattatgatgtgttccatgtatggcatatgcaaagtgaagaatatagaccttaaattcaaaatcattgtaacagcatacaaggatcttcctcatgctgttcaggagacattcaaacgtgttttgatcaaagaagaggagtatgattctattatagtattctataactcggtcttcatgcagagactgaaaacaaatattttgcagtatgcttccaccaggccccctaccttgtcaccaatacctcacattcctcgaagcccttacaagtttcctagttcacccttacggattcctggagggaacatctatatttcacccctgaagagtccatataaaatttcagaaggtctgccaacaccaacaaaaatgactccaagatcaagaatcttagtatcaattggtgaatcattcgggacttctgagaagttccagaaaataaatcagatggtatgtaacagcgaccgtgtgctcaaaagaagtgctgaaggaagcaaccctcctaaaccactgaaaaaactacgctttgatattgaaggatcagatgaagcagatggaagtaaacatctcccaggagagtccaaatttcagcagaaactggcagaaatgacttctactcgaacacgaatgcaaaagcagaaaatgaatgatagcatggatacctcaaacaaggaagagaaa

SEQ ID NO: 5485 - DNA, 1233 bp, Homo sapiens
  source 1..1233: mol_type = genomic DNA
atgaatgctgagacttgcgtctcttactgcgagtcgccggccgctgccatggacgcctactacagcccggtgtcgcagagtcgggagggctcgtcgccttttagggcatttcccggaggcgacaagttcggcacaactttcctgtcggccgccgccaaagcacagggattcggggacgccaagagccgggcccgttacggcgctgggcagcaggacctggcgacacccctggagagtggagctggggcgcggggctcctttaacaagttccagccccagccgtcgaccccgcagccccagccgccgccgcagccgcagccgcagcagcagcagccgcagccccagccgcccgcgcaaccgcatctttacttgcagcgaggcgcctgcaagacgcccccggacggcagcctcaaactccaggaaggcagcagcggccacagcgcggccttgcaggttccctgctacgctaaagagagctccctgggtgagccagagttaccccctgactctgacactgtggggatggacagcagctacctgagtgtcaaggaggctggggtgaaggggccccaggaccgggccagctcagacctccccagcccattggagaaggccgactcagagagcaacaagggcaagaagcggcggaaccggaccaccttcaccagctaccagctggaggagctggagaaggtcttccagaagacccactacccagacgtgtatgcgcgggaacagctggccatgaggacagacctcactgaggcccgcgtgcaggtctggttccagaaccgaagggccaagtggaggaagcgggagcgttttgggcagatgcagcaggttcgaacccacttctccactgcatatgagctgcccctcctcacccgagctgagaactacgcccagattcagaacccgtcctggctcggcaacaacggggctgcctcaccagtgccagcctgcgtggtcccctgcgacccggtgcctgcctgcatgtcccctcatgcccacccccctggctctggggccagcagcgtcaccgacttcctgagtgtgtctggggctggcagtcacgtgggccagacgcacatgggcagcctgtttggagcagccagcctcagcccaggcctcaatggctacgagctcaacggcgagccggaccgcaagacctcgagcatcgcggccctccgcatgaaggccaaggagcacagtgcggccatttcctgggccaca

SEQ ID NO: 5486 - DNA, 1323 bp, Homo sapiens
  source 1..1323: mol_type = genomic DNA
atgaaggcggccgtcgatctcaagccgactctcaccatcatcaagacggaaaaagtcgatctggagcttttcccctccccggatatggaatgtgcagatgtcccactattaactccaagcagcaaagaaatgatgtctcaagcattaaaagctactttcagtggtttcactaaagaacagcaacgactggggatcccaaaagacccccggcagtggacagaaacccatgttcgggactgggtgatgtgggctgtgaatgaattcagcctgaaaggtgtagacttccagaagttctgtatgaatggagcagccctctgcgccctgggtaaagactgctttctcgagctggccccagactttgttggggacatcttatgggaacatctagagatcctgcagaaagaggatgtgaaaccatatcaagttaatggagtcaacccagcctatccagaatcccgctatacctcggattacttcattagctatggtattgagcatgcccagtgtgttccaccatcggagttctcagagcccagcttcatcacagagtcctatcagacgctccatcccatcagctcggaagagctcctctccctcaagtatgagaatgactacccctcggtcattctccgagaccctctccagacagacaccttgcagaatgactactttgctatcaaacaagaagtcgtcaccccagacaacatgtgcatggggaggaccagtcgtggtaaactcgggggccaggactcttttgaaagcatagagagctacgatagttgtgatcgcctcacccagtcctggagcagccagtcatctttcaacagcctgcagcgtgttccctcctatgacagcttcgactcagaggactatccggctgccctgcccaaccacaagcccaagggcaccttcaaggactatgtgcgggaccgtgctgacctcaataaggacaagcctgtcattcctgctgctgccctagctggctacacaggcagtggaccaatccagctatggcagtttcttctggaattactcactgataaatcctgtcagtcttttatcagctggacaggagatggctgggaattcaaactttctgacccagatgaggtggccaggagatggggaaagaggaaaaacaaacctaagatgaattatgagaaactgagccgtggcctacgctactattacgacaaaaacatcatccacaagacagcggggaaacgctacgtgtaccgctttgtgtgtgacctgcagagcctgctggggtacacccctgaggagctgcacgccatgctggacgtcaagccagatgccgacgag

SEQ ID NO: 5487 - DNA, 1455 bp, Homo sapiens
  source 1..1455: mol_type = genomic DNA
atgagctactttgtggattctgctgggagcagccccgtcccttactcagcgcctcgtcctgcagtggtgaggcaaggacctagcaacacttatgaagatcctcgaatgaactgtggtttccagtccaattatcaccagcaaagaccttgctaccccttttgggatgagatggcaactcaggaagttcctactggtcttgaacactgtgtctcagatatggaatgtgcagatgtcccactattaactccaagcagcaaagaaatgatgtctcaagcattaaaagctactttcagtggtttcactaaagaacagcaacgactggggatcccaaaagacccccggcagtggacagaaacccatgttcgggactgggtgatgtgggctgtgaatgaattcagcctgaaaggtgtagacttccagaagttctgtatgaatggagcagccctctgcgccctgggtaaagactgctttctcgagctggccccagactttgttggggacatcttatgggaacatctagagatcctgcagaaagaggatgtgaaaccatatcaagttaatggagtcaacccagcctatccagaatcccgctatacctcggattacttcattagctatggtattgagcatgcccagtgtgttccaccatcggagttctcagagcccagcttcatcacagagtcctatcagacgctccatcccatcagctcggaagagctcctctccctcaagtatgagaatgactacccctcggtcattctccgagaccctctccagacagacaccttgcagaatgactactttgctatcaaacaagaagtcgtcaccccagacaacatgtgcatggggaggaccagtcgtggtaaactcgggggccaggactcttttgaaagcatagagagctacgatagttgtgatcgcctcacccagtcctggagcagccagtcatctttcaacagcctgcagcgtgttccctcctatgacagcttcgactcagaggactatccggctgccctgcccaaccacaagcccaagggcaccttcaaggactatgtgcgggaccgtgctgacctcaataaggacaagcctgtcattcctgctgctgccctagctggctacacaggcagtggaccaatccagctatggcagtttcttctggaattactcactgataaatcctgtcagtcttttatcagctggacaggagatggctgggaattcaaactttctgacccagatgaggtggccaggagatggggaaagaggaaaaacaaacctaagatgaattatgagaaactgagccgtggcctacgctactattacgacaaaaacatcatccacaagacagcggggaaacgctacgtgtaccgctttgtgtgtgacctgcagagcctgctggggtacacccctgaggagctgcacgccatgctggacgtcaagccagatgccgacgag

SEQ ID NO: 5488 - DNA, 1062 bp, Homo sapiens
  source 1..1062: mol_type = genomic DNA
atgaaggcggccgtcgatctcaagccgactctcaccatcatcaagacggaaaaagtcgatctggagcttttcccctccccggatatggaatgtgcagatgtcccactattaactccaagcagcaaagaaatgatgtctcaagcattaaaagctactttcagtggtttcactaaagaacagcaacgactggggatcccaaaagacccccggcagtggacagaaacccatgttcgggactgggtgatgtgggctgtgaatgaattcagcctgaaaggtgtagacttccagaagttctgtatgaatggagcagccctctgcgccctgggtaaagactgctttctcgagctggccccagactttgttggggacatcttatgggaacatctagagatcctgcagaaagaggatgtgaaaccatatcaagttaatggagtcaacccagcctatccagaatcccgctatacctcggattacttcattagctatggtattgagcatgcccagtgtgttccaccatcggagttctcagagcccagcttcatcacagagtcctatcagacgctccatcccatcagctcggaagagctcctctccctcaagtatgagaatgactacccctcggtcattctccgagaccctctccagacagacaccttgcagaatgactactttgctatcaaacaagaagtcgtcaccccagacaacatgtgcatggggaggaccagtcgtggcagtggaccaatccagctatggcagtttcttctggaattactcactgataaatcctgtcagtcttttatcagctggacaggagatggctgggaattcaaactttctgacccagatgaggtggccaggagatggggaaagaggaaaaacaaacctaagatgaattatgagaaactgagccgtggcctacgctactattacgacaaaaacatcatccacaagacagcggggaaacgctacgtgtaccgctttgtgtgtgacctgcagagcctgctggggtacacccctgaggagctgcacgccatgctggacgtcaagccagatgccgacgag

SEQ ID NO: 5489 - DNA, 675 bp, Homo sapiens
  source 1..675: mol_type = genomic DNA
atgaaggcggccgtcgatctcaagccgactctcaccatcatcaagacggaaaaagtcgatctggagcttttcccctccccgggtaaactcgggggccaggactcttttgaaagcatagagagctacgatagttgtgatcgcctcacccagtcctggagcagccagtcatctttcaacagcctgcagcgtgttccctcctatgacagcttcgactcagaggactatccggctgccctgcccaaccacaagcccaagggcaccttcaaggactatgtgcgggaccgtgctgacctcaataaggacaagcctgtcattcctgctgctgccctagctggctacacaggcagtggaccaatccagctatggcagtttcttctggaattactcactgataaatcctgtcagtcttttatcagctggacaggagatggctgggaattcaaactttctgacccagatgaggtggccaggagatggggaaagaggaaaaacaaacctaagatgaattatgagaaactgagccgtggcctacgctactattacgacaaaaacatcatccacaagacagcggggaaacgctacgtgtaccgctttgtgtgtgacctgcagagcctgctggggtacacccctgaggagctgcacgccatgctggacgtcaagccagatgccgacgag

SEQ ID NO: 5490 - DNA, 765 bp, Homo sapiens
  source 1..765: mol_type = genomic DNA
atggatgatcgagaggatctggtgtaccaggcgaagctggccgagcaggctgagcgatacgacgaaatggtggagtcaatgaagaaagtagcagggatggatgtggagctgacagttgaagaaagaaacctcctatctgttgcatataagaatgtgattggagctagaagagcctcctggagaataatcagcagcattgaacagaaagaagaaaacaagggaggagaagacaagctaaaaatgattcgggaatatcggcaaatggttgagactgagctaaagttaatctgttgtgacattctggatgtactggacaaacacctcattccagcagctaacactggcgagtccaaggttttctattataaaatgaaaggggactaccacaggtatctggcagaatttgccacaggaaacgacaggaaggaggctgcggagaacagcctagtggcttataaagctgctagtgatattgcaatgacagaacttccaccaacgcatcctattcgcttaggtcttgctctcaatttttccgtattctactacgaaattcttaattcccctgaccgtgcctgcaggttggcaaaagcagcttttgatgatgcaattgcagaactggatacgctgagtgaagaaagctataaggactctacacttatcatgcagttgttacgtgataatctgacactatggacttcagacatgcagggtgacggtgaagagcagaataaagaagcgctgcaggacgtggaagacgaaaatcag

SEQ ID NO: 5491 - DNA, 1722 bp, Homo sapiens
  source 1..1722: mol_type = genomic DNA
atgcttagggagttctcgaagtggggcgtagaggcatcgcctggcaaggcctgggagcgaaaaagatctctacttcgtggagccgttggacgctaccggggagccactggtggggaccttttttgggccccctttccttcgtggggtactatggagttcccagaacacagtcagcagctgctgcagagcctccgggagcagcggtcccagggtttcctttgtgactgcaccgtgatggtgggtagtacccagttcttggcccatcgggctgtgctggcctcctgcagcccattcttccagcttttctacaaggagcgggaattggacaagagggatctggtgtgtattcacaatgaaattgtcacagccccagcctttgggctgcttctggactttatgtatgctggccagctgaccctgagaggggatacccctgtggaggatgtgctggcagctgccagctacttgcacatgaatgacatcgtcaaggtgtgtaagcggcggcttcaagcccgggccctggcagaggcagacagtaccaagaaggaggaggaaaccaactcacagcttcctagtttggagtttttgtctagtacttcccgtggcacccaaccttcgttggcatctgctgagacatcaggccactggggcaaaggggaatggaaaggctctgctgctccctcacctactgtccgtcctccagatgagccaccaatgtctagtggggctgacactacacagcctggcatggaggttgacgcaccacatctgcgggcacctcatccaccagtggctgatgtctctcttgccagccctagtagctccactgagaccattcctacaaactacttctcttctggcatctcagcagtttcattggagccactgccatctcttgatgtgggtcctgagagtctgagggtggtggaaccaaaggatcctggaggaccactgcaaggcttctatcccccagcctcagccccaacgtcagccccagcccctgtctcagctccagttccatcccaggctccagccccagctgaagctgagctggtccaggtgaaagttgaagctattgtgatctctgatgaagagactgatgtgtcagatgaacagcctcagggtcctgagagagctttcccatctggaggagcagtgtatggggcacagccctcccagccagaggcttttgaagacccaggggcagcaggactggaggaggtggggccaagtgaccacttcctgccaacagaccctcatctaccctaccatctgctgccaggtgcagggcagtatcatcgaggactggtgacctcacctctgcctgcacccgcatccctgcatgagccactttacctgtcttctgagtacgaagcagctccaggaagctttggggtttttactgaggatgttcccacctgcaagacatgtgggaagaccttctcatgctcttacacactacggcgacatgccacggtgcacacacgtgagcgaccctatgagtgccgctactgcctgcggagctacacgcagtcaggggacctctaccgccacatccgcaaggctcacaatgaggacctggccaaacgcagcaaaccagatccagaagtgggaccccttctaggggtgcagcctctccctggctccccaacagcagacagacagagcagcagtggtggagggccacctaaagattttgtattggccccaaaaactaacatc

SEQ ID NO: 5492 - DNA, 1152 bp, Homo sapiens
  source 1..1152: mol_type = genomic DNA
atgcagagatcgccgcccggctacggcgcacaggacgacccgcccgcccgccgcgactgtgcatgggccccgggacacggggccgccgctgacacgcgcggcctcgccgccggccccgccgccctcgccgcgcccgccgcgcccgcctcgccgcccagcccgcagcgcagtcccccgcgcagccccgagccggggcgctatggcctcagcccggccggccgcggggaacgccaggcggcagacgagtcgcgcatccggcggcccatgaacgccttcatggtgtgggcaaaggacgagcgcaagcggctggctcagcagaacccggacctgcacaacgcggtgctcagcaagatgctgggcaaagcgtggaaggagctgaacgcggcggagaagcggcccttcgtggaggaagccgaacggctgcgcgtgcagcacttgcgcgaccaccccaactacaagtaccggccgcgccgcaagaagcaggcgcgcaaggcccggcggctggagcccggcctcctgctcccgggattagcgcccccgcagccaccgcccgagcctttccccgcggcgtctggctcggctcgcgccttccgcgagctgcccccgctgggcgccgagttcgacggcctggggctgcccacgcccgagcgctcgcctctggacggcctggagcccggcgaggctgccttcttcccaccgcccgcggcgcccgaggactgcgcgctgcggcccttccgcgcgccctacgcgcccaccgagttgtcgcgggaccccggcggttgctacggggctcccctggcggaggcgctcaggaccgcgccccccgcggcgccgctcgctggcctgtactacggcaccctgggcacgcccggcccgtaccccggcccgctgtcgccgccgcccgaggccccgccgctggagagcgccgagccgctggggcccgccgccgatctgtgggccgacgtggacctcaccgagttcgaccagtacctcaactgcagccggactcggcccgacgcccccgggctcccgtaccacgtggcactggccaaactgggcccgcgcgccatgtcctgcccagaggagagcagcctgatctccgcgctgtcggacgccagcagcgcggtctattacagcgcgtgcatctccggc

SEQ ID NO: 5493 - DNA, 1932 bp, Homo sapiens
  source 1..1932: mol_type = genomic DNA
atggcaaagcccagccacagcagctatgtccttcagcagctaaacaaccaaagagaatggggttttctctgtgactgctgtattgcaattgatgacatttactttcaagcacacaaggcagttctagctgcctgtagctcctattttagaatgtttttcatgaaccatcagcatagtactgcacaactgaatctcagcaacatgaaaattagtgcagaatgttttgatctcattttgcagtttatgtatttaggaaaaattatgacagctccctccagttttgagcagtttaaagtggcaatgaactacctacagctatacaatgttcctgactgtttagaagacatccaggatgcagattgttctagttcaaaatgttcctcttctgcttccagcaaacagaacagcaaaatgatatttggggtaagaatgtatgaagatactgtggctcgaaatggcaatgaagccaacaggtggtgtgcagagccaagttcaacggtaaatacaccacataatagagaggctgatgaagagtctttacaattaggtaattttcctgagccactatttgatgtatgtaaaaaaagttccgtgtccaaattatctactccaaaagaacgtgtgtcaagacgctttgggcggagttttacctgtgatagctgtggatttggctttagctgtgaaaaattattagatgagcatgtgctaacctgtactaacagacatttataccaaaacacaagatcttaccatagaatagtagatattagagatggaaaagacagtaacatcaaagctgaatttggtgaaaaagattcttccaaaacattttctgcacagacggacaaatacagaggagacacaagccaggctgctgatgattcagcttcaaccactggaagcagaaaaagtagcacagtggagtctgaaatagcaagcgaagagaaaagcagagctgctgagaggaaaaggattattattaagatggagccagaagatattcctacagatgaactgaaagactttaacattattaaagttactgataaagactgtaatgaatccactgacaatgatgaattagaagatgaacctgaagagccattttatagatactatgttgaagaagatgtcagcataaaaaaaagtggtaggaaaactctaaaacctcgaatgtcagtaagtgctgatgaaagaggtggtttagagaatatgaggccccctaacaacagcagtccagtacaagaggatgctgaaaatgcatcttgtgagctgtgtggacttacaataaccgaggaggacctgtcatctcattacttagccaaacacattgaaaatatctgtgcatgtggtaaatgtggacaaatacttgtaaagggtaggcagcttcaggaacatgctcaacgatgtggcgagccccaagatctgaccatgaatgggttaggaaatactgaggagaaaatggacttggaagagaatcctgatgagcagtccgaaataagagatatgtttgttgaaatgctggatgattttagggacaatcattaccagataaacagtatccaaaaaaagcagttatttaaacattctgcctgcccttttcgatgtcctaattgtggccagcgttttgaaactgaaaatctagtggttgaacatatgtctagctgcttagatcaagatatgtttaagagtgccatcatggaagaaaatgaaagagatcacagacgaaagcatttttgtaatctgtgtggaaaaggattttatcagcggtgtcacttaagagaacactatactgttcatactaaggaaaaacagtttgtttgtcaaacatgtggaaagcagtttttaagagagcgtcagttgcgactgcacaatgatatgcacaaaggcatggccagtggtgaaatagggccttctaaacctgtggagaag

SEQ ID NO: 5494 - DNA, 2031 bp, Homo sapiens
  source 1..2031: mol_type = genomic DNA
atggattttcctggtcactttgaacaaatcttccagcagctgaactaccagagacttcatggccagctctgtgattgtgtcattgtagtggggaatagacactttaaagcccaccgctccgtgctggcagcatgcagcacgcatttccgagccctgttctcagtggcagaaggagatcagaccatgaacatgatccagctggatagcgaggtggtgacagcagaggcctttgctgcactgattgacatgatgtatacctccaccctcatgctgggggagagcaatgtaatggatgtcttattggcagcctctcacctgcatttgaactctgttgttaaggcatgtaaacattacttaacgacaaggacgctgcccatgtctccccccagtgagcgcgttcaggagcagagcgcccgcatgcagcgctcctttatgctacagcagctgggactaagcatcgtgagctcagccctcaattccagccagaatggcgaggagcagccagcccccatgagctcttccatgcgcagtaacctggatcagcgcacgcccttccccatgagacgccttcataagcgcaagcagtctgcagaggagcgggccaggcagcgcctccgaccctccatagatgagtctgccatttcagatgttacaccggagaatgggccttcaggggttcattctcgggaggagttcttttcaccagattctctgaaaattgtggataatcctaaagctgatggaatgactgataaccaggaagatagtgcgatcatgtttgatcagtcttttggcactcaagaagatgcccaggtgcccagccagtctgataacagtgctggcaacatggcacagttgtccatggcctctcgtgcaactcaggttgagactagttttgatcaggaagctgcacctgagaaaagtagttttcagtgtgaaaaccctgaggttggccttggtgagaaggagcacatgagagtggtggttaaatctgagcccctgagctcacctgagcctcaggatgaagtgagcgatgtgacctcacaagcagaaggcagcgagtctgtggaagtggaaggagttgtggtcagtgccgagaagatagacctcagccctgaaagcagtgatcggagtttttcagatccccagtctagcacagacagggtaggtgatatccatattttggaagtcacaaataacctagagcataagtccacttttagtatttcgaattttcttaacaagagcagaggaaataactttactgcaaatcagaacaatgatgataatattccaaacaccactagtgactgcaggctggagagtgaggccccctatttgttgagtccagaggctgggcctgcaggtgggccctcctctgcccctggctcccatgtagagaacccatttagtgaacctgcagactcccacttcgtcaggcctatgcaggaggtgatgggcctgccgtgtgtgcagacttcaggctaccaaggaggagaacagtttgggatggacttttccaggtctggtttgggcctccactcctccttctccagggtaatgataggttccccaaggggaggagccagtaactttccttactaccgccgcatagctcccaaaatgccagttgtaacttccgtcaggagctcacagatcccagaaaactctaccagttctcagctaatgatgaatggagctacgtcctcatttgaaaatggccatccttcccagcctggccctccacagttgaccagggcatctgcagatgttctgtcaaagtgcaagaaggccttatcagagcacaatgttttggttgtagagggagctcgcaagtatgcctgcaaaatctgctgcaaaacttttctgactttgacagattgcaagaagcacatccgtgttcacacaggtgaaaagccttacgcctgcctgaagtgtggcaagaggtttagtcagtccagccacctgtataagcactcaaagactacctgcctgcgctggcagagcagcaatcttcccagcactttgctc

SEQ ID NO: 5495 - DNA, 3039 bp, Homo sapiens
  source 1..3039: mol_type = genomic DNA
atgcccccccctgcagaggtgacggacccgtcccatgcccccgccgtcctgcgccagctcaatgaacagcggctccgtggcctcttctgtgacgtcaccctcatagccggagacaccaagttccctgctcaccgcagcgtcctggctgcttcaagtcccttcttcagagaggccctgctcacttcagccccactaccccttccaccagctactgggggcgccgcacccaaccctgccaccaccacagctgcctcttcctcctcctcctcttcctcgtcttcttcctcttcttcctcctctgcttcttcttcttcttcctcttcctcttcctctccccctccagcctctccccctgcttcttccccaccccgggtcctggagttgccaggagtcccagcagctgcgttttctgatgtcctcaacttcatctacagcgcccggctcgcactgcctggtggtggaggggacggggcagctgtagcagagattggagctttggggcgccgtctgggcatctcccgccttcagggcctgggggagggaggtgatgcctgggtacctcctaccccagcccccatggccacctcgcagcctgaagaggacagctttgggcccgggcccaggccagctggggagtgggagggtgacagggctgaggcccaggcccctgacttgcagtgctccctgccccggcggcccctcccctgcccccagtgtggaaaaagcttcatccatcccaaacggctgcagacccatgaggcccagtgccgacgaggggccagcacgcgggggtctacagggctgggagctgggggcgctggccctggtggtcctgcaggggtggacgcctcagccctgcctccaccagtgggcttccgagggggccccgagcacgtggtgaaggtggtgggcggccacgtgctgtatgtgtgcgcggcctgcgagcgttcctacgtgaccctgtccagtctgaagagacacagcaatgtacactcgtggcggaggaagtacccctgccgctattgtgagaaagtgtttgctctggcggagtaccgcacgaagcatgaagtgtggcacacgggggagcgcaggtaccagtgcatcttctgttgggagacctttgtcacttactataacctgaagacccaccagcgagccttccacggcattagcccgggcctccttgccagtgagaagacacccaatggaggctacaagcccaagctcaatacactcaagctctaccgcctgctccccatgcgggcagccaagcggccctacaagacctacagccagggagccccggaggctcccctttctccaaccctcaacacaccggcccctgtggcaatgccagccagcccgccgcctgggcctccacctgccccagagcctggccctccaccctctgtcatcacttttgcccacccagccccctctgtcattgtccatgggggcagtagcagtggtggaggggggagtgggacggccagcacaggagggtcccaagctgcctcggttatcacttacactgctcccccgaggccacccaagaaacgagaatacccacctcctccccctgagcctgcagccacacccaccagcccagccacagcagtcagcccagccaccgctgcagggccagccatggccaccaccacggaggaggccaagggccggaatccacgggctggaaggactctgacttacacagccaagccagtgggcgggattggtggaggtgggggtccccccacaggggctggccggggcccctctcagctgcaggctccacctccactgtgtcagatcactgtgcgaataggggaggaggccatcgtcaagcgccgcatctcagagactgacctgcgtcctggggagctgagcggagaggagatggaggagagtgaggaggacgaagaggaggaggacgaagaggaggaggaggaggatgaggaggaatcaaaggctggtggggaggaccagctctggaggccctactactcctacaagcctaagcgcaaggctggagctgctggaggtgccagtgtggggggcagtgggctgccccgaggccgccggccaccacgttggaggcagaagctggaacggaggagctgggaggaaaccccagcggccgagagcccagcgggacgtgcccgcacagagcggaggcaccgatgcggggactgtgcccagaccttcaccaccctgagaaagctgcggaagcaccaagaggcccacggtgggggctcccacagctcccgggccggacggaggccctccacccgctttacctgcccccactgcgccaaggtgtgcaagaccgcagctgccctgagccgccacgggcagaggcatgctgctgagcggcccgggggcaccccaacccctgtcattgcctattccaagggcagcgctggcaccaggcccggggatgtcaaggaggaagccccccaagagatgcaagtctcctcatccagcggtgaggcaggtggcgggagcactgctgctgaggaagcttccgagaccgcctcactccaggaccctatcatttcagggggtgaggagcccccagtagtggcaagcgggggcagctatgtatacccacctgtgcaggaatttccactggccttgattgggggcggccgggaacctggcggtggcaggggaaaatctgggagtgaagggccagtgggggctggtgagggggaccggatggaggggataggggctgccaaagtcactttctaccctgagccctacccgctcgtctatggcccccagctccttgccgcctacccttacaacttcagtaacttggccgctctcccggttgctctcaacatggtcctacctgatgagaagggtgcgggggcccttcccttcctaccaggggtctttggctacgcagtgaatcctcaagcagcaccccctgccccaccaacaccacctcccccaactcttcctccaccaattccccctaagggagaaggggaaagggcaggggttgagagaacccagaagggcgatgtgggg

SEQ ID NO: 5496 - DNA, 1794 bp, Homo sapiens
  source 1..1794: mol_type = genomic DNA
atgccttgtgttcaggcgcagtatgggtcctcgcctcaaggagccagccccgcttctcagagctacagttaccactcttcgggagaatacagctccgatttcttaactccagagtttgtcaagtttagcatggacctcaccaacactgaaatcactgccaccacttctctccccagcttcagtacctttatggacaactacagcacaggctacgacgtcaagccaccttgcttgtaccaaatgcccctgtccggacagcagtcctccattaaggtagaagacattcagatgcacaactaccagcaacacagccacctgcccccccagtctgaggagatgatgccgcactccgggtcggtttactacaagccctcctcgcccccgacgcccaccaccccgggcttccaggtgcagcacagccccatgtgggacgacccgggatctctccacaacttccaccagaactacgtggccactacgcacatgatcgagcagaggaaaacgccagtctcccgcctctccctcttctcctttaagcaatcgccccctggcaccccggtgtctagttgccagatgcgcttcgacgggcccctgcacgtccccatgaacccggagcccgccggcagccaccacgtggtggacgggcagaccttcgctgtgcccaaccccattcgcaagcccgcgtccatgggcttcccgggcctgcagatcggccacgcgtctcagctgctcgacacgcaggtgccctcaccgccgtcgcggggctccccctccaacgaggggctgtgcgctgtgtgtggggacaacgcggcctgccaacactacggcgtgcgcacctgtgagggctgcaaaggcttctttaagcgcacagtgcaaaaaaatgcaaaatacgtgtgtttagcaaataaaaactgcccagtggacaagcgtcgccggaatcgctgtcagtactgccgatttcagaagtgcctggctgttgggatggtcaaagaagtggttcgcacagacagtttaaaaggccggagaggtcgtttgccctcgaaaccgaagagcccacaggagccctctcccccttcgcccccggtgagtctgatcagtgccctcgtcagggcccatgtcgactccaacccggctatgaccagcctggactattccaggttccaggcgaaccctgactatcaaatgagtggagatgacacccagcatatccagcaattctatgatctcctgactggctccatggagatcatccggggctgggcagagaagatccctggcttcgcagacctgcccaaagccgaccaagacctgctttttgaatcagctttcttagaactgtttgtccttcgattagcatacaggtccaacccagtggagggtaaactcatcttttgcaatggggtggtcttgcacaggttgcaatgcgttcgtggctttggggaatggattgattccattgttgaattctcctccaacttgcagaatatgaacatcgacatttctgccttctcctgcattgctgccctggctatggtcacagagagacacgggctcaaggaacccaagagagtggaagaactgcaaaacaagattgtaaattgtctcaaagaccacgtgactttcaacaatggggggttgaaccgccccaattatttgtccaaactgttggggaagctcccagaacttcgtaccctttgcacacaggggctacagcgcattttctacctgaaattggaagacttggtgccaccgccagcaataattgacaaacttttcctggacactttacctttc

SEQ ID NO: 5497 - DNA, 1605 bp, Homo sapiens
  source 1..1605: mol_type = genomic DNA
atggacaactacagcacaggctacgacgtcaagccaccttgcttgtaccaaatgcccctgtccggacagcagtcctccattaaggtagaagacattcagatgcacaactaccagcaacacagccacctgcccccccagtctgaggagatgatgccgcactccgggtcggtttactacaagccctcctcgcccccgacgcccaccaccccgggcttccaggtgcagcacagccccatgtgggacgacccgggatctctccacaacttccaccagaactacgtggccactacgcacatgatcgagcagaggaaaacgccagtctcccgcctctccctcttctcctttaagcaatcgccccctggcaccccggtgtctagttgccagatgcgcttcgacgggcccctgcacgtccccatgaacccggagcccgccggcagccaccacgtggtggacgggcagaccttcgctgtgcccaaccccattcgcaagcccgcgtccatgggcttcccgggcctgcagatcggccacgcgtctcagctgctcgacacgcaggtgccctcaccgccgtcgcggggctccccctccaacgaggggctgtgcgctgtgtgtggggacaacgcggcctgccaacactacggcgtgcgcacctgtgagggctgcaaaggcttctttaagcgcacagtgcaaaaaaatgcaaaatacgtgtgtttagcaaataaaaactgcccagtggacaagcgtcgccggaatcgctgtcagtactgccgatttcagaagtgcctggctgttgggatggtcaaagaagtggttcgcacagacagtttaaaaggccggagaggtcgtttgccctcgaaaccgaagagcccacaggagccctctcccccttcgcccccggtgagtctgatcagtgccctcgtcagggcccatgtcgactccaacccggctatgaccagcctggactattccaggttccaggcgaaccctgactatcaaatgagtggagatgacacccagcatatccagcaattctatgatctcctgactggctccatggagatcatccggggctgggcagagaagatccctggcttcgcagacctgcccaaagccgaccaagacctgctttttgaatcagctttcttagaactgtttgtccttcgattagcatacaggtccaacccagtggagggtaaactcatcttttgcaatggggtggtcttgcacaggttgcaatgcgttcgtggctttggggaatggattgattccattgttgaattctcctccaacttgcagaatatgaacatcgacatttctgccttctcctgcattgctgccctggctatggtcacagagagacacgggctcaaggaacccaagagagtggaagaactgcaaaacaagattgtaaattgtctcaaagaccacgtgactttcaacaatggggggttgaaccgccccaattatttgtccaaactgttggggaagctcccagaacttcgtaccctttgcacacaggggctacagcgcattttctacctgaaattggaagacttggtgccaccgccagcaataattgacaaacttttcctggacactttacctttc

SEQ ID NO: 5498 - DNA, 1878 bp, Homo sapiens
  source 1..1878: mol_type = genomic DNA
atgccctgcgtccaagcccaatatagcccttcccctccaggttccagttatgcggcgcagacatacagctcggaatacaccacggagatcatgaaccccgactacaccaagctgaccatggaccttggcagcactgagatcacggctacagccaccacgtccctgcccagcatcagtaccttcgtggagggctactcgagcaactacgaactcaagccttcctgcgtgtaccaaatgcagcggcccttgatcaaagtggaggaggggcgggcgcccagctaccatcaccatcaccaccaccaccaccaccaccaccaccatcaccagcagcagcatcagcagccatccattcctccagcctccagcccggaggacgaggtgctgcccagcacctccatgtacttcaagcagtccccaccgtccacccccaccacgccggccttccccccgcaggcgggggcgttatgggacgaggcactgccctcggcgcccggctgcatcgcacccggcccgctgctggacccgccgatgaaggcggtccccacggtggccggcgcgcgcttcccgctcttccacttcaagccctcgccgccgcatccccccgcgcccagcccggccggcggccaccacctcggctacgacccgacggccgctgccgcgctcagcctgccgctgggagccgcagccgccgcgggcagccaggccgccgcgcttgagagccacccgtacgggctgccgctggccaagagggcggccccgctggccttcccgcctctcggcctcacgccctcccctaccgcgtccagcctgctgggcgagagtcccagcctgccgtcgccgcccagcaggagctcgtcgtctggcgagggcacgtgtgccgtgtgcggggacaacgccgcctgccagcactacggcgtgcgaacctgcgagggctgcaagggctttttcaagagaacagtgcagaaaaatgcaaaatatgtttgcctggcaaataaaaactgcccagtagacaagagacgtcgaaaccgatgtcagtactgtcgatttcagaagtgtctcagtgttggaatggtaaaagaagttgtccgtacagatagtctgaaagggaggagaggtcgtctgccttccaaaccaaagagcccattacaacaggaaccttctcagccctctccaccttctcctccaatctgcatgatgaatgcccttgtccgagctttaacagactcaacacccagagatcttgattattccagatactgtcccactgaccaggctgctgcaggcacagatgctgagcatgtgcaacaattctacaacctcctgacagcctccattgatgtatccagaagctgggcagaaaagattccgggatttactgatctccccaaagaagatcagacattacttattgaatcagcctttttggagctgtttgtcctcagactttccatcaggtcaaacactgctgaagataagtttgtgttctgcaatggacttgtcctgcatcgacttcagtgccttcgtggatttggggagtggctcgactctattaaagacttttccttaaatttgcagagcctgaaccttgatatccaagccttagcctgcctgtcagcactgagcatgatcacagaaagacatgggttaaaagaaccaaagagagtcgaagagctatgcaacaagatcacaagcagtttaaaagaccaccagagtaagggacaggctctggagcccaccgagtccaaggtcctgggtgccctggtagaactgaggaagatctgcaccctgggcctccagcgcatcttctacctgaagctggaagacttggtgtctccaccttccatcattgacaagctcttcctggacaccctacctttc

SEQ ID NO: 5499 - DNA, 1329 bp, Homo sapiens
  source 1..1329: mol_type = genomic DNA
atgccctgcgtccaagcccaatatagcccttcccctccaggttccagttatgcggcgcagacatacagctcggaatacaccacggagatcatgaaccccgactacaccaagctgaccatggaccttggcagcactgagatcacggctacagccaccacgtccctgcccagcatcagtaccttcgtggagggctactcgagcaactacgaactcaagccttcctgcgtgtaccaaatgcagcggcccttgatcaaagtggaggaggggcgggcgcccagctaccatcaccatcaccaccaccaccaccaccaccaccaccatcaccagcagcagcatcagcagccatccattcctccagcctccagcccggaggacgaggtgctgcccagcacctccatgtacttcaagcagtccccaccgtccacccccaccacgccggccttccccccgcaggcgggggcgttatgggacgaggcactgccctcggcgcccggctgcatcgcacccggcccgctgctggacccgccgatgaaggcggtccccacggtggccggcgcgcgcttcccgctcttccacttcaagccctcgccgccgcatccccccgcgcccagcccggccggcggccaccacctcggctacgacccgacggccgctgccgcgctcagcctgccgctgggagccgcagccgccgcgggcagccaggccgccgcgcttgagagccacccgtacgggctgccgctggccaagagggcggccccgctggccttcccgcctctcggcctcacgccctcccctaccgcgtccagcctgctgggcgagagtcccagcctgccgtcgccgcccagcaggagctcgtcgtctggcgagggcacgtgtgccgtgtgcggggacaacgccgcctgccagcactacggcgtgcgaacctgcgagggctgcaagggctttttcaagagaacagtgcagaaaaatgcaaaatatgtttgcctggcaaataaaaactgcccagtagacaagagacgtcgaaaccgatgtcagtactgtcgatttcagaagtgtctcagtgttggaatggtaaaagaagttgtccgtacagatagtctgaaagggaggagaggtcgtctgccttccaaaccaaagagcccattacaacaggaaccttctcagccctctccaccttctcctccaatctgcatgatgaatgcccttgtccgagctttaacagactcaacacccagagatcttgattattccagagtaagttttatgatttcctgctttcaaatgaatgatcagggtctctatttatggctactagtaataagagttgat

SEQ ID NO: 5500 - DNA, 1911 bp, Homo sapiens
  source 1..1911: mol_type = genomic DNA
atgcatgactcaatcagatttggaaatgtggatatgccctgcgtccaagcccaatatagcccttcccctccaggttccagttatgcggcgcagacatacagctcggaatacaccacggagatcatgaaccccgactacaccaagctgaccatggaccttggcagcactgagatcacggctacagccaccacgtccctgcccagcatcagtaccttcgtggagggctactcgagcaactacgaactcaagccttcctgcgtgtaccaaatgcagcggcccttgatcaaagtggaggaggggcgggcgcccagctaccatcaccatcaccaccaccaccaccaccaccaccaccatcaccagcagcagcatcagcagccatccattcctccagcctccagcccggaggacgaggtgctgcccagcacctccatgtacttcaagcagtccccaccgtccacccccaccacgccggccttccccccgcaggcgggggcgttatgggacgaggcactgccctcggcgcccggctgcatcgcacccggcccgctgctggacccgccgatgaaggcggtccccacggtggccggcgcgcgcttcccgctcttccacttcaagccctcgccgccgcatccccccgcgcccagcccggccggcggccaccacctcggctacgacccgacggccgctgccgcgctcagcctgccgctgggagccgcagccgccgcgggcagccaggccgccgcgcttgagagccacccgtacgggctgccgctggccaagagggcggccccgctggccttcccgcctctcggcctcacgccctcccctaccgcgtccagcctgctgggcgagagtcccagcctgccgtcgccgcccagcaggagctcgtcgtctggcgagggcacgtgtgccgtgtgcggggacaacgccgcctgccagcactacggcgtgcgaacctgcgagggctgcaagggctttttcaagagaacagtgcagaaaaatgcaaaatatgtttgcctggcaaataaaaactgcccagtagacaagagacgtcgaaaccgatgtcagtactgtcgatttcagaagtgtctcagtgttggaatggtaaaagaagttgtccgtacagatagtctgaaagggaggagaggtcgtctgccttccaaaccaaagagcccattacaacaggaaccttctcagccctctccaccttctcctccaatctgcatgatgaatgcccttgtccgagctttaacagactcaacacccagagatcttgattattccagatactgtcccactgaccaggctgctgcaggcacagatgctgagcatgtgcaacaattctacaacctcctgacagcctccattgatgtatccagaagctgggcagaaaagattccgggatttactgatctccccaaagaagatcagacattacttattgaatcagcctttttggagctgtttgtcctcagactttccatcaggtcaaacactgctgaagataagtttgtgttctgcaatggacttgtcctgcatcgacttcagtgccttcgtggatttggggagtggctcgactctattaaagacttttccttaaatttgcagagcctgaaccttgatatccaagccttagcctgcctgtcagcactgagcatgatcacagaaagacatgggttaaaagaaccaaagagagtcgaagagctatgcaacaagatcacaagcagtttaaaagaccaccagagtaagggacaggctctggagcccaccgagtccaaggtcctgggtgccctggtagaactgaggaagatctgcaccctgggcctccagcgcatcttctacctgaagctggaagacttggtgtctccaccttccatcattgacaagctcttcctggacaccctacctttc

SEQ ID NO: 5501 - DNA, 789 bp, Homo sapiens
  source 1..789: mol_type = genomic DNA
atgttttatttccactgcccgccacagctagagggcactgcaacctttggcaatcactcttcgggggattttgatgacgggtttctgcgtagaaaacagcgccggaaccggacgacgttcactcttcagcagctggaagctctcgaggccgtttttgcccaaacacactatccagatgtcttcaccagagaagagctcgccatgaaaataaacctcacagaagccagagtgcaggtttggttccagaacagaagggccaaatggaggaagacagagagaggggcctcagaccaggagccaggagccaaggagcccatggcagaggtgacacctcctccagtgagaaacatcaactccccgccccctggggaccaagcccggagtaagaaggaggcgctggaggcccagcagagcctggggcgaacggtaggtcctgcagggcctttcttcccctcctgcttgccggggactctcctgaacacggccacctacgcccaggccttgtcccatgtggcttccctcaaagggggcccactgtgctcttgctgcgtcccagaccccatgggactctccttccttcccacctatggctgccagagtaaccgcacggccagcgtggccaccctgcgcatgaaggcccgcgagcactcagaagctgtcctgcagtcagccaacctcctgccttccaccagcagcagccccggccctgtcgccaagccggcgcccccagatggcagccaggaaaagacctctcccaccaaggaacagagcgaggcagagaagagtgta

SEQ ID NO: 5502 - DNA, 975 bp, Homo sapiens
  source 1..975: mol_type = genomic DNA
atgctgtctcatgccgacctcctggacgccaggctaggtatgaaagatgccgccgagcttctgggccaccgggaggcggtgaagtgtaggctgggcgtggggggctccgaccccgggggccatccgggggacctggcgcccaactctgacccagtggagggagccactctgctgcccggggaggacatcaccacagtgggctctactccggcctcgctggcggtgagcgccaaagacccggacaagcagcccgggccccagggcggcccgaaccccagccaagccggccagcagcagggccaacagaagcagaagcgccaccggacgcgcttcacccccgcacagctcaacgagttggagaggagcttcgccaagactcactaccccgacatctttatgcgtgaggagctggcactgcgtatcgggctgaccgagtcccgagtgcaggtctggttccagaaccgacgcgccaagtggaagaagcgcaaaaagacgaccaacgtgttccgtgcgcccggcacactgctgcccacgccaggcctgcctcagttcccgtcggctgccgccgccgctgccgccgccatgggcgacagcctgtgctctttccacgccaacgacacccgctgggcggcggccgccatgcctggcgtgtcacagctgcctctgccgccggcgctgggcaggcagcaggccatggcgcagtcgctgtcccagtgcagcctggcggccggtccgccgcccaactccatgggcctgtccaacagcctggcgggttccaacggcgcggggctgcagtcgcacctctaccagcccgccttccccggcatggtgcccgcctccctccccggccccagcaacgtctccggttcgccccagctctgcagctccccggacagcagcgacgtgtggcggggcaccagcatcgcctccctccgccgcaaggcgctagagcacacagtctctatgagcttcact

SEQ ID NO: 5503 - DNA, 1758 bp, Homo sapiens
  source 1..1758: mol_type = genomic DNA
atggttcactccagcatgggggctccagaaataagaatgtctaagcccctggaggccgagaagcaaggtctggactccccatcagagcacacagacaccgaaagaaatggaccagacactaatcatcagaacccccaaaataagacctccccattctccgtgtccccaactggccccagtacaaagatcaaggctgaagaccccagtggcgattcagccccagcagcacccctgccccctcagccggcccagcctcatctgccccaggcccaactcatgttgacgggcagccagctagctggggacatacagcagctcctccagctccagcagctggtgcttgtgccaggccaccacctccagccacctgctcagttcctgctaccgcaggcccagcagagccagccaggcctgctaccgacaccaaatctattccagctacctcagcaaacccagggagctcttctgacctcccagccccgggccgggcttcccacacagccccccaaatgcttggagccaccatcccaccccgaggagcccagtgatctggaggagctggagcaattcgcccgcaccttcaagcaacgccgcatcaagctgggcttcacgcagggtgatgtgggcctggccatgggcaagctctacggcaacgacttcagccagacgaccatttcccgcttcgaggccctcaacctgagcttcaagaacatgtgcaaactcaagcccctcctggagaagtggctcaacgatgcagagactatgtctgtggactcaagcctgcccagccccaaccagctgagcagccccagcctgggtttcgacggcctgcccggccggagacgcaagaagaggaccagcatcgagacaaacgtccgcttcgccttagagaagagttttctagcgaaccagaagcctacctcagaggagatcctgctgatcgccgagcagctgcacatggagaaggaagtgatccgcgtctggttctgcaaccggcgccagaaggagaaacgcatcaacccctgcagtgcggcccccatgctgcccagcccagggaagccggccagctacagcccccatatggtcacaccccaagggggcgcggggaccttaccgttgtcccaagcttccagcagtctgagcacaacagttactaccttatcctcagctgtggggacgctccaccccagccggacagctggagggggtgggggcgggggcggggctgcgccccccctcaattccatcccctctgtcactcccccacccccggccaccaccaacagcacaaaccccagccctcaaggcagccactcggctatcggcttgtcaggcctgaaccccagcacgggaagcacaatggtggggttgagctccgggctgagtccagccctcatgagcaacaaccctttggccactatccaagccctggcctctggtggaaccctgccccttaccagccttgatggcagcgggaatctggtgctgggggcagccggtgcagccccggggagccctggcctggtgacctcgccgctcttcttgaatcatgctgggctgcccctgctcagcaccccgcctggtgtgggcctggtctcagcagcggctgcggctgtggcagcctccatctccagcaagtctcctggcctctcctcctcatcctcttcatcctcatcctcctcctcctccacttgcagcgagacggcagcacagacccctggaggtccaggggggcccgaggcagggtccaaacctgag

SEQ ID NO: 5504 - DNA, 1437 bp, Homo sapiens
  source 1..1437: mol_type = genomic DNA
atggttcactccagcatgggggctccagaaataagaatgtctaagcccctggaggccgagaagcaaggtctggactccccatcagagcacacagacaccgaaagaaatggaccagacactaatcatcagaacccccaaaataagacctccccattctccgtgtccccaactggccccagtacaaagatcaaggctgaagaccccagtggcgattcagccccagcagcacccctgccccctcagccggcccagcctcatctgccccaggcccaactcatgttgacgggcagccagctagctggggacatacagcagctcctccagctccagcagctggtgcttgtgccaggccaccacctccagccacctgctcagttcctgctaccgcaggcccagcagagccagccaggcctgctaccgacaccaaatctattccagctacctcagcaaacccagggagctcttctgacctcccagccccgggccgggcttcccacacaggccgtgacccgccctacgctgcccgacccgcacctctcgcacccgcagccccccaaatgcttggagccaccatcccaccccgaggagcccagtgatctggaggagctggagcaattcgcccgcaccttcaagcaacgccgcatcaagctgggcttcacgcagggtgatgtgggcctggccatgggcaagctctacggcaacgacttcagccagacgaccatttcccgcttcgaggccctcaacctgagcttcaagaacatgtgcaaactcaagcccctcctggagaagtggctcaacgatgcagagactatgtctgtggactcaagcctgcccagccccaaccagctgagcagccccagcctgggtttcgacggcctgcccggccggagacgcaagaagaggaccagcatcgagacaaacgtccgcttcgccttagagaagagttttctagcgaaccagaagcctacctcagaggagatcctgctgatcgccgagcagctgcacatggagaaggaagtgatccgcgtctggttctgcaaccggcgccagaaggagaaacgcatcaacccctgcagtgcggcccccatgctgcccagcccagggaagccggccagctacagcccccatatggtcacaccccaagggggcgcggggaccttaccgttgtcccaagcttccagcagtctgagcacaacagttactaccttatcctcagctgtggggacgctccaccccagccggacagctggagggggtgggggcgggggcggggctgcgccccccctcaattccatcccctctgtcactcccccacccccggccaccaccaacagcacaaaccccagccctcaaggcagccactcggctatcggcttgtcaggcctgaaccccagcacgggccctggcctctggtggaaccctgccccttaccagcct

SEQ ID NO: 5505 - DNA, 1455 bp, Homo sapiens
  source 1..1455: mol_type = genomic DNA
atggttcactccagcatgggggctccagaaataagaatgtctaagcccctggaggccgagaagcaaggtctggactccccatcagagcacacagacaccgaaagaaatggaccagacactaatcatcagaacccccaaaataagacctccccattctccgtgtccccaactggccccagtacaaaggtgggcattctctctggcctccacttaacattctggggtcccggaccctgcctctctcccccccagatcaaggctgaagaccccagtggcgattcagccccagcagcacccctgccccctcagccggcccagcctcatctgccccaggcccaactcatgttgacgggcagccagctagctggggacatacagcagctcctccagctccagcagctggtgcttgtgccaggccaccacctccagccacctgctcagttcctgctaccgcaggcccagcagagccagccaggcctgctaccgacaccaaatctattccagctacctcagcaaacccagggagctcttctgacctcccagccccgggccgggcttcccacacagccccccaaatgcttggagccaccatcccaccccgaggagcccagtgatctggaggagctggagcaattcgcccgcaccttcaagcaacgccgcatcaagctgggcttcacgcagggtgatgtgggcctggccatgggcaagctctacggcaacgacttcagccagacgaccatttcccgcttcgaggccctcaacctgagcttcaagaacatgtgcaaactcaagcccctcctggagaagtggctcaacgatgcagagactatgtctgtggactcaagcctgcccagccccaaccagctgagcagccccagcctgggtttcgacggcctgcccggccggagacgcaagaagaggaccagcatcgagacaaacgtccgcttcgccttagagaagagttttctagcgaaccagaagcctacctcagaggagatcctgctgatcgccgagcagctgcacatggagaaggaagtgatccgcgtctggttctgcaaccggcgccagaaggagaaacgcatcaacccctgcagtgcggcccccatgctgcccagcccagggaagccggccagctacagcccccatatggtcacaccccaagggggcgcggggaccttaccgttgtcccaagcttccagcagtctgagcacaacagttactaccttatcctcagctgtggggacgctccaccccagccggacagctggagggggtgggggcgggggcggggctgcgccccccctcaattccatcccctctgtcactcccccacccccggccaccaccaacagcacaaaccccagccctcaaggcagccactcggctatcggcttgtcaggcctgaaccccagcacgggccctggcctctggtggaaccctgccccttaccagcct

SEQ ID NO: 5506 - DNA, 1389 bp, Homo sapiens
  source 1..1389: mol_type = genomic DNA
atggttcactccagcatgggggctccagaaataagaatgtctaagcccctggaggccgagaagcaaggtctggactccccatcagagcacacagacaccgaaagaaatggaccagacactaatcatcagaacccccaaaataagacctccccattctccgtgtccccaactggccccagtacaaagatcaaggctgaagaccccagtggcgattcagccccagcagcacccctgccccctcagccggcccagcctcatctgccccaggcccaactcatgttgacgggcagccagctagctggggacatacagcagctcctccagctccagcagctggtgcttgtgccaggccaccacctccagccacctgctcagttcctgctaccgcaggcccagcagagccagccaggcctgctaccgacaccaaatctattccagctacctcagcaaacccagggagctcttctgacctcccagccccgggccgggcttcccacacagccccccaaatgcttggagccaccatcccaccccgaggagcccagtgatctggaggagctggagcaattcgcccgcaccttcaagcaacgccgcatcaagctgggcttcacgcagggtgatgtgggcctggccatgggcaagctctacggcaacgacttcagccagacgaccatttcccgcttcgaggccctcaacctgagcttcaagaacatgtgcaaactcaagcccctcctggagaagtggctcaacgatgcagagactatgtctgtggactcaagcctgcccagccccaaccagctgagcagccccagcctgggtttcgacggcctgcccggccggagacgcaagaagaggaccagcatcgagacaaacgtccgcttcgccttagagaagagttttctagcgaaccagaagcctacctcagaggagatcctgctgatcgccgagcagctgcacatggagaaggaagtgatccgcgtctggttctgcaaccggcgccagaaggagaaacgcatcaacccctgcagtgcggcccccatgctgcccagcccagggaagccggccagctacagcccccatatggtcacaccccaagggggcgcggggaccttaccgttgtcccaagcttccagcagtctgagcacaacagttactaccttatcctcagctgtggggacgctccaccccagccggacagctggagggggtgggggcgggggcggggctgcgccccccctcaattccatcccctctgtcactcccccacccccggccaccaccaacagcacaaaccccagccctcaaggcagccactcggctatcggcttgtcaggcctgaaccccagcacgggccctggcctctggtggaaccctgccccttaccagcct

SEQ ID NO: 5507 - DNA, 1401 bp, Homo sapiens
  source 1..1401: mol_type = genomic DNA
atggttcactccagcatgggggctccagaaataagaatgtctaagcccctggaggccgagaagcaaggtctggactccccatcagagcacacagacaccgaaagaaatggaccagacactaatcatcagaacccccaaaataagacctccccattctccgtgtccccaactggccccagtacaaagatcaaggctgaagaccccagtggcgattcagccccagcagcacccctgccccctcagccggcccagcctcatctgccccaggcccaactcatgttgacgggcagccagctagctggggacatacagcagctcctccagctccagcagctggtgcttgtgccaggccaccacctccagccacctgctcagttcctgctaccgcaggcccagcagagccagccaggcctgctaccgacaccaaatctattccagctacctcagcaaacccagggagctcttctgacctcccagccccgggccgggcttcccacacaggccgtgacccgccctacgctgcccgacccgcacctctcgcacccgcagccccccaaatgcttggagccaccatcccaccccgaggagcccagtgatctggaggagctggagcaattcgcccgcaccttcaagcaacgccgcatcaagctgggcttcacgcagggtgatgtgggcctggccatgggcaagctctacggcaacgacttcagccagacgaccatttcccgcttcgaggccctcaacctgagcttcaagaacatgtgcaaactcaagcccctcctggagaagtggctcaacgatgcagagactatgtctgtggactcaagcctgcccagccccaaccagctgagcagccccagcctgggtttcgacggcctgcccggccggagacgcaagaagaggaccagcatcgagacaaacgtccgcttcgccttagagaagagttttctagcgaaccagaagcctacctcagaggagatcctgctgatcgccgagcagctgcacatggagaaggaagtgatccgcgtctggttctgcaaccggcgccagaaggagaaacgcatcaacccctgcagtgcggcccccatgctgcccagcccagggaagccggccagctacagcccccatatggtcacaccccaagggggcgcggggaccttaccgttgtcccaagcttccagcagtctgagcacaacagttactaccttatcctcagctgtggggacgctccaccccagccggacagctggagggggtgggggcgggggcggggctgcgccccccctcaattccatcccctctgtcactcccccacccccggccaccaccaacagcacaaaccccagccctcaaggcagccactcggctatcggcttgtcaggcctgaaccccagcacgggg

SEQ ID NO: 5508 - DNA, 1431 bp, Homo sapiens
  source 1..1431: mol_type = genomic DNA
atgaagagtcttccaatcctactgttgctgtgcgtggcagtttgctcagcctatccattggatggagctgcaaggggtgaggacaccagcatgaaccttgttcagaaatatctagaaaactactacgacctcaaaaaagatgtgaaacagtttgttaggagaaaggacagtggtcctgttgttaaaaaaatccgagaaatgcagaagttccttggattggaggtgacggggaagctggactccgacactctggaggtgatgcgcaagcccaggtgtggagttcctgatgttggtcacttcagaacctttcctggcatcccgaagtggaggaaaacccaccttacatacaggattgtgaattatacaccagatttgccaaaagatgctgttgattctgctgttgagaaagctctgaaagtctgggaagaggtgactccactcacattctccaggctgtatgaaggagaggctgatataatgatctcttttgcagttagagaacatggagacttttacccttttgatggacctggaaatgttttggcccatgcctatgcccctgggccagggattaatggagatgcccactttgatgatgatgaacaatggacaaaggatacaacagggaccaatttatttctcgttgctgctcatgaaattggccactccctgggtctctttcactcagccaacactgaagctttgatgtacccactctatcactcactcacagacctgactcggttccgcctgtctcaagatgatataaatggcattcagtccctctatggacctccccctgactcccctgagacccccctggtacccacggaacctgtccctccagaacctgggacgccagccaactgtgatcctgctttgtcctttgatgctgtcagcactctgaggggagaaatcctgatctttaaagacaggcacttttggcgcaaatccctcaggaagcttgaacctgaattgcatttgatctcttcattttggccatctcttccttcaggcgtggatgccgcatatgaagttactagcaaggacctcgttttcatttttaaaggaaatcaattctgggctatcagaggaaatgaggtacgagctggatacccaagaggcatccacaccctaggtttccctccaaccgtgaggaaaatcgatgcagccatttctgataaggaaaagaacaaaacatatttctttgtagaggacaaatactggagatttgatgagaagagaaattccatggagccaggctttcccaagcaaatagctgaagactttccagggattgactcaaagattgatgctgtttttgaagaatttgggttcttttatttctttactggatcttcacagttggagtttgacccaaatgcaaagaaagtgacacacactttgaagagtaacagctggcttaattgt

SEQ ID NO: 5509 - DNA, 2265 bp, Homo sapiens
  source 1..2265: mol_type = genomic DNA
atgctggactgcagtgactatgttctagactcaagaatgaacaatccgtcagaaaccagtaaaccatctatggagagtggagatggcaacacaggcacacaaaccaatggtctggactttcagaagcagcctgtgcctgtaggaggagcaatctcaacagcccaggcgcaggctttccttggacatctccatcaggtccaactcgctggaacaagtttacaggctgctgctcagtctttaaatgtacagtctaaatctaatgaagaatcgggggattcgcagcagccaagccagccttcccagcagccttcagtgcaggcagccattccccagacccagcttatgctagctggaggacagataactgggcttactttgacgcctgcccagcaacagttactactccagcaggcacaggcacaggcacagctgctggctgctgcagtgcagcagcactccgccagccagcagcacagtgctgctggagccaccatctccgcctctgctgccacgcccatgacgcagatccccctgtctcagcccatacagatcgcacaggatcttcaacaactgcaacagcttcaacagcagaatctcaacctgcaacagtttgtgttggtgcatccaaccaccaatttgcagccagcgcagtttatcatctcacagacgccccagggccagcagggtctcctgcaagcgcaaaatcttctaacgcaactacctcagcaaagccaagccaacctcctacagtcgcagccaagcatcaccctcacctcccagccagcaaccccaacacgcacaatagcagcaaccccaattcagacacttccacagagccagtcaacaccaaagcgaattgatactcccagcttggaggagcccagtgaccttgaggagcttgagcagtttgccaagaccttcaaacaaagacgaatcaaacttggattcactcagggtgatgttgggctcgctatggggaaactatatggaaatgacttcagccaaactaccatctctcgatttgaagccttgaacctcagctttaagaacatgtgcaagttgaagccacttttagagaagtggctaaatgatgcagagaacctctcatctgattcgtccctctccagcccaagtgccctgaattctccaggaattgagggcttgagccgtaggaggaagaaacgcaccagcatagagaccaacatccgtgtggccttagagaagagtttcttggagaatcaaaagcctacctcggaagagatcactatgattgctgatcagctcaatatggaaaaagaggtgattcgtgtttggttctgtaaccgccgccagaaagaaaaaagaatcaacccaccaagcagtggtgggaccagcagctcacctattaaagcaattttccccagcccaacttcactggtggcgaccacaccaagccttgtgactagcagtgcagcaactaccctcacagtcagccctgtcctccctctgaccagtgctgctgtgacgaatctttcagttacaggcacttcagacaccacctccaacaacacagcaaccgtgatttccacagcgcctccagcttcctcagcagtcacgtccccctctctgagtccctccccttctgcctcagcctccacctccgaggcatccagtgccagtgagaccagcacaacacagaccacctccactcctttgtcctcccctcttgggaccagccaggtgatggtgacagcatcaggtttgcaaacagcagcagctgctgcccttcaaggagctgcacagttgccagcaaatgccagtcttgctgccatggcagctgctgcaggactaaacccaagcctgatggcaccctcacagtttgcggctggaggtgccttactcagtctgaatccagggaccctgagcggtgctctcagcccagctctaatgagcaacagtacactggcaactattcaagctcttgcttctggtggctctcttccaataacatcacttgatgcaactgggaacctggtatttgccaatgcgggaggagcccccaacatcgtgactgcccctctgttcctgaaccctcagaacctctctctgctcaccagcaaccctgttagcttggtctctgccgccgcagcatctgcagggaactctgcacctgtagccagccttcacgccacctccacctctgctgagtccatccagaactctctcttcacagtggcctctgccagcggggctgcgtccaccaccaccaccgcctccaaggcacag

SEQ ID NO: 5510 - DNA, 2109 bp, Homo sapiens
  source 1..2109: mol_type = genomic DNA
atggcggacggaggagcagcgagtcaagatgagagttcagccgcggcggcagcagcagcagactcaagaatgaacaatccgtcagaaaccagtaaaccatctatggagagtggagatggcaacacaggcacacaaaccaatggtctggactttcagaagcagcctgtgcctgtaggaggagcaatctcaacagcccaggcgcaggctttccttggacatctccatcaggtccaactcgctggaacaagtttacaggctgctgctcagtctttaaatgtacagtctaaatctaatgaagaatcgggggattcgcagcagccaagccagccttcccagcagccttcagtgcaggcagccattccccagacccagcttatgctagctggaggacagataactggggatcttcaacaactgcaacagcttcaacagcagaatctcaacctgcaacagtttgtgttggtgcatccaaccaccaatttgcagccagcgcagtttatcatctcacagacgccccagggccagcagggtctcctgcaagcgcaaaatcttctaacgcaactacctcagcaaagccaagccaacctcctacagtcgcagccaagcatcaccctcacctcccagccagcaaccccaacacgcacaatagcagcaaccccaattcagacacttccacagagccagtcaacaccaaagcgaattgatactcccagcttggaggagcccagtgaccttgaggagcttgagcagtttgccaagaccttcaaacaaagacgaatcaaacttggattcactcagggtgatgttgggctcgctatggggaaactatatggaaatgacttcagccaaactaccatctctcgatttgaagccttgaacctcagctttaagaacatgtgcaagttgaagccacttttagagaagtggctaaatgatgcagagaacctctcatctgattcgtccctctccagcccaagtgccctgaattctccaggaattgagggcttgagccgtaggaggaagaaacgcaccagcatagagaccaacatccgtgtggccttagagaagagtttcttggagaatcaaaagcctacctcggaagagatcactatgattgctgatcagctcaatatggaaaaagaggtgattcgtgtttggttctgtaaccgccgccagaaagaaaaaagaatcaacccaccaagcagtggtgggaccagcagctcacctattaaagcaattttccccagcccaacttcactggtggcgaccacaccaagccttgtgactagcagtgcagcaactaccctcacagtcagccctgtcctccctctgaccagtgctgctgtgacgaatctttcagttacaggcacttcagacaccacctccaacaacacagcaaccgtgatttccacagcgcctccagcttcctcagcagtcacgtccccctctctgagtccctccccttctgcctcagcctccacctccgaggcatccagtgccagtgagaccagcacaacacagaccacctccactcctttgtcctcccctcttgggaccagccaggtgatggtgacagcatcaggtttgcaaacagcagcagctgctgcccttcaaggagctgcacagttgccagcaaatgccagtcttgctgccatggcagctgctgcaggactaaacccaagcctgatggcaccctcacagtttgcggctggaggtgccttactcagtctgaatccagggaccctgagcggtgctctcagcccagctctaatgagcaacagtacactggcaactattcaagctcttgcttctggtggctctcttccaataacatcacttgatgcaactgggaacctggtatttgccaatgcgggaggagcccccaacatcgtgactgcccctctgttcctgaaccctcagaacctctctctgctcaccagcaaccctgttagcttggtctctgccgccgcagcatctgcagggaactctgcacctgtagccagccttcacgccacctccacctctgctgagtccatccagaactctctcttcacagtggcctctgccagcggggctgcgtccaccaccaccaccgcctccaaggcacag

SEQ ID NO: 5511 - DNA, 2298 bp, Homo sapiens
  source 1..2298: mol_type = genomic DNA
atggcggacggaggagcagcgagtcaagatgagagttcagccgcggcggcagcagcagcagactcaagaatgaacaatccgtcagaaaccagtaaaccatctatggagagtggagatggcaacacaggcacacaaaccaatggtctggactttcagaagcagcctgtgcctgtaggaggagcaatctcaacagcccaggcgcaggctttccttggacatctccatcaggtccaactcgctggaacaagtttacaggctgctgctcagtctttaaatgtacagtctaaatctaatgaagaatcgggggattcgcagcagccaagccagccttcccagcagccttcagtgcaggcagccattccccagacccagcttatgctagctggaggacagataactgggcttactttgacgcctgcccagcaacagttactactccagcaggcacaggcacaggcacagctgctggctgctgcagtgcagcagcactccgccagccagcagcacagtgctgctggagccaccatctccgcctctgctgccacgcccatgacgcagatccccctgtctcagcccatacagatcgcacaggatcttcaacaactgcaacagcttcaacagcagaatctcaacctgcaacagtttgtgttggtgcatccaaccaccaatttgcagccagcgcagtttatcatctcacagacgccccagggccagcagggtctcctgcaagcgcaaaatcttctaacgcaactacctcagcaaagccaagccaacctcctacagtcgcagccaagcatcaccctcacctcccagccagcaaccccaacacgcacaatagcagcaaccccaattcagacacttccacagagccagtcaacaccaaagcgaattgatactcccagcttggaggagcccagtgaccttgaggagcttgagcagtttgccaagaccttcaaacaaagacgaatcaaacttggattcactcagggtgatgttgggctcgctatggggaaactatatggaaatgacttcagccaaactaccatctctcgatttgaagccttgaacctcagctttaagaacatgtgcaagttgaagccacttttagagaagtggctaaatgatgcagagaacctctcatctgattcgtccctctccagcccaagtgccctgaattctccaggaattgagggcttgagccgtaggaggaagaaacgcaccagcatagagaccaacatccgtgtggccttagagaagagtttcttggagaatcaaaagcctacctcggaagagatcactatgattgctgatcagctcaatatggaaaaagaggtgattcgtgtttggttctgtaaccgccgccagaaagaaaaaagaatcaacccaccaagcagtggtgggaccagcagctcacctattaaagcaattttccccagcccaacttcactggtggcgaccacaccaagccttgtgactagcagtgcagcaactaccctcacagtcagccctgtcctccctctgaccagtgctgctgtgacgaatctttcagttacaggcacttcagacaccacctccaacaacacagcaaccgtgatttccacagcgcctccagcttcctcagcagtcacgtccccctctctgagtccctccccttctgcctcagcctccacctccgaggcatccagtgccagtgagaccagcacaacacagaccacctccactcctttgtcctcccctcttgggaccagccaggtgatggtgacagcatcaggtttgcaaacagcagcagctgctgcccttcaaggagctgcacagttgccagcaaatgccagtcttgctgccatggcagctgctgcaggactaaacccaagcctgatggcaccctcacagtttgcggctggaggtgccttactcagtctgaatccagggaccctgagcggtgctctcagcccagctctaatgagcaacagtacactggcaactattcaagctcttgcttctggtggctctcttccaataacatcacttgatgcaactgggaacctggtatttgccaatgcgggaggagcccccaacatcgtgactgcccctctgttcctgaaccctcagaacctctctctgctcaccagcaaccctgttagcttggtctctgccgccgcagcatctgcagggaactctgcacctgtagccagccttcacgccacctccacctctgctgagtccatccagaactctctcttcacagtggcctctgccagcggggctgcgtccaccaccaccaccgcctccaaggcacag

SEQ ID NO: 5512 - DNA, 8760 bp, Homo sapiens
  source 1..8760: mol_type = genomic DNA
atgaggggccggcggggcaggccgcccaagcagcccgcggctcccgctgcggagcgctgcgccccggccccgccgccaccgccgccgccgcccacgtccggacccatcggggggctccgctcgcggcaccgcggcagcagccggggcaggtgggccgccgcccaggctgaggtggcgcccaagacgcggctgagctcgcccagggggggcagcagtagccggaggaagccgccgccgccgccgccggccccccccagcaccagcgccccgggccggggggggcgaggaggcgggggcggcaggacggggggcgggggcggcggcggccacctggcccggaccaccgcggcccggagggccgtcaacaaagtggtgtacgatgaccacgagagcgaggaggaggaggaagaggaggacatggtctccgaggaggaggaggaggaggacggcgacgccgaggagacccaggattctgaggacgacgaggaggatgagatggaagaggacgacgatgactccgattatccggaggagatggaagacgacgacgacgacgccagttactgcacggaaagcagcttcaggagccatagtacctacagcagcactccaggtaggcgaaaaccaagagtacatcggcctcgttctcctatattggaagaaaaagacatcccgccccttgaatttcccaagtcctctgaggatttaatggtgcctaatgagcatataatgaatgtcattgccatttacgaggtactgcggaactttggcactgttttgagattatctccttttcgctttgaggacttttgtgcagctctggtgagccaagagcagtgcacactcatggcagagatgcatgttgtgcttttgaaagcagttctgcgtgaagaagacacttccaatactacctttggacctgctgatctgaaagatagcgttaattccacactgtatttcatagatgggatgacgtggccagaggtgctgcgggtgtactgtgagagtgataaggagtaccatcacgttcttccttaccaagaggcagaggactacccatatggaccagtagagaacaagatcaaagttctacagtttctagtcgatcagtttcttacaacaaatattgctcgagaggaattgatgtctgaaggggtgatacagtatgatgaccattgtagggtttgtcacaaacttggggatttgctttgctgtgagacatgttcagcagtataccatttggaatgtgtgaagccacctcttgaggaggtgccagaggacgagtggcagtgtgaagtctgtgtagcacacaaggtgcctggtgtgactgactgtgttgctgaaatccaaaaaaataaaccatatattcgacatgaacctattggatatgatagaagtcggaggaaatactggttcttgaaccgaagactcataatagaagaagatacagaaaatgaaaatgaaaagaaaatttggtattacagcacaaaggtccaacttgcagaattaattgactgtctagacaaagattattgggaagcagaactctgcaaaattctagaagaaatgcgtgaagaaatccaccgacacatggacataactgaagacctgaccaataaggctcggggcagtaacaaatcctttctggcggcagctaatgaagaaattttggaatccataagagccaaaaagggagacattgataatgttaaaagcccagaagaaacagaaaaagacaagaatgagactgagaatgactctaaagatgctgagaaaaacagagaagaatttgaagaccagtcccttgaaaaagacagtgacgacaaaacaccagatgatgaccctgagcaaggaaaatctgaggtaggtgatttcaaatcggagaagtccaacggggagctaagtgaatctcctggagctggaaaaggagcatctggctcaactcgaatcatcaccagattgcggaatccagatagcaaacttagtcagctgaagagccagcaggtggcagccgctgcacatgaagcaaataaattatttaaggagggcaaagaggtactggtagttaactctcaaggagaaatttcacggttgagcaccaaaaaggaagtgatcatgaaaggaaatatcaacaattattttaaattgggtcaagaagggaagtatcgcgtctaccacaatcaatactccaccaattcatttgctttgaataagcaccagcacagagaagaccatgataagagaaggcatcttgcacataagttctgtctgactccagcaggagagttcaaatggaacggttctgtccatgggtccaaagttcttaccatatctactctgagactgactatcacccaattagaaaacaacatcccttcatcctttcttcatcccaactgggcatcacatagggcaaattggatcaaggcagttcagatgtgtagcaaacccagagaatttgcattggctttagccattttggagtgtgcagttaaaccagttgtgatgctaccaatatggcgagaatctttaggacataccaggttacaccggatgacatcaattgaaagagaagaaaaggagaaagtcaaaaaaaaagagaagaaacaggaagaagaagaaacgatgcagcaagcgacatgggtaaaatacacatttccagttaagcatcaggtttggaaacaaaaaggtgaagagtacagagtgacaggatatggtggttggagctggattagtaaaactcatgtttataggtttgttcctaaattgccaggcaatactaatgtgaattacagaaagtcgttagaaggaaccaaaaataatatggatgaaaatatggatgagtcagataaaagaaaatgttcacgaagtccaaaaaaaataaaaatagagcctgattctgaaaaagatgaggtaaaaggttcagatgctgcaaaaggagcagaccaaaatgaaatggatatctcaaagattactgagaagaaggaccaagatgtgaaggagctcttagattctgacagtgataaaccctgcaaggaagaaccaatggaagtagacgatgacatgaaaacagagtcacatgtaaattgtcaggagagttctcaagtagatgtggtcaatgttagtgagggttttcatctaaggactagttacaaaaagaaaacaaaatcatccaaactagatggacttcttgaaaggagaattaaacagtttacactggaagaaaaacagcgactcgaaaaaatcaagttggagggtggaattaagggtataggaaagacttctacaaattcttcaaaaaatctctctgaatcaccagtaataacgaaagcaaaagaagggtgtcagagtgactcgatgagacaagaacagagcccaaatgcaaataatgatcaacctgaggacttgattcagggatgttcagaaagtgattcctcagttcttagaatgagtgatcctagtcataccacaaacaaactttatccaaaagatcgagtgttagatgatgtctccattcggagcccagaaacaaaatgtccgaaacaaaattccattgaaaatgacatagaagaaaaagtctctgaccttgccagtagaggccaggaacccagtaagagtaaaacaaaaggaaatgattttttcatcgatgactctaaactagccagtgcagatgatattggtactttgatctgtaagaacaaaaaaccgctcatacaggaggaaagtgacaccattgtttcttcttccaagagtgctttacattcatcagtgcctaaaagtaccaatgacagagatgccacacctctgtcaagagcaatggactttgaaggaaaactgggatgtgactctgaatctaatagcactttggaaaatagttctgataccgtgtctattcaggatagcagtgaagaagatatgattgttcagaatagcaatgaaagcatttctgaacagttcagaactcgagaacaagatgttgaagtcttggagccgttaaagtgtgagttggtttctggtgagtccactggaaactgtgaggacaggctgccggtcaaggggactgaagcaaatggtaaaaaaccaagtcagcagaagaaattagaggagagaccagttaataaatgtagtgatcaaataaagctaaaaaataccactgacaaaaagaataatgaaaatcgagagtctgaaaagaaaggacagagaacaagtacatttcaaataaatggaaaagataataaacccaaaatatatttgaaaggtgaatgcttgaaagaaatttctgagagtagagtagtaagtggtaatgttgaaccaaaggttaataatataaataaaataatccctgagaatgatattaaatcattgactgttaaagaatctgctataaggccattcattaatggtgatgtcatcatggaagattttaatgaaagaaacagctccgaaacaaaatcgcatttgctgagttcttcagatgctgaaggtaactaccgagatagccttgagaccctgccatcaaccaaagagtctgacagtacacagacgaccacaccctcagcatcttgtccagaaagcaattcagttaatcaggtagaagatatggaaatagaaacctcagaagttaagaaagttacttcatcacctattacttctgaagaggaatctaatctcagtaatgactttattgatgaaaatggtctgcccatcaacaaaaatgaaaatgtcaatggagaatctaaaagaaaaaccgtcatcacagaagtcaccacgatgacctccacagtggccacagaatcaaaaactgtgatcaaggtagaaaaaggcgataagcaaactgtggtttcttccacagaaaattgtgcaaaatccactgtcacaaccaccactacaacagtgaccaagctttccacaccctccacaggcggcagtgtggacatcatctctgtaaaggagcagagcaaaaccgtggtcaccacgacagtgacagactccctgaccaccacgggaggcacactggttacatctatgactgtgagcaaagagtattccacacgagacaaagtgaaactgatgaaattttcaagaccaaagaagactcgttcaggtacagctctgccatcctatagaaaatttgttaccaagagcagcaagaagagcatttttgttttgcctaatgatgacttaaaaaagttggcccgaaaaggaggaatccgagaggtcccttattttaattacaatgcaaaacctgctttggatatatggccatatccttctcctagaccgacctttggcatcacttggaggtatagacttcagacagtaaagtccttagctggagtgagcctgatgttacggttactgtgggcaagtttgagatgggatgatatggcggccaaggctcctccaggaggagggactacacggacagaaacatccgaaactgaaatcacaacaacagaaataattaagaggagagatgttggtccttatggcattcgatctgaatattgtatcaggaaaatcatttgtcccattggagttccagaaacaccaaaagaaacgcctacacctcagaggaaaggccttcgatcaagtgcactgcggccaaagagaccagaaacgcccaagcaaactggccctgttattattgaaacctgggtagcagaagaagaactggaattgtgggagatcagggcatttgctgagagagtggagaaagaaaaggcacaagcagttgagcaacaggctaagaaacgactggagcagcagaagccgacagtgattgcaacttccactacttccccaacaagcagtacaaccagcaccatctctccagcacagaaggttatggtggcccccataagtggctcagttacaactggaaccaaaatggtactaactactaaagttggatctccagctacagtaacattccaacaaaacaagaactttcatcaaacctttgctacatgggttaagcaaggccagtcaaattcaggcgttgttcaagtacagcagaaagtcctgggtatcattccatcaagtacaggtaccagtcagcaaacctttacttcattccagcccaggacagcaacagtcacaattaggcccaatacctcaggctctggaggaaccacaagcaattcacaagtaatcacagggcctcagattcgccctggtatgaccgtgattagaacaccactccaacagtcaacactaggaaaggcaattattcgaacacctgtgatggtacagccaggtgctcctcagcaagtgatgactcaaatcatcagggggcagcctgtctccactgcagtctccgcccctaacacggtttcctcaacacctgggcagaaaagcttaacttcagcaacgtccacttcaaatatacagtcttcagcctcacaaccccctcgcccccaacaaggacaagtgaagctcaccatggctcaacttactcagttaacacagggccacggtggcaatcaaggtttgacagtagtaattcaaggacaaggtcaaactactggacagttgcagttgatacctcaaggggtgactgtactcccaggcccaggccagcagctaatgcaagctgcaatgccaaatggtactgttcagcgattcctctttaccccattggcaacaacagccaccacagccagcaccaccaccaccactgtttccacgacagcagcaggtacaggtgaacaaaggcagagtaaactgtcaccccagatgcaggtacatcaagacaaaaccctgccaccagctcagtcatcaagtgtgggtccagcagaagcccagccacagactgctcagccttcagctcagccccagccccaaacccagccccagtccccagctcagcctgaagttcagactcagcctgaagttcagacccaaacaactgtttcatcccatgtcccttctgaagcacaacccacccacgcacagtcatccaagccccaagttgcagcacagtctcagcctcaaagtaatgtccaaggacagtctcctgttcgtgtccaaagtccatcacagactcgaatacgtccatcaactccatcccaactgtctcctggacaacaatcccaggttcagactacaacctcacaaccgattccaattcaaccacatacatctcttcagataccttcccaaggccagccacagtcacaaccccaggtacagtcttcaactcaaactctttcatcaggacaaactttaaatcaagttactgtttcatccccatcccgtcctcagctacaaatacagcagccacagccccaagtcattgctgtgcctcagctgcaacaacaagtccaggttctctctcagatccagtcacaggttgtggctcagatacaggctcagcaaagtggtgtgccccagcaaatcaaactccagttacctatccaaattcagcaaagcagtgctgtgcagactcaccagattcagaatgtggttacagtgcaggcagccagtgtgcaagagcagttgcaaagggttcagcaactcagggatcagcagcaaaagaagaaacagcaacagatagaaattaagcgtgaacacaccctccaagcttctaatcaaagtgaaatcattcagaaacaggtggtgatgaagcataatgctgtaatagaacatttaaaacagaaaaagagcatgactccagctgaaagagaagagaatcaaagaatgattgtctgtaaccaggtgatgaagtatattttggataagatagataaagaagaaaaacaggcagcaaaaaaacggaagcgtgaagagagtgtggagcagaaacgtagcaagcagaatgccactaagctgtcagctctgctcttcaagcacaaagagcagctcagagccgagatcctgaagaagagagcactcctggacaaggatctgcaaattgaagtgcaggaagagctgaagagagacctgaaaattaagaaagaaaaagacctgatgcagttggctcaggccacagcagtagctgcaccctgccccccagtgacaccagctcctccagcccctccagcccctccaccttcacctccccctccacctgctgtgcaacacacaggccttctgtccacgcccaccttacctgctgcttcccagaagaggaagcgggaagaggaaaaagactccagctcaaagtccaagaaaaagaaaatgatctctactacctcaaaggaaactaagaaggacacaaagctttactgtatctgtaaaacgccttatgatgaatctaaattttatattggctgtgatcggtgtcagaattggtaccatgggcgctgcgttggcatcttgcaaagtgaggcagagctcattgatgagtatgtctgtccacagtgccagtcaacagaggatgccatgacagtgctcacgccactaacagagaaggattatgaggggttgaagagggtgctccgttccttacaggcccataagatggcctggcctttccttgaaccagtagaccctaatgatgcaccagattattatggtgttattaaggaacctatggaccttgccaccatggaagaaagagtacaaagacgatattatgaaaagctgacggaatttgtggcagatatgaccaaaatttttgataactgtcgttactacaatccaagtgactccccattttaccagtgtgcagaagttctcgaatcattctttgtacagaaattgaaaggcttcaaagctagcaggtctcataacaacaaactgcagtctacagcttct

SEQ ID NO: 5513 - DNA, 2733 bp, Homo sapiens
  source 1..2733: mol_type = genomic DNA
atgaaaggcagtaatagaaataaggatcattcagcagaaggagaaggggttggaaaacgaccaaaacgaaagtgtcttcagtggcatccattgctagcaaagaaacttcttgatttttcagaagaggaagaagaggaagacgaagaggaggatattgataaggttcaacttcttggggccgatggcctagagcaagatgttggtgaaactgaagatgatgaatcaccagagcagcgagcccggagaccaatgaatgcatttcttttattttgcaaacgccatcgctctcttgtacgtcaggaacaccccaggcttgataaccgaggtgctaccaagatactagctgattggtgggctgttcttgatccaaaggaaaagcagaaatacacagacatggccaaggagtataaggatgcatttatgaaagcaaatcctggctacaaatggtgtcctaccacaaacaagcctgtgaaatccccaacacccactgtcaatccacgaaagaaactttgggccttcccatctgactcttcaagagacttgccaagccccaagaaagcaaagactgaagaaatgcctcagcttaactttggaatggctgatcctactcaaatgggaggcctgagtatgctgctgttagctggagaacatgctcttggcacaccagaggtatcctctggcacatgcaggcctgatgtttcagaatctcctgaattacgtcagaagtcaccattgtttcagtttgccgagatatcttcaagtacgtcccactctgatgcttctacaaagcagtgtcaaacatctgccttgtttcagtttgcagagatttcttcaaacacttcgcagttgggtggtgctgagcctgtaaaacgctgtggaaagtctgcactctttcaactggcagagatgtgcctggcatcagaagggatgaaaatggaagaatcaaagctaataaaagcaaaagaatccgatggtggaagaattaaagaattagagaagggaaaggaagaaaaagaaattaaaatggagaaaacagatgaaactaggttacagaaggaagcagaatttgaaaaatcggctaaggaaaatttaagagattctaaggaattgagaaattttgaggcattgcaaatagatgacataatggctataaaaatggaagatcccaaagaaattagaaaggaagagttagaagaagatcacaaatgtagtcattttcctgatttttcttattctgccagtagcaagataataattagtgatgttcccagtagaaaggatcatatgtgccatcctcatggaattatgatcattgaggatcccgcagcattaaacaagccagaaaagctaaaaaagaaaaagaagaaaagcaaaatggatcgacatggaaatgataaatccacacccaagaagacttgcaaaaagaggcagtcttcggaatctgacattgagagcgtcatatataccattgaagccgtcgcaaaaggagactggggcatagagaaacttggagatacccctcgcaagaaggtccgcacatcctcaagtggcaagggaagcattttggatgccaagccaccaaagaaaaaagtgaaatcaagagagaagaaaatgtcaaaggagaaatcctcagacaccaccaaagagtcaagacctccagatttcattagtatttctgctagcaagaacatttctggtgagacaccagagggtataaaagcagaaccattgacccctatggaagatgcactaccacccagcctatcaggacaggccaagcctgaggacagtgactgtcacagaaaaatagaaacttgtggttccaggaaatccgagaggtcttgcaaaggtgctctttataaaaccctggtgtctgagggcatgctcacctctctgcgagctaatgttgacagaggaaaacgaagctcaggaaaaggaaactcctctgatcatgaagggtgttggaatgaagaaagctggacatttagtcagagtgggaccagtgggagcaagaagttcaagaagacaaagccaaaagaagactgtctccttggctccgcaaagctggatgaagaatttgaaaaaaaattcaacagcctccctcaatatagtcctgttacatttgaccggaaatgtgtacctgtcccaagaaaaaagaagaagactggaaatgtgtcctcagaaccgactaaaaccagcaaaggaagtggggataaatggtcaaacaagcaactcttcttggatgccattcaccctacagaagccatattttcagaagacagaaacaccatggagcctgttcataaggttaaaaatatcccatccattttcaacactccagagccaacaacaacgcaagaacctttggtgggcagccaaaagagaaaagcaaggaaaaccaagattacacaccttgtcaggacagcagatggccgggtatcaccagcaggaggtactttggatgacaaaccaaaggaacaactgcagaggagtctccctaaagcaactgagacagactgcaatgacaaatgctcacacaacaccgaggtcggggagacgcggagcagtactccagaaatgcctgccgtgtctgcgttctttagcctcgctgcgctggctgaagtggcagccatggaaaatgtgcacagaggtcagaggtcaactccgctcacccatgatggacagccaaaagaaatgccgcaggctcctgtacttatttcctgcgctgaccag

SEQ ID NO: 5514 - DNA, 2823 bp, Homo sapiens
  source 1..2823: mol_type = genomic DNA
atgaaaggcagtaatagaaataaggatcattcagcagaaggagaaggggttggaaaacgaccaaaacgaaagtgtcttcagtggcatccattgctagcaaagaaacttcttgatttttcagaagaggaagaagaggaagacgaagaggaggatattgataaggttcaacttcttggggccgatggcctagagcaagatgttggtgaaactgaagatgatgaatcaccagagcagcgagcccggagaccaatgaatgcatttcttttattttgcaaacgccatcgctctcttgtacgtcaggaacaccccaggcttgataaccgaggtgctaccaagatactagctgattggtgggctgttcttgatccaaaggaaaagcagaaatacacagacatggccaaggagtataaggatgcatttatgaaagcaaatcctggctacaaatggtgtcctaccacaaacaagcctgtgaaatccccaacacccactgtcaatccacgaaagaaactttgggccttcccatctgactcttcaagagacttgccaagccccaagaaagcaaagactgaagaaatgcctcagcttaactttggaatggctgatcctactcaaatgggaggcctgagtatgctgctgttagctggagaacatgctcttggcacaccagaggtatcctctggcacatgcaggcctgatgtttcagaatctcctgaattacgtcagaagtcaccattgtttcagtttgccgagatatcttcaagtacgtcccactctgatgcttctacaaagcagtgtcaaacatctgccttgtttcagtttgcagagatttcttcaaacacttcgcagttgggtggtgctgagcctgtaaaacgctgtggaaagtctgcactctttcaactggcagagatgtgcctggcatcagaagggatgaaaatggaagaatcaaagctaataaaagcaaaagaatccgatggtggaagaattaaagaattagagaagggaaaggaagaaaaagaaattaaaatggagaaaacagatgaaactaggttacagaaggaagcagaatttgaaaaatcggctaaggaaaatttaagagattctaaggaattgagaaattttgaggcattgcaaatagatgacataatggctataaaaatggaagatcccaaagaaattagaaaggaagagttagaagaagatcacaaatgtagtcattttcctgatttttcttattctgccagtagcaagataataattagtgatgttcccagtagaaaggatcatatgtgccatcctcatggaattatgatcattgaggatcccgcagcattaaacaagccagaaaagctaaaaaagaaaaagaagaaaagcaaaatggatcgacatggaaatgataaatccacacccaagaagacttgcaaaaagaggcagtcttcggaatctgacattgagagcgtcatatataccattgaagccgtcgcaaaaggagactggggcatagagaaacttggagatacccctcgcaagaaggtccgcacatcctcaagtggcaagggaagcattttggatgccaagccaccaaagaaaaaagtgaaatcaagagagaagaaaatgtcaaaggagaaatcctcagacaccaccaaagagtcaagacctccagatttcattagtatttctgctagcaagaacatttctggtgagacaccagagggtataaaagcagaaccattgacccctatggaagatgcactaccacccagcctatcaggacaggccaagcctgaggacagtgactgtcacagaaaaatagaaacttgtggttccaggaaatccgagaggtcttgcaaaggtgctctttataaaaccctggtgtctgagggcatgctcacctctctgcgagctaatgttgacagaggaaaacgaagctcaggaaaaggaaactcctctgatcatgaagggtgttggaatgaagaaagctggacatttagtcagagtgggaccagtgggagcaagaagttcaagaagacaaagccaaaagaagactgtctccttggctccgcaaagctggatgaagaatttgaaaaaaaattcaacagcctccctcaatatagtcctgttacatttgaccggaaatgtgtacctgtcccaagaaaaaagaagaagactggaaatgtgtcctcagaaccgactaaaaccagcaaaggtcctttccagtctcagaaaaagaacttattccacaaaattgtcagcaaatataagcacaaaaaggagaagcccaatgttccggaaaaaggaagtggggataaatggtcaaacaagcaactcttcttggatgccattcaccctacagaagccatattttcagaagacagaaacaccatggagcctgttcataaggttaaaaatatcccatccattttcaacactccagagccaacaacaacgcaagaacctttggtgggcagccaaaagagaaaagcaaggaaaaccaagattacacaccttgtcaggacagcagatggccgggtatcaccagcaggaggtactttggatgacaaaccaaaggaacaactgcagaggagtctccctaaagcaactgagacagactgcaatgacaaatgctcacacaacaccgaggtcggggagacgcggagcagtactccagaaatgcctgccgtgtctgcgttctttagcctcgctgcgctggctgaagtggcagccatggaaaatgtgcacagaggtcagaggtcaactccgctcacccatgatggacagccaaaagaaatgccgcaggctcctgtacttatttcctgcgctgaccag

SEQ ID NO: 5515 - DNA, 552 bp, Homo sapiens
  source 1..552: mol_type = genomic DNA
atggagggagagaggaagaacaacaacaaacggtggtatttcactcgagaacagctggaaaatagcccatcccgtcgttttggcgtggacccagataaagaactttcttatcgccagcaggcggccaatctgcttcaggacatggggcagcgtcttaacgtctcacaattgactatcaacactgctatagtatacatgcatcgattctacatgattcagtccttcacacagttccctggaaattctgtggctccagcagccttgtttctagcagctaaagtggaggagcagcccaaaaaattggaacatgtcatcaaggtagcacatacttgtctccatcctcaggaatcccttcctgatactagaagtgaggcttatttgcaacaagttcaagatctggtcattttagaaagcataattttgcagactttaggctttgaactaacaattgatcacccacatactcatgtagtaaagtgcactcaacttgttcgagcaagcaaggacttagcacagacttcttacttcatggcaaccaacagaactgacaca

SEQ ID NO: 5516 - DNA, 2178 bp, Homo sapiens
  source 1..2178: mol_type = genomic DNA
atggagggagagaggaagaacaacaacaaacggtggtatttcactcgagaacagctggaaaatagcccatcccgtcgttttggcgtggacccagataaagaactttcttatcgccagcaggcggccaatctgcttcaggacatggggcagcgtcttaacgtctcacaattgactatcaacactgctatagtatacatgcatcgattctacatgattcagtccttcacacagttccctggaaattctgtggctccagcagccttgtttctagcagctaaagtggaggagcagcccaaaaaattggaacatgtcatcaaggtagcacatacttgtctccatcctcaggaatcccttcctgatactagaagtgaggcttatttgcaacaagttcaagatctggtcattttagaaagcataattttgcagactttaggctttgaactaacaattgatcacccacatactcatgtagtaaagtgcactcaacttgttcgagcaagcaaggacttagcacagacttcttacttcatggcaaccaacagcctgcatttgaccacatttagcctgcagtacacacctcctgtggtggcctgtgtctgcattcacctggcttgcaagtggtccaattgggagatcccagtctcaactgacgggaagcactggtgggagtatgttgacgccactgtgaccttggaacttttagatgaactgacacatgagtttctacagattttggagaaaactcccaacaggctcaaacgcatttggaattggagggcatgcgaggctgccaagaaaacaaaagcagatgaccgaggaacagatgaaaagacttcagagcagacaatcctcaatatgatttcccagagctcttcagacacaaccattgcaggtttaatgagcatgtcaacttctaccacaagtgcagtgccttccctgccagtctccgaagagtcatccagcaacttaaccagtgtggagatgttgccgggcaagcgttggctgtcctcccaaccttctttcaaactagaacctactcagggtcatcggactagtgagaatttagcacttacaggagttgatcattccttaccacaggatggttcaaatgcatttatttcccagaagcagaatagtaagagtgtgccatcagctaaagtgtcactgaaagaataccgcgcgaagcatgcagaagaattggctgcccagaagaggcaactggagaacatggaagccaatgtgaagtcacaatatgcatatgctgcccagaatctcctttctcatcatgatagccattcttcagtcattctaaaaatgcccatagagggttcagaaaaccccgagcggccttttctggaaaaggctgacaaaacagctctcaaaatgagaatcccagtggcaggtggagataaagctgcgtcttcaaaaccagaggagataaaaatgcgcataaaagtccatgctgcagctgataagcacaattctgtagaggacagtgttacaaagagccgagagcacaaagaaaagcacaagactcacccatctaatcatcatcatcatcataatcaccactcacacaagcactctcattcccaacttccagttggtactgggaacaaacgtcctggtgatccaaaacatagtagccagacaagcaacttagcacataaaacctatagcttgtctagttctttttcctcttccagttctactcgtaaaaggggaccctctgaagagactggaggggctgtgtttgatcatccagccaagattgccaagagtactaaatcctcttccctaaatttctccttcccttcacttcctacaatgggtcagatgcctgggcatagctcagacacaagtggcctttccttttcacagcccagctgtaaaactcgtgtccctcattcgaaactggataaagggcccactggggccaatggtcacaacacgacccagacaatagactatcaagacactgtgaatatgcttcactccctgctcagtgcccagggtgttcagcccactcagcccactgcatttgaatttgttcgtccttatagtgactatctgaatcctcggtctggtggaatctcctcgagatctggcaatacagacaaaccccggccaccacctctgccatcagaacctcctccaccacttccaccccttcctaag

SEQ ID NO: 5517 - DNA, 1989 bp, Homo sapiens
  source 1..1989: mol_type = genomic DNA
atggcgtcgggccgtggagcttcttctcgctggttctttactcgggaacagctggagaacacgccgagccgccgctgcggagtggaggcggataaagagctctcgtgccgccagcaggcggccaacctcatccaggagatgggacagcgtctcaatgtctctcagcttacaataaacactgcgattgtttatatgcacaggttttatatgcaccattctttcaccaaattcaacaaaaatataatatcgtctactgcattatttttggctgcaaaagtggaagaacaggctcgaaaacttgaacatgttatcaaagtagcacatgcttgtcttcatcctctagagccactgctggatactaaatgtgatgcttaccttcaacagactcaagaactggttatacttgaaaccataatgctacaaactctaggttttgagatcaccattgaacacccacacacagatgtggtgaaatgtacccagttagtaagagcaagcaaggatttggcacagacatcctatttcatggctaccaacagtctgcatcttacaaccttctgtcttcagtacaaaccaacagtgatagcatgtgtatgcattcatttggcttgcaaatggtccaattgggagatccctgtatcaactgatggaaagcattggtgggaatatgtggatcctacagttactctagaattattagatgagctaacacatgagtttctacaaatattggagaaaacgcctaataggttgaagaagattcgaaactggagggctaatcaggcagctaggaaaccaaaagtagatggacaggtatcagagacaccacttcttggttcatctttggtccagaattccattttagtagatagtgtcactggtgtgcctacaaacccaagttttcagaaaccatctacatcagcattccctgcgccagtacctctaaattcaggaaatatttctgttcaagacagccatacatctgataatttgtcaatgctagcaacaggaatgccaagtacttcatacggtttatcatcacaccaggaatggcctcaacatcaagactcagcaaggacagaacagctatattcacagaaacaggagacatctttgtctggtagccagtacaacatcaacttccagcagggaccttctatatcactgcattcaggattacatcacagacctgacaaaatttcagatcattcttctgttaagcaagaatatactcataaagcagggagcagtaaacaccatgggccaatttccactactccaggaataattcctcagaaaatgtctttagataaatatagagaaaagcgtaaactagaaactcttgatctcgatgtaagggatcattatatagctgcccaggtagaacagcagcacaaacaagggcagtcacaggcagccagcagcagttctgttacttctcccattaaaatgaaaatacctatcgcaaatactgaaaaatacatggcagacaaaaaggaaaagagtgggtcactgaaattacggattccaataccacccactgataaaagcgccagtaaagaagaactgaaaatgaaaataaaagtttcttcttcagaaagacacagctcttctgatgaaggcagtgggaagagcaaacattcaagcccacatattagcagagaccataaggagaagcacaaggagcatccttcaagccgccaccacaccagcagccacaagcattcccactcgcatagtggcagcagcagcggtggcagtaaacacagtgccgacggaataccacccactgttctgaggagtcctgttggcctgagcagtgatggcatttcctctagctccagctcttcaaggaagaggctgcatgtcaatgatgcatctcacaaccaccactccaaaatgagcaaaagttccaaaagttcaggtgggctacggacatctcagcaccctcgtgaaactggacaagaagccagtggagaccaacggtcc

SEQ ID NO: 5518 - DNA, 2190 bp, Homo sapiens
  source 1..2190: mol_type = genomic DNA
atggcgtcgggccgtggagcttcttctcgctggttctttactcgggaacagctggagaacacgccgagccgccgctgcggagtggaggcggataaagagctctcgtgccgccagcaggcggccaacctcatccaggagatgggacagcgtctcaatgtctctcagcttacaataaacactgcgattgtttatatgcacaggttttatatgcaccattctttcaccaaattcaacaaaaatataatatcgtctactgcattatttttggctgcaaaagtggaagaacaggctcgaaaacttgaacatgttatcaaagtagcacatgcttgtcttcatcctctagagccactgctggatactaaatgtgatgcttaccttcaacagactcaagaactggttatacttgaaaccataatgctacaaactctaggttttgagatcaccattgaacacccacacacagatgtggtgaaatgtacccagttagtaagagcaagcaaggatttggcacagacatcctatttcatggctaccaacagtctgcatcttacaaccttctgtcttcagtacaaaccaacagtgatagcatgtgtatgcattcatttggcttgcaaatggtccaattgggagatccctgtatcaactgatggaaagcattggtgggaatatgtggatcctacagttactctagaattattagatgagctaacacatgagtttctacaaatattggagaaaacgcctaataggttgaagaagattcgaaactggagggctaatcaggcagctaggaaaccaaaagtagatggacaggtatcagagacaccacttcttggttcatctttggtccagaattccattttagtagatagtgtcactggtgtgcctacaaacccaagttttcagaaaccatctacatcagcattccctgcgccagtacctctaaattcaggaaatatttctgttcaagacagccatacatctgataatttgtcaatgctagcaacaggaatgccaagtacttcatacggtttatcatcacaccaggaatggcctcaacatcaagactcagcaaggacagaacagctatattcacagaaacaggagacatctttgtctggtagccagtacaacatcaacttccagcagggaccttctatatcactgcattcaggattacatcacagacctgacaaaatttcagatcattcttctgttaagcaagaatatactcataaagcagggagcagtaaacaccatgggccaatttccactactccaggaataattcctcagaaaatgtctttagataaatatagagaaaagcgtaaactagaaactcttgatctcgatgtaagggatcattatatagctgcccaggtagaacagcagcacaaacaagggcagtcacaggcagccagcagcagttctgttacttctcccattaaaatgaaaatacctatcgcaaatactgaaaaatacatggcagacaaaaaggaaaagagtgggtcactgaaattacggattccaataccacccactgataaaagcgccagtaaagaagaactgaaaatgaaaataaaagtttcttcttcagaaagacacagctcttctgatgaaggcagtgggaagagcaaacattcaagcccacatattagcagagaccataaggagaagcacaaggagcatccttcaagccgccaccacaccagcagccacaagcattcccactcgcatagtggcagcagcagcggtggcagtaaacacagtgccgacggaataccacccactgttctgaggagtcctgttggcctgagcagtgatggcatttcctctagctccagctcttcaaggaagaggctgcatgtcaatgatgcatctcacaaccaccactccaaaatgagcaaaagttccaaaagttcaggtagttcatctagttcttcctcctctgttaagcagtatatatcctctcacaactctgtttttaaccatcccttaccccctcctccccctgtcacataccaggtgggctacggacatctcagcaccctcgtgaaactggacaagaagccagtggagaccaacggtcctgatgccaatcacgagtacagtacaagcagccagcatatggactacaaagacacattcgacatgctggactcactgttaagtgcccaaggaatgaacatg

SEQ ID NO: 5519 - DNA, 1062 bp, Homo sapiens
  source 1..1062: mol_type = genomic DNA
atgaggcatagcctgaccaagctgctggcagcctcgggcagcaactccccaacccgcagtgagagcccggagccggctgcaacttgttcgctgccctctgacctgacccgggctgcagcgggggaggaggagacggcggcggccggatctcccggccgcaagcagcagtttggcgacgaaggagagttggaagccgggagggggagccgcggcggcgtggccgtgcgcgcgccctcccccgaggagatggaggaggaggcgatcgccagcctcccgggggaagagacggaggatatggactttctgtctgggctggaactggcggatctcctggaccccaggcaaccggactggcacctggaccccgggcttagctcgccggggcctctctcctcgtctggcggaggctcggatagcggcggcctgtggagaggggacgatgacgatgaggccgcggctgctgaaatgcagcgcttctctgacctgctgcaaaggctgttaaacggtatcggaggctgcagcagcagcagtgacagtggcagcgccgaaaagaggcggagaaagtccccaggaggaggcggcggtggcggcagcggtaacgacaacaaccaggcggcgacaaagagtccccggaaggcggcggcggccgctgcccgccttaatcgactgaagaagaaggagtacgtgatggggctggagagtcgagtccggggtctggcagccgagaaccaggagctgcgggccgagaatcgggagctgggcaaacgcgtacaggcactgcaggaggagagtcgctacctacgggcagtcttagccaacgagactggactggctcgcttgctgagccggctgagcggcgtgggactgcggctgaccacctcgctcttcagagactcgcccgccggtgaccacgactacgctctgccggtgggaaagcagaagcaggacctgctggaagaggacgactcggcgggaggagtctgtctccatgtggacaaggataaggtgtcggtggagttctgctcggcgtgcgcccggaaggcgtcgtcttctcttaaaatg

SEQ ID NO: 5520 - DNA, 1074 bp, Homo sapiens
  source 1..1074: mol_type = genomic DNA
atgaggcatagcctgaccaagctgctggcagcctcgggcagcaactccccaacccgcagtgagagcccggagccggctgcaacttgttcgctgccctctgacctgacccgggctgcagcgggggaggaggagacggcggcggccggatctcccggccgcaagcagcagtttggcgacgaaggagagttggaagccgggagggggagccgcggcggcgtggccgtgcgcgcgccctcccccgaggagatggaggaggaggcgatcgccagcctcccgggggaagagacggaggatatggactttctgtctgggctggaactggcggatctcctggaccccaggcaaccggactggcacctggaccccgggcttagctcgccggggcctctctcctcgtctggcggaggctcggatagcggcggcctgtggagaggggacgatgacgatgaggccgcggctgctgaaatgcagcgcttctctgacctgctgcaaaggctgttaaacggtatcggaggctgcagcagcagcagtgacagtggcagcgccgaaaagaggcggagaaagtccccaggaggaggcggcggtggcggcagcggtaacgacaacaaccaggcggcgacaaagagtccccggaaggcggcggcggccgctgcccgccttaatcgactgaagaagaaggagtacgtgatggggctggagagtcgagtccggggtctggcagccgagaaccaggagctgcgggccgagaatcgggagctgggcaaacgcgtacaggcactgcaggaggagagtcgctacctacgggcagtcttagccaacgagactggactggctcgcttgctgagccggctgagcggcgtgggactgcggctgaccacctcgctcttcagagactcgcccgccggtgaccacgactacgctctgccggtgggaaagcagaagcaggacctgctggaagaggacgactcggcgggaggagtctgtctccatgtggacaaggataaggtgtcggtggagttctgctcggcgtgcgcccggaaggcgtcgtcttctcttaaaattttcttttttagg

SEQ ID NO: 5521 - DNA, 2259 bp, Homo sapiens
  source 1..2259: mol_type = genomic DNA
atggagagagccagacccgagccgccgcctcagccgcgcccgttgcgtcccgctccgcccccgctgccggtcgagggcacctccttttgggcagcagccatggagccccctccgtcgtctcccacactgagcgcggcagccagtgcgaccttggcctcgtcgtgcggggaggcagtggcgtccggcttacagcccgcggtgcggcggctgctgcaggtgaagccagagcaggtgttgctgctaccacagcctcaggcccagaacgaggaagccgctgcctcgtccgcgcaggcgcggctgttgcagttcaggcccgacctgcggctcctgcagccgccgacagcgtcagacggcgccacctccaggcccgagttgcacccggtgcagcccctggcgctgcatgtcaaggccaagaagcagaagctggggcccagcctggatcagtcagtggggcctcgaggggccgtcgaaaccggtcctagagcctccagggtggtcaagttggaaggccccgggccggccctcggctacttccgaggggacgagaagggcaagctggaggcggaggaggtcatgagagactcgatgcaaggcggggcaggcaaaagcccggcagccatccgagaaggtgtgatcaaaacggaggaacccgagagactcctcgaggactgcaggctcggcgcggagcccgcgtccaatggcctggttcatggcagcgcggaggtcatcttggccccaacgtccggtgcctttgggccgcaccagcaagaccttaggatccctttgacgctccacacggtcccccctggggcccggatccagtttcagggagctccgccttcagagctgataagattgaccaaggtccccctgacaccagtgcctactaaaatgcagtccctactggagccttctgtaaaaattgaaaccaaagatgtcccgctcaccgtgttgccctcagatgcaggcataccagatactcccttcagtaaggacagaaatggtcatgtgaagcgacccatgaacgcatttatggtttgggcaaggatccaccgaccagcactagccaaagctaacccagcagccaacaatgcagaaatcagtgtccagcttgggttagagtggaacaaacttagtgaagaacaaaagaaaccctattacgatgaagcacaaaagattaaggaaaagcacagagaggaatttcctggttgggtttatcagcctcgtccagggaagcgaaaacgattccctctaagtgtttccaatgtattttctggtaccacacagaatatcatctctacaaatcctacaacagtttatccttaccgctcacctacgtactctgtggtaattcccagcctacagaatcccatcactcatccagttggtgaaacctcacctgctatccagctgcccacacctgcagtccagagcccaagccctgtcacacttttccagcccagcgtctccagtgctgctcaggtggctgtccaggatccaagtctacctgtctatccagcactcccaccccaacgctttactgggccttcccaaacagacactcatcagctgcattctgaagccactcacactgtgaagcaacccactcctgtctctctagagagcgccaacaggatttcaagtagtgcaagtactgcccatgccagatttgcaacttcgaccatccaacctcctagggagtattccagcgtttccccttgtcccagaagtgctccaatcccccaggcttctcccattccacacccacatgtctaccagccccctccccttggccatccagccacactgttcgggacaccaccaagattctcttttcatcacccttacttcctacccggacctcactacttcccatcaagtacatgcccttacagtcggcctccctttggctatggaaattttccgagttcaatgccagaatgccttagttattatgaagacaggtacccaaaacatgagggtatcttttcaactttaaatagagactattcttttagagactactcaagtgaatgcacacacagtgaaaattctcggagttgtgagaacatgaatggaacttcttactataacagtcatagccacagtggggaagaaaacttaaaccctgtgcctcagctggacattggaaccttggagaatgtcttcacagccccgacatcaactccttctagcatccagcaagtcaatgtcaccgacagtgatgaggaggaagaagaaaaagtgctcagggattta

SEQ ID NO: 5522 - DNA, 1503 bp, Homo sapiens
  source 1..1503: mol_type = genomic DNA
atggagagagccagacccgagccgccgcctcagccgcgcccgttgcgtcccgctccgcccccgctgccggtcgagggcacctccttttgggcagcagccatggagccccctccgtcgtctcccacactgagcgcggcagccagtgcgaccttggcctcgtcgtgcggggaggcagtggcgtccggcttacagcccgcggtgcggcggctgctgcaggtgaagccagagcaggtgttgctgctaccacagcctcaggcccagaacgaggaagccgctgcctcgtccgcgcaggcgcggctgttgcagttcaggcccgacctgcggctcctgcagccgccgacagcgtcagacggcgccacctccaggcccgagttgcacccggtgcagcccctggcgctgcatgtcaaggccaagaagcagaagctggggcccagcctggatcagtcagtggggcctcgaggggccgtcgaaaccggtcctagagcctccagggtggtcaagttggaaggccccgggccggccctcggctacttccgaggggacgagaagggcaagctggaggcggaggaggtcatgagagactcgatgcaaggcggggcaggcaaaagcccggcagccatccgagaaggtgtgatcaaaacggaggaacccgagagactcctcgaggactgcaggctcggcgcggagcccgcgtccaatggcctggttcatggcagcgcggaggtcatcttggccccaacgtccggtgcctttgggccgcaccagcaagaccttaggatccctttgacgctccacacggtcccccctggggcccggatccagtttcagggagctccgccttcagagctgataagattgaccaaggtccccctgacaccagtgcctactaaaatgcagtccctactggagccttctgtaaaaattgaaaccaaagatgtcccgctcaccgtgttgccctcagatgcaggcataccagatactcccttcagtaaggacagaaatggtcatgtgaagcgacccatgaacgcatttatggtttgggcaaggatccaccgaccagcactagccaaagctaacccagcagccaacaatgcagaaatcagtgtccagcttgggttagagtggaacaaacttagtgaagaacaaaagaaaccctattacgatgaagcacaaaagattaaggaaaagcacagagaggaatttcctggttgggtttatcagcctcgtccagggaagcgaaaacgattccctctaagtgtttccaatgtattttctggtaccacacagaatatcatctctacaaatcctacaacagtttatccttaccgctcacctacgtactctgtggtaattcccagcctacagaatcccatcactcatccagttgtacatgcccttacagtcggcctccctttggctatggaaattttccgagttcaatgccagaatgccttagttattatgaagacaggtacccaaaacatgagggtatcttttcaactt

SEQ ID NO: 5523 - DNA, 1344 bp, Homo sapiens
  source 1..1344: mol_type = genomic DNA
atggagaaatgttgtagagggaaggaacaaagtctactgtgcatccagcaaggcataccagatactcccttcagtaaggacagaaatggtcatgtgaagcgacccatgaacgcatttatggtttgggcaaggatccaccgaccagcactagccaaagctaacccagcagccaacaatgcagaaatcagtgtccagcttgggttagagtggaacaaacttagtgaagaacaaaagaaaccctattacgatgaagcacaaaagattaaggaaaagcacagagaggaatttcctggttgggtttatcagcctcgtccagggaagcgaaaacgattccctctaagtgtttccaatgtattttctggtaccacacagaatatcatctctacaaatcctacaacagtttatccttaccgctcacctacgtactctgtggtaattcccagcctacagaatcccatcactcatccagttggtgaaacctcacctgctatccagctgcccacacctgcagtccagagcccaagccctgtcacacttttccagcccagcgtctccagtgctgctcaggtggctgtccaggatccaagtctacctgtctatccagcactcccaccccaacgctttactgggccttcccaaacagacactcatcagctgcattctgaagccactcacactgtgaagcaacccactcctgtctctctagagagcgccaacaggatttcaagtagtgcaagtactgcccatgccagatttgcaacttcgaccatccaacctcctagggagtattccagcgtttccccttgtcccagaagtgctccaatcccccaggcttctcccattccacacccacatgtctaccagccccctccccttggccatccagccacactgttcgggacaccaccaagattctcttttcatcacccttacttcctacccggacctcactacttcccatcaagtacatgcccttacagtcggcctccctttggctatggaaattttccgagttcaatgccagaatgccttagttattatgaagacaggtacccaaaacatgagggtatcttttcaactttaaatagagactattcttttagagactactcaagtgaatgcacacacagtgaaaattctcggagttgtgagaacatgaatggaacttcttactataacagtcatagccacagtggggaagaaaacttaaaccctgtgcctcagctggacattggaaccttggagaatgtcttcacagccccgacatcaactccttctagcatccagcaagtcaatgtcaccgacagtgatgaggaggaagaagaaaaagtgctcagggattta

SEQ ID NO: 5524 - DNA, 1596 bp, Homo sapiens
  source 1..1596: mol_type = genomic DNA
atgctcctggacgcgggtccgcagttcccggccatcggggtgggcagcttcgcgcgccaccatcaccactccgccgcggcggcggcggcggctgccgccgagatgcaggaccgtgaactgagcctggcggcggcgcagaacggcttcgttgactccgccgccgcgcacatgggagccttcaagctcaacccgggcgcgcacgagctgtccccgggccagagctcggcgttcacgtcgcagggccccggcgcctaccccggctccgctgcggctgccgctgcggccgcagcgctcgggccccacgccgcgcacgttggctcctactctgggccgcccttcaactccacccgggacttcctgttccgcagccgcggcttcggggactcggcgccgggcggcgggcagcacgggctgttcgggccgggcgcgggcggcctgcaccacgcgcactcggacgcgcagggccacctcctcttcccgggcctgccagagcagcacgggccgcacggctcgcagaatgtgctcaacgggcagatgcgcctcgggctgcccggcgaggtgttcgggcgctcggagcaataccgccaggtggccagcccgcggaccgacccctactcggcggcgcaactccacaaccagtacggccccatgaatatgaacatgggtatgaacatggcagcagccgcggcccaccaccaccaccaccaccaccaccaccccggtgcctttttccgctatatgcggcagcagtgcatcaagcaggagctaatctgcaagtggatcgaccccgagcaactgagcaatcccaagaagagctgcaacaaaactttcagcaccatgcacgagctggtgacacacgtctcggtggagcacgtcggcggcccggagcagagcaaccacgtctgcttctgggaggagtgtccgcgcgagggcaagcccttcaaggccaaatacaaactggtcaaccacatccgcgtgcacacaggcgagaaacccttcccctgccccttcccgggctgtggcaaagtcttcgcgcgctccgagaacctcaagatccacaaaaggacccacacaggggagaagccgttccagtgtgagtttgagggctgcgaccggcgcttcgccaacagcagcgacaggaagaagcacatgcacgtccacacctccgataagccctatctctgcaagatgtgcgacaagtcctacacgcaccccagctcgctgcggaagcacatgaaggtccatgagtcctccccgcagggctctgaatcctccccggccgccagctccggctatgagtcgtccacgcccccggggctggtgtcccccagcgccgagccccagagcagctccaacctgtccccagcggcggcggcagcggcggcggcggctgcggcggcggcggccgcggtgtccgcggtgcaccggggcggaggctcgggcagtggcggcgcgggaggcggctcaggcggcggcagcggcagtggcgggggcggcggcggggcgggcggcgggggcggcggcagctctggcgggggcagcgggacagccgggggtcacagcggcctctcctccaacttcaatgaatggtacgtg

SEQ ID NO: 5525 - DNA, 5589 bp, Homo sapiens
  source 1..5589: mol_type = genomic DNA
atggatttatctgctcttcgcgttgaagaagtacaaaatgtcattaatgctatgcagaaaatcttagagtgtcccatctgtctggagttgatcaaggaacctgtctccacaaagtgtgaccacatattttgcaaattttgcatgctgaaacttctcaaccagaagaaagggccttcacagtgtcctttatgtaagaatgatataaccaaaaggagcctacaagaaagtacgagatttagtcaacttgttgaagagctattgaaaatcatttgtgcttttcagcttgacacaggtttggagtatgcaaacagctataattttgcaaaaaaggaaaataactctcctgaacatctaaaagatgaagtttctatcatccaaagtatgggctacagaaaccgtgccaaaagacttctacagagtgaacccgaaaatccttccttgcaggaaaccagtctcagtgtccaactctctaaccttggaactgtgagaactctgaggacaaagcagcggatacaacctcaaaagacgtctgtctacattgaattgggatctgattcttctgaagataccgttaataaggcaacttattgcagtgtgggagatcaagaattgttacaaatcacccctcaaggaaccagggatgaaatcagtttggattctgcaaaaaaggctgcttgtgaattttctgagacggatgtaacaaatactgaacatcatcaacccagtaataatgatttgaacaccactgagaagcgtgcagctgagaggcatccagaaaagtatcagggtagttctgtttcaaacttgcatgtggagccatgtggcacaaatactcatgccagctcattacagcatgagaacagcagtttattactcactaaagacagaatgaatgtagaaaaggctgaattctgtaataaaagcaaacagcctggcttagcaaggagccaacataacagatgggctggaagtaaggaaacatgtaatgataggcggactcccagcacagaaaaaaaggtagatctgaatgctgatcccctgtgtgagagaaaagaatggaataagcagaaactgccatgctcagagaatcctagagatactgaagatgttccttggataacactaaatagcagcattcagaaagttaatgagtggttttccagaagtgatgaactgttaggttctgatgactcacatgatggggagtctgaatcaaatgccaaagtagctgatgtattggacgttctaaatgaggtagatgaatattctggttcttcagagaaaatagacttactggccagtgatcctcatgaggctttaatatgtaaaagtgaaagagttcactccaaatcagtagagagtaatattgaagacaaaatatttgggaaaacctatcggaagaaggcaagcctccccaacttaagccatgtaactgaaaatctaattataggagcatttgttactgagccacagataatacaagagcgtcccctcacaaataaattaaagcgtaaaaggagacctacatcaggccttcatcctgaggattttatcaagaaagcagatttggcagttcaaaagactcctgaaatgataaatcagggaactaaccaaacggagcagaatggtcaagtgatgaatattactaatagtggtcatgagaataaaacaaaaggtgattctattcagaatgagaaaaatcctaacccaatagaatcactcgaaaaagaatctgctttcaaaacgaaagctgaacctataagcagcagtataagcaatatggaactcgaattaaatatccacaattcaaaagcacctaaaaagaataggctgaggaggaagtcttctaccaggcatattcatgcgcttgaactagtagtcagtagaaatctaagcccacctaattgtactgaattgcaaattgatagttgttctagcagtgaagagataaagaaaaaaaagtacaaccaaatgccagtcaggcacagcagaaacctacaactcatggaaggtaaagaacctgcaactggagccaagaagagtaacaagccaaatgaacagacaagtaaaagacatgacagcgatactttcccagagctgaagttaacaaatgcacctggttcttttactaagtgttcaaataccagtgaacttaaagaatttgtcaatcctagccttccaagagaagaaaaagaagagaaactagaaacagttaaagtgtctaataatgctgaagaccccaaagatctcatgttaagtggagaaagggttttgcaaactgaaagatctgtagagagtagcagtatttcattggtacctggtactgattatggcactcaggaaagtatctcgttactggaagttagcactctagggaaggcaaaaacagaaccaaataaatgtgtgagtcagtgtgcagcatttgaaaaccccaagggactaattcatggttgttccaaagataatagaaatgacacagaaggctttaagtatccattgggacatgaagttaaccacagtcgggaaacaagcatagaaatggaagaaagtgaacttgatgctcagtatttgcagaatacattcaaggtttcaaagcgccagtcatttgctccgttttcaaatccaggaaatgcagaagaggaatgtgcaacattctctgcccactctgggtccttaaagaaacaaagtccaaaagtcacttttgaatgtgaacaaaaggaagaaaatcaaggaaagaatgagtctaatatcaagcctgtacagacagttaatatcactgcaggctttcctgtggttggtcagaaagataagccagttgataatgccaaatgtagtatcaaaggaggctctaggttttgtctatcatctcagttcagaggcaacgaaactggactcattactccaaataaacatggacttttacaaaacccatatcgtataccaccactttttcccatcaagtcatttgttaaaactaaatgtaagaaaaatctgctagaggaaaactttgaggaacattcaatgtcacctgaaagagaaatgggaaatgagaacattccaagtacagtgagcacaattagccgtaataacattagagaaaatgtttttaaagaagccagctcaagcaatattaatgaagtaggttccagtactaatgaagtgggctccagtattaatgaaataggttccagtgatgaaaacattcaagcagaactaggtagaaacagagggccaaaattgaatgctatgcttagattaggggttttgcaacctgaggtctataaacaaagtcttcctggaagtaattgtaagcatcctgaaataaaaaagcaagaatatgaagaagtagttcagactgttaatacagatttctctccatatctgatttcagataacttagaacagcctatgggaagtagtcatgcatctcaggtttgttctgagacacctgatgacctgttagatgatggtgaaataaaggaagatactagttttgctgaaaatgacattaaggaaagttctgctgtttttagcaaaagcgtccagaaaggagagcttagcaggagtcctagccctttcacccatacacatttggctcagggttaccgaagaggggccaagaaattagagtcctcagaagagaacttatctagtgaggatgaagagcttccctgcttccaacacttgttatttggtaaagtaaacaatataccttctcagtctactaggcatagcaccgttgctaccgagtgtctgtctaagaacacagaggagaatttattatcattgaagaatagcttaaatgactgcagtaaccaggtaatattggcaaaggcatctcaggaacatcaccttagtgaggaaacaaaatgttctgctagcttgttttcttcacagtgcagtgaattggaagacttgactgcaaatacaaacacccaggatcctttcttgattggttcttccaaacaaatgaggcatcagtctgaaagccagggagttggtctgagtgacaaggaattggtttcagatgatgaagaaagaggaacgggcttggaagaaaataatcaagaagagcaaagcatggattcaaacttaggtgaagcagcatctgggtgtgagagtgaaacaagcgtctctgaagactgctcagggctatcctctcagagtgacattttaaccactcagcagagggataccatgcaacataacctgataaagctccagcaggaaatggctgaactagaagctgtgttagaacagcatgggagccagccttctaacagctacccttccatcataagtgactcttctgcccttgaggacctgcgaaatccagaacaaagcacatcagaaaaagcagtattaacttcacagaaaagtagtgaataccctataagccagaatccagaaggcctttctgctgacaagtttgaggtgtctgcagatagttctaccagtaaaaataaagaaccaggagtggaaaggtcatccccttctaaatgcccatcattagatgataggtggtacatgcacagttgctctgggagtcttcagaatagaaactacccatctcaagaggagctcattaaggttgttgatgtggaggagcaacagctggaagagtctgggccacacgatttgacggaaacatcttacttgccaaggcaagatctagagggaaccccttacctggaatctggaatcagcctcttctctgatgaccctgaatctgatccttctgaagacagagccccagagtcagctcgtgttggcaacataccatcttcaacctctgcattgaaagttccccaattgaaagttgcagaatctgcccagagtccagctgctgctcatactactgatactgctgggtataatgcaatggaagaaagtgtgagcagggagaagccagaattgacagcttcaacagaaagggtcaacaaaagaatgtccatggtggtgtctggcctgaccccagaagaatttatgctcgtgtacaagtttgccagaaaacaccacatcactttaactaatctaattactgaagagactactcatgttgttatgaaaacagatgctgagtttgtgtgtgaacggacactgaaatattttctaggaattgcgggaggaaaatgggtagttagctatttctgggtgacccagtctattaaagaaagaaaaatgctgaatgagcatgattttgaagtcagaggagatgtggtcaatggaagaaaccaccaaggtccaaagcgagcaagagaatcccaggacagaaagatcttcagggggctagaaatctgttgctatgggcccttcaccaacatgcccacagatcaactggaatggatggtacagctgtgtggtgcttctgtggtgaaggagctttcatcattcacccttggcacaggtgtccacccaattgtggttgtgcagccagatgcctggacagaggacaatggcttccatgcaattgggcagatgtgtgaggcacctgtggtgacccgagagtgggtgttggacagtgtagcactctaccagtgccaggagctggacacctacctgataccccagatcccccacagccactac
